United States Patent Application Publication US 2004/0214272 A1 - sequence listing, part 14

SEQ ID NO: 55946 - DNA, 1595 bp, Zea mays
  Clone ID: MRT4577_151015C.1
gcaaaagcacttcgagtactccacaccacaccagtccagctgtccgcccccgccacttcgagttcggttggaggcttggaggcttgggcaaaaccctcctcgtcgtcgcgcgctccgcctgcaccacccgccgccgaagagctctctttcaaaaactagcaaagatggtacaatgtactcaacctcctccccagttaaagctcccagagagtaagatcacagaaccgacagatgatgagaaccaagatttgccaccaaaacctgagaaaaggactaggatgcaccacattgagaggcacagatcttgtgttgtgaccttatctgacatagaacttaatggtctgcaacctcgtcatctgcaccaacccattgagatcagcccaggaggatcacagtgttcgctccatgaagaaacacctacagatactaatgcatcacacaggcatgcaattgcagatgctgcttgggaagccctcaaaaggtcaatggtttacttcagaggccaaccaattggaactgttgccgcaatagacaagtctcagggggcagcactgaactatgaccaggttttcatgagggatttcattcctagcgcattggcttttcttatgaaaggagagcacttgattgtgaagaactttctggtagaaactgcacgccttcagtcaagggagaagatggttgaccttttcaagcttggtcagggtgtgatgcctgcaagctttaaggtgcatcatcgcaaccctactcagaagacagaaagcttactggctgattttggtgaaactgccattgggagggttgctcctgtagattctggcttatggtggattattctccttcgtgcttacaccaaatggacaggggacaattctctggctgaaagtactaactgccaaagggccatgcaccttattctcaggttgtgtctctcagaggggtgtgatacttctccagccttgctttgtgctgatggatgctccatgatagaccgaagaatgggcatatatggctacccaattgaaatccaggctctctttttcatggctatgagatgcgccctgagtctgttgaaacaagagtccgatgctgacttcgtgaaccacatcacaaaaagaatccaagctctgagctaccacttgcacagttactactggttggacttccagagacttaatgacatataccgctacaagaccgaagagtactcacagacagctctgaacaagttcaacgtgatgcccgaatcgatacctgactggatatttgacttcatgcctagccgtggtgggtacttcattggcaacgttagtcccgcgaggatggatttccgctggttctgcctaggcaacttcatcgcgattctgtcgtcgttggctaccggagagcaggctgaagcgatactggatcttgtggaggagcgctggcaagaactcatcggtgagatgccgctcaagatctgttaccctgcgatggaaaatcaggaatggcagatagtcactggatgcgacccgaagaacaccaggtggagctatcacaacggaggctcgtggccagtgctgctgtggctgctggtggcggtgagcgtgaagctg

SEQ ID NO: 55947 - DNA, 801 bp, Zea mays
  Clone ID: MRT4577_151016C.1
attgggtacctcgaggccggccgggagtccagctgtccgcccccgccacttcgagttcggttggaggcttggaggcttggagcagaagagcaaaggcgaggggaggcagcgcaaaaccctcctcgtcgtcgcgcgctccgcctgcaccacccgccgccgaagagctctctttcaaaaactagcaaagatggtacaatgtactcaacctcctccccagttaaagctcccagagagtaagatcacagaaccgacagatgatgagaaccaagatttgccaccaaaacctgagaaaaggactaggatgcaccacattgagaggcacagatcttgtgttgtgaccttatctgacatagaacttaatggtctgcaacctcgtcatctgcaccaacccattgagatcagcccaggaggatcacagtgttcgctccatgaagaaacacctacagatactaatgcatcacacaggcatgcaattgcagatgctgcttgggaagccctcaaaaggtcaatagtttacttcagaggccagccaattgggactgttgccgcaatagataagtctcagggggcagcactgaactatgaccaggttttcatgagggatttcattcctagcgcattggcttttcttatgaaaggagagcacttgattgtgaagaactttctggtagaaactgcacgccttcagtcaagggagaagatggttgaccttttcaagcttggtcagggtgtgatgcctgcaagctttaaggtacatcatcgcaaccctactcagaagacagaaacttactggctgatttt

SEQ ID NO: 55948 - DNA, 638 bp, Zea mays
  Clone ID: MRT4577_151017C.1
ccggccgaccgagacgacaggctaggtttctcgtagcacacgcttacagttctcgcggattctcggtgtgcgcggcccggccgcacattggacggccatccagtctcgccgccgcgtggtttgatccatcgatcccggatcgatcgtccgtgggaagaagaagaaccgaacggctggttcatggcggcgccagcgaccagggtgatcggatccaagccagcggactgcttccagttccaagaccctaacacctggacctgcgtatcggagctcgcaagcgatgtggtcgtcgaagtaggagatacgtccttccacctacacaagattccgttgaccagccgtagcggcacgctgcagaagcttgtgaacgagtccaccggcgatggcagcaaaccgtgcaccgtgcgtctggacgacgtccccggcggggcggaggccttcctgctggccgccaggttctgctacgacgtccagacggagctgaacgcgggcaacgccgtgccgctgcggtgcgcggcggagcgcctcgccatgacggaggactacggcgaagggaacctcgtggagcaggcggagtcgttcctgtccgaggtgctggcccgctggagcgacacggtgcgcgcgttgggcacgtgcga

SEQ ID NO: 55949 - DNA, 532 bp, Zea mays
  Clone ID: MRT4577_151018C.1
gatgtattgaaaaggcatttagaaacacaaattttagtatttaataaagcaaaatgcacacatcccccaaacaaaacaagccttattcaacccaaattggtttcatatcacagaaaccaacaggatgccgccttcctccttactggtcccacccactcgaacaaaagttctacagaaataaaaatggctacaattcttctaacacaaatctgaaaagtctaacaccaaaaatcaaaaaaaggaaaattaaacaatcaaatccgattgataaaaccgatttttgtctttccctcactcacttttcagttgatcatctcaatcacttagtacctgtagtgagcaggcttgtatggaccctcaacaggcacactgatgtaatcagcctgggacttgctaagctgggtcagcttagctccaagtttgcccaggtgaagtgcagccaccttctcatcaaggtgcttgggcaaaacgtaaaccttcttctcgtacttgccggtactcttctccttccacaactcaagctgagcaatga

SEQ ID NO: 55950 - DNA, 370 bp, Zea mays
  Clone ID: MRT4577_151019C.1
attcggctcgagagaagctgagcctctacattttttcttgtcgcgctatatcgtatggttaaccgcactagacaatatgccaggttctttatgatttcatattctggttagatcagtattttacataagaatgtttatcttcgtgaactacgcagcgctgttcaccaggatggtgtgaattcattttacaatgcttgtttcatttgaggtaggggatccgaaatactacggtggggattccattcttgatatgagagtgtaaaatcttgcgtgtagattataaggagccttcacactgtacctgtactagagggagttacatatatggacatgatggatgtttttcaattgaccacgacaaaaaacaaaa

SEQ ID NO: 55951 - DNA, 275 bp, Zea mays
  Clone ID: MRT4577_15101C.1
ccttctctactcgctgatggcccgacgaagcacggcgaggaagtccccgggaaggcgccgaggaagcgtggcactaaggcggccgaagtctgcccctgcgaccggggagtaagaagccccaccgttccgccccggaccgtcgctccgggagatccgagtaccagaagagcacggagctgtgatccgcaagctgcgttccaacgcctggtgcgggagatcgcgcaggacttcaaggccgacctacgcttccagagctccgctgtctccgcgctgca

SEQ ID NO: 55952 - DNA, 230 bp, Zea mays
  Clone ID: MRT4577_151020C.1
actcacaagtaaccaggtttaaatatggtgtgtaatacagagcattatggtggcacgcgtattattccaacacttgggggggcccttatgaaaagagagatgctaggaaaaaaacgcgataataattaataaaggacgctatgcttgcgcatgctcagtcagacattggaatggttaaggcataggaacacagctctataaactacaccaccgggaccattactcgaatg

SEQ ID NO: 55953 - DNA, 235 bp, Zea mays
  Clone ID: MRT4577_151021C.1
ctccgtcaggcaccacggctgggcagggcagctgctccacgtcatccgtgaggttcacagtgtggctcctctggtgactcgcggcttgctgggggtcggagccatcatcgacgctgaccgcagatgccaaatcttgtgctaacaccatgaacgtgacaacgtgggcgctccactcggatcatcacctctcggctgcggtggcacacctacgctctggcgattgagggtctgagac

SEQ ID NO: 55954 - DNA, 377 bp, Zea mays
  unsure (1)..(377): unsure at all n locations
  Clone ID: MRT4577_151022C.1
acccacgcgtccgcttttatcagcaccattaatcatctttttcctaaccagnaaaagctccaaatcaagggggctttatcaattatctaactccaaaaaccatgaagctggtgcttgcagtgcttgatagtaccgctgctttgtcgggaggctcgcctgggccaccgacgaccactacctgcacaacgcctttagcacctacggcgaggtcctcgagtccaagatcatcctcgatcgggcgacgccaaagtcccgcggcttcaggttcgtcaccttctccacggaggaggcgatgcggaacgccatcgagggcatgaacggcaaggagctggacggccgtaacatcaccgtcaacgaggcccagtcccgcggcggcc

SEQ ID NO: 55955 - DNA, 308 bp, Zea mays
  unsure (1)..(308): unsure at all n locations
  Clone ID: MRT4577_151023C.1
tctcagacgatgctgtcgtgtctcaagtcccgccgaccgtcgatccagcaacagcgacaccatgaggaagtgcattacgatccacatgcgaanaacgcgcatccaggtaagaaacgccttctgggagctaaactgtcttgagcatggaattcaggctgacagtcagattaccgtgaaaaaaacgcataggcgaggcgatgatgcttgcaacaaatgcgtcagtgctactggtgatgagaagcaactgccaggtgctgcatgtgttgacgttgaacacactgttatggatgaagttagatctgcaactt

SEQ ID NO: 55956 - DNA, 130 bp, Zea mays
  Clone ID: MRT4577_151024C.1
cgcgtcgcagcattgctacatgtggatcccctgtctgtcatgatcatggtttgcctataacaaagggcactgacatacctttaccggatgtcatgaattgctcacgctcggactggattcgatatgcgtg

SEQ ID NO: 55957 - DNA, 404 bp, Zea mays
  Clone ID: MRT4577_151025C.1
aaagaaaaaactggcttttttttggccaaactgttttaaaagggtttgaccctccggggggaacggcaaaaaaaaagtttacggttggactgacagctgggaaaaggtccatagcgggaaacgggaaaggtaaaaaagggaatccggccccgtaaataaccaggggggcccaaaaatgtaaagggggttttgtttgataactgaatacccgatgataataaccacccctgggggatgcctaatgtttaaaaagaagcaaaataatttttgggcccggttgccacctacaaaatccagggttttgggaaaataaaatttttcctcgggttaatttttaaaagatttttttaaaaaaaacgggaaggctttttccacgttggttccatccttagaaaacgtttaaa

SEQ ID NO: 55958 - DNA, 270 bp, Zea mays
  Clone ID: MRT4577_151026C.1
gacgcacctccgaccaccatcccgtcgacatctccacctcgtgctgttcaactgtgctctgccgccactgcttatctccccgtggtgaggacgtctacccgggcgacaatttgtctactcatacgtacgaagacttagaggaatccaatcctgcatcaacgatgcgctaggggacgctcgtgatatcgctaaatgttctctacaagatcgctagtagtacatcctctagatcaacaagctctaatgtgcgatcagagttcccatctacag

SEQ ID NO: 55959 - DNA, 152 bp, Zea mays
  Clone ID: MRT4577_151027C.1
attcggctcgagcgggcacactaggtaatctaaggcaaacaacgtcagggcaccggccgacaactaatgagcacccggcgcgttaacacacgcaggggctctgcttgattcctcacatgttctgtgctacagagcgagcgatatttgtcagg

SEQ ID NO: 55960 - DNA, 396 bp, Zea mays
  Clone ID: MRT4577_151028C.1
aaaaccccaaggggcagggaatttttttaaaggaaggacccccagaaccttttaaccagggttggccaattttaaacaggcccaaccgggggaaacaaaaaaaaaaaaaagggggaacaacaacccccaacagccccctggaaaaaaaaaaaactaagccctaagaacggccggtttttttttttaaccccgacctggggaaccggaaggcgggggaccctgggccggaacccccctaggggcaaatcccaccccccggggggccgtaacaagggaacccaacccgggacccaacctgggggaaacaagggccaaagcggttcccgggggaaaatggtaacccgttaaaaatccaccaaaaaaaacaacccgaagccaaaaagggaaaacccgggg

SEQ ID NO: 55961 - DNA, 270 bp, Zea mays
  unsure (1)..(270): unsure at all n locations
  Clone ID: MRT4577_151029C.1
tatttggcctccgtcngagaggggagaanganncgttngaggnggnggngatggcggggngcggnnggggnggngagggtctgggnnnggggggagncnngngnnannnggaggtgctccgngacaanattcagggnattaccaagncggtgattnggaggntggnttggaggggnggngtgaagngnatttcggggtttttctaagaggagaaccgnggngngttcaagatcttcttcgagaacgtcctcggcgacgccgtcacctaca

SEQ ID NO: 55962 - DNA, 458 bp, Zea mays
  Clone ID: MRT4577_15102C.1
aacaaacattaggacaccacagccacagtttttccaatatttggggggggcggaaatgagcccgagttttgaaaccctcgggtgtctaaaaaagggttcgaagatatatatcgggggaaaggggaggggttaataaaaaggttgctttccgggcctgggctgttttatcgccctggttggggcgggcccagaggaaaccctggtaccaccctttaaaaattcggggggttcttttttggggggcaaaaataaaatgggacaaaccgttctttaacctgtaaccgaacgcccactttgaagttggtcagaagggtgcaaaacaaaaaaaaccccccacggttgggtccgaacccgaagggtttggaaaaaaaaccgaaagttcccccgcggggggttttttttcttaaaaaagggaaaaaaattccccctgggggggaataatcacctgggggaaaccc

SEQ ID NO: 55963 - DNA, 437 bp, Zea mays
  Clone ID: MRT4577_151030C.1
tcgcggactcgtgggctgactcgtgggtggatccaataaaatgtggattgaattgtaatgttaattatctagctgtgtcatgttgtatggttgtatgattatgatttattctgaatcctgagtacctggatcgcagttccaaaactatttagatttagaggtacattgccagggaaacttgtgacctgtttgacaaataatcatcatgtgtgattataattgtgtgtgttcacaccatgacactttgatactatggttacattttggtctccgttgtaacccaggtttcattctgagatatggaaattttttgtggttgtgtttccctggcgtatagcttttctttctgtaggcacctttttggatgcctgttcttcaaagatggtgttaagacatgacaacattatgtacctatgtagtgctagactcatactcag

SEQ ID NO: 55964 - DNA, 938 bp, Zea mays
  unsure (1)..(938): unsure at all n locations
  Clone ID: MRT4577_151031C.1
cagaaaatatcggggataaatctcaatcaatatttggattatttctgggaaacacacgtgggtttgggggccccattttcgggtccatctcatatgtaatctaaaagagggcccctccaacgaggggttgctgcctcnacaagacaggattcatcaaagagaactggttgtatggcagcaattgttgctgctgtaggaaggcggccaccaatgggttagccactaccaagggattaagtaactgttgtcgctgttgtaggtacgcagcagagttcgacagagtcagttggttgaatggaagcagctgttgcaagtaggcaacagggtttgccacagctagttgagtcagagctggtacaatctgttgcaacaattgttgttgcaggtatgtaggtgcattgcccacagcgagcgggctagatgaaagcagttgttgctgttgtacgtaggcgacagggttcaccatggctagttgactgagcgctggcagaaactgttgcagctgttgttgttgatggtttgcaactacgttcgccagagcaagtgggttggatgcaagcagctgctgttgcaagtaggcggcagggttcaccatggctaggtggctcagtactggtaggaactgttgtagctgtatgcgttgtgatggcttgtattgttagatgtgccaaagattgttgttgcaattgggcaattggttgttgtaagacgctcgccgcaagcgcttgttgtagcctgttggcgtgcgcagctgagtgtttgaagcccactcaagtaactggtgataggacctgtgcaatgatggccataggaacaagtgagcagtgtggaaaaatgagcgcctttgatgcgctcacagaaaaggcaagaagcgcaaggagggctaactatgcttggagccagtgtgttggtcgtgctagtgcgcatcgctatggtgt

SEQ ID NO: 55965 - DNA, 939 bp, Zea mays
  Clone ID: MRT4577_151032C.1
attgacatacacaccatgcgaatcgctctaacaacgacctaacaacattggctaccaggatattagccctacttgcgcttcttgccctatttgcgagcgcaacagatgcgttcattattccacaatgctcacttgctcctagtgccattattgcacagttacttgcaccagttacttcaatgggcttcgaacacctatctgtgcaagccaacatgcatcaacaagcgcttgcggcgagcgtcttacaacaaccaattgcccaattgcaacaacaatccttgccacatctaacactacaagccatctcaacgcaacagcaacatcagttgctaccagcactgagccacctagccatggcgaaccctgccggctacttgcaagagcagctgcttgcatccaacccacttgctctggcgaaggtagttgcaaaccagcaacaacaacagctacaacagtttttgccaaggctcagtcaactagccatggtgaaccctgcggcctaggtacaacaacaacaactgttttcatttagcccgctcgctgtgggcaatgcacctaaatacctgcaacaacaattgttgcaacagattgtaccagctttgactcaactagttgtggcaaaccctgttgcctacttgcaaaagctgcttccattcaaccaactgattctgtggaactttgttgggtacctacaacagcgacaacagttacttaatccattgggagtggctaacccattggtggccgccttcctacagcagcaacaattgttgccaaacaaccagttctttttgatgaatcctgtcttgtcgaggcagcaacccatggttggaggggccattttttagattacaaatgaaatgtactcgataatggggccctcaaaccgaggtgtgtttcctagaaataatcaaaaaattgattgagatttatctcgat

SEQ ID NO: 55966 - DNA, 406 bp, Zea mays
  Clone ID: MRT4577_151033C.1
aagggccggctcgccgtcgccgggatggtcgtcatatatttttcacgaaattgacggagcatgtctctctacgtgccctgtacgcactcatggcatggtcgtcatggcttttccatttcaatcctagcctgaacagtgagtgaagtaagcattgattgtctccaccagcgaatcaatgtacgcggaacaggggagttttatctcagcaagtgcatggcgcagtctgcggcgtcaatgcaatagtactgaggcttctgtttgcgcgcgttcattgaatccttgtttgccgaaatggcgactgcgccggccccggctgcacttgccatttgccaagcagcaatcaggttcacatgaatggagcggacccccatttgaatccttctaggcacatcaatcattcgctccc

SEQ ID NO: 55967 - DNA, 451 bp, Zea mays
  Clone ID: MRT4577_151034C.1
ttctggggctcagtttggatcgtgaagtcgacagtgataaagatggagactactgactgagccaactggagctggtaagagacattacccgagtcttattgcctgggggcgagggtaggaagttttgtttataatgggcatgtgcgtggcaggtggtgtacgatgttagggcatggtgaacggtgctggtggctgtagctagttgtgcaggtgaggcaaagtaagaagagaagggggaagactaggaagagagctaagatgatgtgggtttgagcctctttgactaaggtgcataggtatcatagtgttggtttgggcagtgaatcttgaggaaaaacatagtgatgtttagattttaaggttgttgtatggtggaaagtattggtaaaactgttactggtctttatattggggaataaatccgtatattgatatgctgattgtgttttac

SEQ ID NO: 55968 - DNA, 780 bp, Zea mays
  Clone ID: MRT4577_151035C.1
cgcctgcggtaccgggctgctattacagggtcgacctcagcgttcgtattgggcttttaacacccatctgtgcatgcctgtaggctacaacaagcaattgcggggagcgttttacaacaaccaatccgccagtgtgggcacacattccttggcacatctaacaatacaaaccatcgcagcgcaccagcaacaacggttgctaccagcactgagccacctatccatggtgaaccctgccgcctacttgcaacagcagttgcttgcataaagacccacttgctgtggcaaaccttgttgcaaaccaaacacaacaacagctgctacagtttgtgccagcgctcagtcaactagccatggtgaaccctggcgcctacctacaacagcaacaactgcttttatctagcccgctcgctgtggccaatgcacctacatacctgcaacaacaattgttgcaacatattggaccatctctgactcagctaggtgtggcaaaccctgctgcctacttgcaacagctgcttccattcaaccaactgactatgtcgaactctgctgcgtacctacaacagcgacaacagttacttaatccactagcggtggctaacccattggtcgttgcctttcctacagcatcaacaattgctgccatacaaccagttctttatgatgaaccctgccttgttgtggcagcaccccatcgtatgaggtgccatcttttatattacatatgatatgtacttgataatggtgcccacatatgccgcatgtgttacctagaaa

SEQ ID NO: 55969 - DNA, 618 bp, Zea mays
  Clone ID: MRT4577_151036C.1
gcggggcagacaccagacgcagtcggctgccgcagactggtagtagccggcgcgccgtcaccgtatcctcagatcagcggcgagcagaaaccacaccactctactgacgcccgacgagcagtgtaacattttcctccagccatgggtaaggagaagtctcacatcaacattgtggttattggccacgtcgactctggcaagtcgacaaccaccggccacctgatctacaagcttggaggcattgacgagcgtgtgatcgagaggtttgagaaggaggccgctgaaatgaacaagcggtcctttaagtatgcttgggtgcttgacaagctcaaggctgagcgtgagaggggtatcaccattgatattgctctgtggaagtttgagaccaccaagtactattgcaccgttattgatgcccctggacaccgtgactttatcaagaacatgatcactggtacctaccaggctgactgagctgaacttatcattgactacaccactggaggaattgaggctggtatctccaaggatggtcagacacgggagcatgctctccttgcggtacactgggagtgaaccacatgatcgcgtgcttgttcaagatggatgcacccactc

SEQ ID NO: 55970 - DNA, 385 bp, Zea mays
  Clone ID: MRT4577_151037C.1
ccaaggggtacgcggccgcgtgggtttgaacgtaaatgagctaatgaaagccttcgtagtgaagccaaacgatatgtttacatggattgaccactcgtctatgatccgtagcggctcagagcttcacattgcaatcatcattacgatactcctcacgtgacacgtgaaggcacgatattcaaacccaactgtcattccttctggtgtcgaaagcgcaacgtgcttatgctcactgactgcatgctcatagaagggaaaacactcgtgaggacttttttgcgcggaggcgctggtaccaactgtctggacccagcatggacattaactagggctatcttatgtcagaccaggtgatcgggaagagaaaccaccctccttgcatgag

SEQ ID NO: 55971 - DNA, 993 bp, Zea mays
  Clone ID: MRT4577_151038C.1
ggccgcttttttttttttttttttgagataaatctaaatcaatatattgattatttctaggaaacacatgtcggtatgagggcaccattgtcgagtacatctcatatgtaatctaaaagatggcacctccaacgatgggttgctgcaaggcagggttcatcaaagagaactggttgtatggcagcaattgttgttgctgctgcaggaaggtagcgaccaatgggttagccactgccaatggattaagtaactgttgtcgctgttgtaggtacgcagcagagtttgacacagccagttggttgaatggaagcaactgttgtaagtaggcagcagggtttgccacagctagctgagtcagagctggtacaatttgttgcagcaactgttgttgtaggtacgtaggtgcattgcccaccgcgagcgggctagatgaaagtagttgtaggtagacggcagggttcaccatggctagttgactgagtactggcataaactgttgcagctgttgttgttgctggtatgcagctacgttcgccagagcaagtgggttggatgcaagcagctgctgttgcaagtaggtgacagggttcaccacggctaggtggctcagtgatggcagaaactgttgttgttgttgttgcgttgcaatggtttgtagggttagatgtgccaaggattgttgttgcaattgggcaattggttgttgtaaggcgctcgccgcaagcgctagttgtagcctgtaggcttgcacggctggatgttcgaagcccattgaagtaactggtgggaggaactgtggaataatggcactaggagcaagtgagcactgtggaataatgagcgcatttgttgcgctcactaaaagggcaagaagcgcaaggagggctaatatcttggtagccattggtgttaggttgttgctagtgcgcttcgcttggtgtgtttctaaatgctcaaaatattataggtccccgcgtacctgcccgggcggcc

SEQ ID NO: 55972 - DNA, 969 bp, Zea mays
  Clone ID: MRT4577_151039C.1
cacgcggagatctcccataatattaggagcattcaaaaccacaccaagcgaagcgcagtagcagcgacctaacaccagtggctaccaagagattagccctccttgcgcttcttgcccttttagtgagcgcaacagacgcgagcattattgcacagggctcacttggtcctagagccattattccacagttcctcccaccaggtacttcaatgggcttcgaacatccagccgtgcaagcctacaggctacaactagcgcttgcggcgagcgccttacaacaaccaattgcccaattgcaacaacaatccttggcacatctaaccctacaaaccattgcaacgcatcaacaacaacaacagtttctgccatcactgagccacctagccgtggtgaaccctgtcacctacttgcaactgcagctgcttgcatccaacccacttgctctggcgaacgtagctgcataccagcagcagcaacggctggaacaggttatgccagtgctcagtcaactagccctgatgaaaccctgccgtctacctgcaactactttcatctagcccgctggcggtggtcaatgcacctatgtaccttcagcaacagttgttgcaacaaattgtaccagctgtgactcagctagctgtggcaaaccgggctgcctacttacaacagttgcttccattgcagtcaactggatgtgtcagtgtttgatgcgtaccagccaaaggtcagacagtgcgttaatccattgacagtggttcacccattggtcgcatcctttccagcagcaagtttctacaatagataccatgcatccagttctctttatataaaccttgcattgcacccttcccttccgtaggaggatccatctgttaatggagtgtatcaaatgtgaatggtaccatggagacctagagcagctcatgccccacctggagcaaaacaatggatttgttcccttttctcagc

SEQ ID NO: 55973 - DNA, 252 bp, Zea mays
  Clone ID: MRT4577_15103C.1
aaaaaaaaacacagcatacattatatccgtgagtgtgaacatttttttttctttacacacggagcacatacttatattctccacaacacaaaattgaaaacaacagccctctccttttcgcgggctgtttcccaagagcaaaaaaatattttctgtccccgggctacaaatcatcataaaaatgtggtgaggcataacactcgctctcaggctgggcatattaagcgacacagaaaccggctcttatttttt

SEQ ID NO: 55974 - DNA, 346 bp, Zea mays
  Clone ID: MRT4577_151040C.1
acagggccccccctcccccaaaaaaacaatcacaagcaggcggggcgcccagggacagagccaaaaccaaaggccctacacacgttatagccaaatatctccatccaaattaacagagcttgcacaaaaacgggactagacgctaccgctagatagagtattcatccaaagtggaacctaccgcttcagccaccatggctggcacccacaatcataacttgcacaagcaacctacccttaattttcgggggaacgacgacactaccctgcacctcttacatttcaccctcaattgccttcccaacccctggtcagtgtcctgtccataagaggaaacatagcttgc

SEQ ID NO: 55975 - DNA, 1374 bp, Zea mays
  Clone ID: MRT4577_151041C.1
ccgggccgggatccaccttattacgcgggtcgggcagcacaccagccgagcagaggatcgacatcctcccatggatggttagcaccttattattcctcgttgcatcgtgtctctcatcttgaggagggagaagcaacaggcgcctggcattactgagctggtggtgactctgtcgcatggtctgttgttacacgggcgctacgaccagcgacttgagcgggctgagcacacccaagtgctcaagcctgtacgactgaacaagccgctgcggcgaggtgtattacaacagccatgttccgatttgccactaccgtccttggctcatgtaacaatgcacaccatcgcaccccaacacaagcatcaatttctaccagtattgatgcacctagccatgcggaaccctggcgcctacttgcgacagcagttgcttgcatcaaacccacttgctctggcaaacgtagttgcaaaccagccacaacaacaggtgcaacagtttctgccagcgctcagtcaactagccatggtgaaccctgccgcctacctacaacagcaacaactgctttcatctagcccgctcgctgtggccaatgcacctacatacctgcaacaacaattgttgcaacagattgtaccagctctgactcagctagttgtggcaaaccctgctgcctacttgcaacagctgcttccattcaaccaactgactctgtcgaactctgctgcgtacctacaacagcgacaacagttacttaatccattggtagtggctaacccattggtcgccgccttcctacagcagcaacaattgctgccatacaaccagttctctttgatgaatcctgtcttgtcgaggcagcaacccatcgttggaggtgccatcttttagattacatatgagatgtactcgataatggtgccctcatagcggcatgtgtttcctagaaataatcaatatattgattgagatttaaaaaaaaaaaaaaaaaaaacaaaaaaccatacaaaacataaaaaacacaaaaaaaacaattaaataaaaaaaataaccaagaaagaaacatataaaaatacttggaaaaacacttgctagaatacaaaccaaaagctaaaaaaaatgtagctgaaaaacaaaaaaaaacacctttcccaacaccaaatgccagagcccccccggggaaaaaaaaaaaaaaaaatatttttttttttttgggggccccctcccccacactattctgttagttatgcgccacgctccttcctaaaaaaaaacgactgttggggcggcaaaagccccctccaaaaggtgtaacaccttctaaaaaagccccccccaaaaaccctgctggcttccttgcggggggacttttttttttt

SEQ ID NO: 55976 - DNA, 731 bp, Zea mays
  unsure (1)..(731): unsure at all n locations
  Clone ID: MRT4577_151042C.1
cttaccccacccgcccgccgccgccgcctcctcgcatccactccttctccttccttcgagtttcagccatgggtaaggagaagactcacatcaacatcgtggtcattggccatgtcgactctggcaagtcgaccaccactggccatctgatcttcaagcttggaggtattgacaagcgtgtgatcgagaggttcgagaaggaagccgctgagatgaacaagaggactttcaagtacgcctgggtgcttgacaagctgaaggccgagcgtgagaggggtatcaccattgatattgccctgcggaagttcgagaccaccaagcactactgcaccgtcattgatgaccctggtcaccgagacttcatcaagaacatgattactggtacctcccaggatgactgtgctgcgctcatcattgactccaccactggtggttttgaggctggtatctccaaggatggncagacccgtgagcacgccctccttgctttcacccttggagtgaagcagatgatctgctgctgcaacaagatggatgccaccacccccaagtactcgaaggcccgttatgaggaaattgtcaaggaagcctcttcctacctgaagaaggtcggataccacccctgacaaggttccccttttgccccattctctgggtttgaagggggacaacctgatttgtgaggtcccccacccttgactggaaaagggcccttacccttcttgaggctc

SEQ ID NO: 55977 - DNA, 433 bp, Zea mays
  Clone ID: MRT4577_151043C.1
cccacgcgtccgggatttcgagatgggtgtcttcaacaggacccctgagtgacttaagatgaacctagttgggaaggatcctgctctagacactcctgatggccctactatagagagtaatgctatcagcacgctatgttgctcgctcgaaggaacacacaccttgtcttcgggtctacccatattgaacaagcgcacgtcgagcaatggatggattttgccacaacacaagttgatcctgcagtcgcatggtacttgtatccaaggctcgtgtcccgctcttatgtgagcacaactgaggaaacagctatgtcttcattgaagaggtggctggatgctctgaacacacacctcgcctaaaacacatacgtggtggggcatgctgatactatacgtgacattggattgacatgcagcctctaccatggaattg

SEQ ID NO: 55978 - DNA, 710 bp, Zea mays
  Clone ID: MRT4577_151044C.1
acagcagagttcgacatagtcagttggttgaatggaagtagttgttgcaagtaggcagcagggtttgccacagctagctgagtaagagctggtacaatctgttgtagcaactgttgttgcaggtatgtaggtgcattgcccatagcgagcgggctagatgaaagaagttgttgctgttgtaggtaggcggtagggttcaccatggctagttgactgagcgctggcagaaactgttgcaattgttgttgttgttggtatgcagctacgtttgccaaagcaagtgggttggatgcaagcatctgatgttgcaagtaggcgacagggttcaccacggctaggtggctcagtgcttgttgttgttgcgttgcgatggtttgtatggttagatgtgccaaggattgttgttgtaattgggcaattggttgttctaagacgctcgccgcaagcgcttgttgtagcctataagcttgcacagctgggtgcttgaagcccattgaagtaactggagggaggaactgtggaataatggcacccggagcaagtgagcattgtggaataatgaacgcatttgttgcactcacaaaaagggcaagaagcgcaaggagggataatgtcttggaagccattgttgttaggtcgttgctagtgcgcttcgctaggtgtgtttctgaatgctcaaaatattatgggtccccgcgtacctgcccggg

SEQ ID NO: 55979 - DNA, 401 bp, Zea mays
  Clone ID: MRT4577_151045C.1
tcttatcaccctagacgtgcactcttgcgacaccattcataatgtcagggctgcgatccataacaaggagggcatccctcctgaccagcaacgacttatcttctccggcaagcagctataggacgtacgcacacttgctgactacaacatccagaaggagttcaccatccactttgtactgctccttaagtgaggcatgcaaatctttgtcatgaccttgactgtcaagacaatcacccttggggtggactcctcatacaccattgacaatgtgaaggcacagatccaggacaaggaggacataccacctgaccagcaacgtctcatcttttccggcaagcatttaaaggatgcgaggacccttgctgactacaacaatccagaggagagcaccctccact

SEQ ID NO: 55980 - DNA, 1913 bp, Zea mays
  Clone ID: MRT4577_151046C.1
ggccgcttttttttttttttttttgttctcaaatggttatgcttattttcaagccaaatctccacagcattcactttgtcgtgccctccagagtttttttttttttttttttggagagtaacgaggatcacacatcattataggcaacaccagccaaagtttacaagtaaagtagttcggcaggacccggattgagatttggtagaaatataaaccgggcaaaattggtgatccttctcaagcactcctactgcagtgccaacagggtctgcactctacagtgctagccaaaaccatcttgttctactttgggtggatgaactgaaataagtactacttgatgccatcactggcagaacacaaccatgatgtcatggcggaggtggctttgatgcctcatcctcattgccatgttccttctgctcctgatgatgataacgaccaccaccaccaccaccttctccgccatgagccttctcctgcagctggtccttgagcccctcctggtacgtctccacgaaattcttcatcgcgtcggtgtacgtggacgcgcgggccatgtaaatccgccgcagggcaggcttcagcgtctctgcgccacccctagcggcgacagcgaggtcctccagcacagttggctcgctgctcgccttccccttcctgtcactaccagagctggggtggctgccattggacgactgctcctccacgtcctcggctgccttcttgtagtcgttgggcctcagctcagggccgatgtcccggacccatgacgcgccgtacagccgggtggcctccttgaggatgcaccagcgttcatgccatgagagcttgggccgcttcttgatgtgaggagggtccggcagtgacgacgggaaggctatctccttgaggtcataccgcacatagtcatacagcttcctgcacacgactctgagcttcatctccctttgtttgctcccttctgcagcgacttggatctgatagcaagttattaggggcaccgtgctgaattaatcttaatcctctgagtcacctaaaagatggcacctccaacgatgggttgctgcctcgacaagacaggattcatcaaagagaactggttgtatggcagcaattgttgctgctgtaggaaggcggcgaccaatgggttagccactaccaatggattaagtaactgttgtcgctgttgtaggtacgcagcagagttcgacagagtcagttggttgaatggaagcagctgttgcaagtaggcaacagggtttgccacagctagttgagtcagagctggtacaatctgttgcaacaattgttgttgcaggtatgtaggtgcattgcccacagcgagcgggctagatgaaagcagttgttgttgttgtacgtaggcggcagggttcaccatggctagttgactgagcgttggcagaaactgttgtagctgttgttgttgttggtttgcaactacgttcgccagagcaagtgggttggatgcaagcagctgctcttgcaagtaggcggcagggttcaccatggctaggtggctcagtgctggtaggaactgttgttgctgttgcgttgtgatggcttgtattgttagatgtggcaaggattgttgttgcaattgggcaattggttgttgtaagacgctcgccgcaagcgcttgttgttgcatgttggcttgcacagctaggtgttcgaagcccattgaagtaactggtggggggaactgtggaataatggcactaggagcaagtgagcattgtggaataatgaacgcatttgttgcgctcacaaaaagggcaagaagcgcaaggagggctaatatcttggtagccattgttgttaggtcgttgctagtgcgcttcgcttggtgtgtttctgaatgctcaaaatattatgggtgatccccgcgt

SEQ ID NO: 55981 - DNA, 490 bp, Zea mays
  Clone ID: MRT4577_151047C.1
gcatggccgtgcagctgcacgtagccgccgcagggggaggtactacgggaggcctatgctggacgaagtgcggctccgggcgtccgtcggatggcccgcaaggaggagggaggagtccacgaaacgcctgcagccggcgcgcgcgctctactcgtaccgagtgcgcatgggggacggtacggctcatccacgcactgtcttggcgggctcaccacgtgctgagcagcccatacttccggctcggctgtcacctactcagtcgcccgggtgggttactcacgtcgtccgggcacgctgtagcaccagacgttccatttccacttcggctactgctggcccgtgtcgtcggtggagcagacctgccgggtatcgtaatggggggagcttaagttcatcatctagtggctggcgatgatcacttgcggccgggggactgctattttcaagcacacgtatggcccagacctataccagttcgatagtaacgggc

SEQ ID NO: 55982 - DNA, 188 bp, Zea mays
  Clone ID: MRT4577_151048C.1
acaaacaacgccatacctacagaccatcaccgaggggaagtacaggactgctgatacttggtggatcggcatcgacatcagagtttaaaacgcgactgtgatcacatactgagaaacggatgtgattcatccatctgattgttttgtacatcctaatatttttttgtcacatatgagaggagctttag

SEQ ID NO: 55983 - DNA, 142 bp, Zea mays
  Clone ID: MRT4577_151049C.1
ccccaaactgcaagtccgccaagtttttgtatgcatagatggccttcacttcacctgcgaagattcacagcaaagaagcgtcgcaaacagagatcacaatgtatacctcaaaccatatctacgaaaatcattatcgataaac

SEQ ID NO: 55984 - DNA, 173 bp, Zea mays
  Clone ID: MRT4577_15104C.1
tacgtgtgcgcgggcaatcaacgcaacccgggggagctttacgggggaaacccgcatctcccatagaaggctgggataaaaactaccgaaaactgggacgaagagaaagtccggttcctgataatgagcggtggagggcactataaggtacgcacggacatgaaggcggacgg

SEQ ID NO: 55985 - DNA, 330 bp, Zea mays
  Clone ID: MRT4577_151050C.1
cgggagcacagagctagctagccagccagccagcagccagcttgctcgccgcgcccgtccttcttcctcgcctccggtccagtccgtcccgccctccaccgtcgccgccgcattcagggatggagatgatgaagatcgcctgcgccgttcttgtcgtcgcctcggcggacaccgtggcgctcgccgcggaggctcctgctcctgccgccaccagcggcttctcctccgacgcgcccgccgtcggtgccgccctttgggccgccgtcgtctgctggtaagcctactacatttagtgagttggacggtgctcctgtaggccacagaagagcc

SEQ ID NO: 55986 - DNA, 220 bp, Zea mays
  Clone ID: MRT4577_151051C.1
attcggctcgaggcaggaacttctctctgtttacaagggggacaggctgtttcgctggctggtctcaaagcacagaggcacggtgtgcggctgggagttctagaacgcggatggcgggcgggacgagctgacaggtgtcaggcttggtcacactatgggcgacttctatattgaaattgactacaactacaaatactgcgatgactaccacaacgaagag

SEQ ID NO: 55987 - DNA, 836 bp, Zea mays
  unsure (1)..(836): unsure at all n locations
  Clone ID: MRT4577_151052C.1
gccccaagaagtatctagaccgacttgagaagaaggtcgtgaagcaataagtttgtatgtctaaaataattcaggccacaaagcataataacagcctcaacaaaaacctgaggcagttttcaaagacggcttgctctctcaaattggagattttcctagaatttaagaacatcccttgcagtttggataccagtaaggtgtatcgagttaagtatcttctcaagcaggtgcaagtgcaacaaagcaaaaagacagataaacgaaacaaatatcctacagcatgttatcatatagcacgcatctcaaaaggcgaatgctgtttgaagatccttgtattttcatcagttcgtgagaggactgcagcaaatgttgttaactgcccttgcccgagccttctgatcctgaggcaggcctctgctctttaaacaacaaactcactttagcacggcaaaaggaccgtgtagcaacacgctaatctgtacgagtctccagctgctcatctatcctgagctgctccgcggcagatagcagcaggtccacaccatcaaaattccaactttgtagtccagcatcctccttccggtggagcttcagcgtcctcctctcgtactgtctcatcccctcttatgccctctccacgctgcacgatgagcaataccactgccccttgggtattgaagtatgcgagggtgttatgcagtagatatggtaagcctcgtcgcaactatcgcacagaatgctcaggtcgtcgtctttgtcacacagacaanctcggcaaaggcaagacgggcagtaccagcacgggctgcccatctctacactggtagagatctgca

SEQ ID NO: 55988 - DNA, 620 bp, Zea mays
  Clone ID: MRT4577_151053C.1
atgcccgccgccgcccgtagggcctcctccccttcctccgcctcattgagcttcgccacgtcgcagctcgccggcctctccctctccctctccccaagaggcagcagctccagcccactgtcgcgcggcgtgtgtgcccgttcacggacaagaagacgaaccgggcgaacaaggtgtcgttttccaaccacaagacgaagaagcagcagttcgtgaacctgcagtacaagaagctgtggtgggaggccggcaagcgcttcgtcaagctgcgcctttccaccaaggccctcaagaccatcgagaagcacggcctcgacgccgtcgcgcgcaaggccggcatcgacctcaacaagaagtgagcaagaagtgagcccatccgatgagcagccaaactagtgtggggtggcactagcttagcattcacgttcgcagggtcgtctcgtctgtctgtctgcctgcctgcctcctgctgttctttcgcaatcaaatcatatcattatatttcctccccgttttgatttgtgtaccataccaatcagtgtaggcagatcgaggttgcacatatacgtttttggtcccttgttgggtcctctgaaaaaaaaaaaaaaaaaaggccccta

SEQ ID NO: 55989 - DNA, 323 bp, Zea mays
  Clone ID: MRT4577_151054C.1
tcaaggatctatctatttaacggacacattcaaattttcgagggggtttttttagagaaacccccccgaaacaaaaacccaatacggtcctaataaaacctgtaagacaaactaaaacttcggcccactccaggtcacaacaaaaaagggcgtaattgaaccactaataaactttacccccggggggccactcaacacattaaaatacagcccacccaaaaatgtgggcccccccccacccatgacgatcataaaatgaaatttctccaaagccgcccccttttagaaaaacaaaacagtcgctaaattcaaatcccaaacaa

SEQ ID NO: 55990 - DNA, 410 bp, Zea mays
  Clone ID: MRT4577_151055C.1
aaccaccaaaaaacaaaagctatcggttttgggattttacaggcccacccttggacatgctcacccccggcctgggggcatccacgcggggccttgcaaccttatgggggggaacaaagagggggaccccctcgaaggccttgagagccgatttcagggccttttgggggtaaaatgcggcacccaggggggtccaaggtggcacaaagccgggggggggctccacggccttttgaaactggggaatcgccttggaaaggttggtctctcgcttggagctgacccccaggggattggaaacctgggcaagaacttgctcggctctggcccatttggcaatggctggctgcaaatatttgatagcagctggaaaaaattttctccggagcaggactggtccaagctcaaaa

SEQ ID NO: 55991 - DNA, 1309 bp, Zea mays
  Clone ID: MRT4577_151056C.1
cattgggtacccattgggtgcctcgaggccggccggggttccgttccttccgtccatccatccgccatggcgaccgctacgctactgagctcctccttcgccatgcccgccgccgcccgtagggcctcctccccttcctccgcctcattgagcttcgccacgtcgcagctcgccggcctctccctctccgccggcgttgcaactccaaccgccgtcgccctcctccccaagaggcagcagctccagcccattgtcgcgcgtaagtcttcgatttgcctttgctttctacgagcgcgccttcagctttcgtggttgctccgctcttatctgaatcttcagctggtctcggctgttccattctttttctccgcttctgctagtaattgattcagtcaatcttcagagcacttaagatagattcccatccgactgattgacgagatgatgatggagtgtgctgtgtgactgttcagggcgtgtgtgcccgttcacggacaagaagacgaaccgggcgaacaaggtgtcgttttccaaccacaagacgaagaagcagcagttcgtgaacctgcagtacaagaagctgtggtgggaggccggcaagcgcttcgtcaagctgcgcctttccaccaaggccctcaagaccatcgagaagcacggcctcgacgccgtcgcgcgcaaggccggcatcgacctcaacaagaagtgagcaagaagtgagcccatccgatgagcagccaaactagtgtggggtggcactagcttagcattcacgttcgcagggtcgtctcgtctgtctgtctgcctgcctgcctcctgctgttctttcgcaatcaaaccatatcattatatttcctccccgttttgatttgtgtaccataccaatcagtgtaggcagatcgaggttgcacatatacgtttttggtcccttgttgggtcctcctctgaatcgatcgtgtctccatttcacagtcgtgatcaatggcagaaagttaagtaacctggtcggctggtcctccctctcacgaattcgctgctgataaagtatagattcaattgaaatttaaatgaattgttcctgcccaaaaaaaaaaaaaaaaaaaaaaaaaaaaaaaaaaaaaaaaaaaaaaaaaaaaaaaaaaaaaaaaaaaaaaaaaaaaaaaaaaaaaaaaaaaaaaaaaaaaaaaaaaaaaaaaaaaaaaaaaaaaaaggggggggcccccttttaaaaaaaccaaattttattccccgtgttttgaaaaataaaaactttttttttggggcccccaaaataaattcccgggcccgtttt

SEQ ID NO: 55992 - DNA, 265 bp, Zea mays
  unsure (1)..(265): unsure at all n locations
  Clone ID: MRT4577_151057C.1
cgctggactccttcgacgtcatcgactacatcaatgaagcgcttganaaacgagtgccgggggaccgttttttggggcgagatcctcnccatcncccccaaggaccccctctttcttgccaccaaagttgttaccaaaggccgcttgaacaaggaccgcatcctcttccaagttgaaacccgcaagccggaccgcccccttttcaaaaccaaagaagccctcaaaaaccttcccgacttcattgattgcattcccaagcttatta

SEQ ID NO: 55993 - DNA, 354 bp, Zea mays
  Clone ID: MRT4577_151058C.1
aaaggtagaccaaaaaaaaaggattttttttttcccccaaataattttaacccccaaaaatattatgctaaaaacaaaaggtttttattttctatccaatattaatttataataaaaacaatggggattttgcacaaaatttaaaaaatcagttataccttaaaattttaaccccccaattcttaaagttaaaaatttcctaaaaactattttgtggggtgaaattacaaaactcatacccccgatgaggggtgtagtaccaccttatacttttatttaaggaataataaaatttttaaaaaaattttttttgttttaaaaaaaaagtgtttaataataattttttaaaaataa

SEQ ID NO: 55994 - DNA, 476 bp, Zea mays
  Clone ID: MRT4577_151059C.1
aagggcaaccgattattgacacacatggattttactaacataaaccagtgcaacatacaaccatacaggcattatcttgcaaggtattaagtacctacaaaaattacaatttaggaaaagggagccttcctatttaggaactgccatgttttctactacctacataagcacatgacgctgacgtaccctgaaaaaaaattcacgtatcagaacacatacaaatgatctgacggagttacttacaaaaccaagcactgcacaaagggttgaaccggcaaagctcctgaggcacggatcttgttaacttggaacaacattacgaaactctgagaacacatcattgatacaacttgatctgttgaaagcagccggttgcccacttttatgagtagccgaaagtactactcacagactaatggcacatgctgacatgaatgtggacgaagtcacacacttatgagcctatattatataac

SEQ ID NO: 55995 - DNA, 316 bp, Zea mays
  unsure (1)..(316): unsure at all n locations
  Clone ID: MRT4577_15105C.1
gggggggccncttgggctgtgggacagtggtgctaaaaggacagcacaatttttttttttatttacacgcagattatcattatttgtggggggggggttttcttaatctgggacacgccttccgtcgacgcccagttgaccattacaaggatcctaagacgaggggaactttttaacggccttagtgcccttggaaacagggtgtttggggagcttccccggggggaccaggcccacccaggtctggatctcccgggagggggaggggggcttcttgttgttgcgggccagtttggggggcttgggcccgagcttt

SEQ ID NO: 55996 - DNA, 820 bp, Zea mays
  Clone ID: MRT4577_151060C.1
cggacgcgtgggcggacgcgtgggcggacgcgtgggcggacgcgtgggcggacgcgtgggcggacgcgtgggcggacgcgtggggttccattacaacaaaagatcgtgctagtaagcaatacgctcaatttgagtttgaggtcgatttctggagcattcgagttcttttccagtaaacttttcaggtttaagcgcggattgatggcagagctgctgtagatttggagcattttggggttggttttttgcgatttgaggatcgaatcgggctggtacaaccgcgctcacgtgcatatataaggcgaattggcggtttgttggctacaattgttcggttcttatcttgaagggtggtgcgaattggaggattcttcccgaatcgagaaggtgtaggccaaattcgcaaggaagctgcagctatccgcgtgagaaggctgcctctcacaaattctcggtcggtgccatcccggcggtggactgcttttgggcttcttcgaaggttcgtatcttttggctcaggagaaagtggttctgaaggcctcgggcttctcatccccaattcgatccgttcccgagacggtgattgggtcatagatggggacggggtcgagcatcctgggcgcggatggagagtggggggagacgtccctcggcgacatgccggagagctgcgtggcggcggtactcctctacctcgacccgccggagatctgccaggtggcccgtctcaacagcgccttccgcggcgccgcctcggcggactgcgtctgggccgccaagcttcccgccaactaccgttaccttgcggccctagccgcgg

SEQ ID NO: 55997 - DNA, 349 bp, Zea mays
  unsure (1)..(349): unsure at all n locations
  Clone ID: MRT4577_151061C.1
tttatantttttttggttggttttctctcttttgttttgttcttttttgttgtttggggaacaagggcacctctaaatggtggtgtgacggcccgggaggggctcaaaagcttatctccaaaaaaaagggcggacggtgctataccagggggccctgtgcttaagatcccaaaaattgctataccagagacgtaccctctcggggtaaattgaacccaaaggctcgcagctacaaaaaaatttacgacaagtgcagggcggtttttgtttgctcaagccgaccccctctgcatgggggggaattgcccgttggttctccctggaccaaaggaaacaccgggccaacttt

SEQ ID NO: 55998 - DNA, 610 bp, Zea mays
  Clone ID: MRT4577_151062C.1
gggaacaaaaaaaaatctgaactttttaaaaactcacacaacaaccaagtacactattgttttgttcgcaagaatcatggcacgccactttcagtaacaaaacctaagaactgcatgaatcctgagaggacacagttcccttacaatagagcaaaataaatttagagaactgcatgaaacctgagacgtctccatggagtttctcaccccacttggagaaccctaggtctgtatccctagggtcgccctcaccactgatctcttaaattaaaagccctgcaagaagggctgacctcgtctcacttgtacaccaacccttttgatattttaacgaatcccattgacccaacatagagaataaagacatggttgaggtggaggctcagagcgacaaagttggaagcagtaaccttgtccaacgaaatacaacttgattcaatagcatggcgtacttcatacattaagagccccgcaagaagggttcaacctccactcacgtgtacagcaaccctcctgatatttcaatgaatcccattgtatggttgagatgatgcccaagaacatcaagaactagaaaatagaattgcaatagttccaagaactaaatcct

SEQ ID NO: 55999 - DNA, 684 bp, Zea mays
  unsure (1)..(684): unsure at all n locations
  Clone ID: MRT4577_151063C.1
aattcggcacgaggactcaggagctcgctcctaaaaagggcctcacttggatcgccgtttgaagctcgctgaagtgctatgatctcgatcgtcgaagggaagcatggtacaactcatccttccccttccgatgaacggaatgcatgggaaggggtagtagataatacgggcacgcccttaggatatatccactgtaacgaacagggggctcgggtgcatgattcgcataccaaaaaaggggaccaaacaacccaggaggtcacctccacgcaaacaacgacacgacgaaccataggcagaaacacaaccccgcaacaccacgaccaagttctccgcttcctcccaatgcaacattctcactacttctaaaggcacacatacaaacgtagcccagtacagtcgccctcgatgccaccaaatggagtgtgatcagaagatcgttgaaattacaaatagggctccaaagcacatacatcaaagcccatttntcgtgttagcctcaagcgcgctagaaaaggaacaagaaaagaaaaggtgtccccactccgcggccaatataagtgacaaaaggaattcatgcattacaaggctcaaggctganngacatgtccaagtgatcttgtgaatagcggtgaccctatggtcatgctatgactaaggggaaccatnntgatacatcctcta

SEQ ID NO: 56000 - DNA, 859 bp, Zea mays
  Clone ID: MRT4577_151064C.1
ctctcttaagcgcaacaaatgcctacattattacacaatgctcacttgctgctatatacattattccacagctactacaaccaactacttaagagggcttggaacaccaacattggcaagcctataagatacaacaagctaatggggagagcgtgttacaacaaccaaatgccgacttggaacaacaacaccttgctacatctaacaatacaaaccgtggcagcgcaacaaaagcaacaggttctaacaacactgatccatctatgcatggagaaccctgtggtctacttaaaacagaaagctgccttgcatcacaatgccacgttgcgtgctagctcacgaaggctgcaaaccagcaacatcaacaactgcaacagtgtatgccagctgcttactcaactagccatggtgaaccctgtcgcctacctacaacagaaacaactgctttcatctagcccgctcgctgtggccaatgcacctacatacctgcaacaagaattgttgcaacaaattgtcccagctctgactcacctagttgtggcaaaccttgttgcctacttgcaacagttgtttcctttcaaccaactgattatgtcgaactttgttgggtacctacaacaccgacaacagttatttaaccccctagcagtggttaacccattggtggctgccttcctacagcagcaacaattgttgccaaacaaccagttctttttgataaaccctgtcttgtcgaggcagcaacccatcgttggaggtcccatcttttagattacatatgagatgtactcgaaaatggggccctcattccggcatgtgtttcctagaaataatcaatatattgattgagattttcccc

SEQ ID NO: 56001 - DNA, 641 bp, Zea mays
  Clone ID: MRT4577_151065C.1
tcccgatgttttcaattatttatatgatgaacatagttcttttttatatccagataaatctcaatcaatatattgattatttctaggaaacacatgccggtatgagggcaccattatcaagtacatttcatatgtaatctaaaagatggcacctccaacgatgggttgctgccacgataaggcagggttcatcaaagagaactggttgtatggcagcaattgttgctgctgtaggaaggcaacgaccaatggattagccactgccagtggattaagtaatggttgtcgctgttgtaggtacgcagcagagttcgacacagtcagttggttgaatggaagcagctgttgcaagtaggcagcagggtttgccacagctagctgagtcagagctggtacaatctgttgcaacaactgttgttgcaggtatgtaggtgcattaaccatagcgagagggctagatgaaagcagttgttgctgttgtaggtaggcggcagggttcaccatggctagttgactaagcgctggtagaaactgttgcaattgttgttgttggtatgtagctacatttgccagagcaagtgggttggatgcaagcatctgctattgcaagtaggcgatagggttcaccacagctagttggc

SEQ ID NO: 56002 - DNA, 1006 bp, Zea mays
  Clone ID: MRT4577_151066C.1
cttccgcctacccacctcagtaacaattgctttcatgtagatcgccagctgtggccaatgcacctacaagcctgcaacaagcattgttgcaccagattgtaacagctttaactcagctagctgtggcgcaaccctgttgcctacttgcaacagctgcttccattcaaccaactatgtatgtcgaactctgttgcgtacccacacacaccgtcaacagttacttaatccattggcagtggctaacccattggtcgctgccttcctacagcagcaacaattgctgccatacaaccggttctctttgatgaatcctgtcttgtcgaggcagcaacccatcgttggaggtgccatcttttagattacatatgagatgtactcgataatggtgccctcagaccggcatgtgtttcctataaataagcaatatattggttgagatttatctcgaaaaaaaaaaaaaaaaaaaaaaaaaaaaaaacaaaaaaaaaaaaaaaaaaaaaaaaaaaaaaaaaaaaaaaaaaaaaaattaaaaaaaaaaaaaaaaaaaaaaaaaaaaaaaaaaaaaaaaaaaaaatccccccccctggggtttaaaacccttaattttttttaccccaaaagccaaaaaaaccccatccaaccccagggggggggggttggggccccccttttcccgggttttggtgggaagccccccctcaaccaaaaaaagggggggtgggggttcccacccccccccccggtttaattaccccccccggggaaattgccccccccggttaaaccgcccccctcgggggaatttcccaccgcgggcccccttgcccccccgggccaactggccaccgggggccattgggttgccccggtttaatttgccgcccccccaatgccatacccttattaaaccccccgggcttaagcttaatcccaaaccaaaccattgcccgggccaaaaagccaaatcaaaccccggccaatttgaagaaaacttgggggttggaaa

SEQ ID NO: 56003 - DNA, 208 bp, Zea mays
  Clone ID: MRT4577_151067C.1
ctcgtttcgttgccgtccacttgtcacacgggcgggggccatctccttgctgggtggctcatccgaccatccccggctcctccgcgccgtctgcaacgactccatcgagtcactcggccgcagcaaccggcgaccatgtaccgagtcgactctggtctcggcgccctcgagaggtttgcggcttatgctcatatgattaatgttttac

SEQ ID NO: 56004 - DNA, 363 bp, Zea mays
  Clone ID: MRT4577_151068C.1
gggaaaaaaaaggggccctttttaaagggcaaaacgggggattttgggggaaaaaaccccaaatggggaaaaagaaaaaaaaaaaaccttgggggccaaagggggaaacttttttaaacaaaccggggggaaaaataaagtcaaaactaaaaccccaacgatacaaggaagggatttggggccaaaaaaccaggggtaaattaaacccttgggccaaacccaaaaaatttttttattggccctccttggggacccaaaggtcccaaaaaaacggggggccaaccccttgggggggggttggggggggggcttgggctttttgaagccccttttgggccccctaaaaaaaccgacccggggggt

SEQ ID NO: 56005 - DNA, 1829 bp, Zea mays
  Clone ID: MRT4577_151069C.1
tgcacctccattcccttagttgtttttgggttttgtttgcttccttgttccaataacctgtttcttatggattgtttcttctggatcagatgaattacttacgcatcgtcgttggaattggatgacttattgattgtgcttgtggtcctgttacgtggtcttatttaatcttcgcctccagccatgggtaaggagaagtctcacatcaacattgtggttattggccacgtcgactctggcaagtcgacaaccaccggccacctgatctacaagcttggaggcattgacaagcgtgtgatcgagaggtttgagaaggaggccgctgaaatgaacaagcggtcctttaagtatgcttgggtgcttgacaagctcaaggctgagcgtgagaggggtatcaccattgatattgctctgtggaagtttgagaccaccaagtactattgcaccgttattgatgcccctggacaccgtgactttatcaagaacatgatcactggtacctcccaggctgactgtgctgtccttatcattgactccaccactggtggttttgaggctggtatctccaaggatggccagacacgtgagcatgctctccttgcgttcacacttggagtgaagcagatgatttgctgctgcaacaagatggatgcaaccactcccaaatactccaaggcacgttatgatgagattgtgaaggaagtctcatcttacctcaagaaagttgggtacaaccctgataagatagcatttgttcccatctctggttttgagggtgacaacatgattgagaggtccaccaaccttgactggtacaaaggcccaaccctgcttgaggctcttgaccagatcaccgagcccaagagaccctcggacaagcccctgcgtctccccctccaggatgtgtacaagattggtggtattggaactgtgccagttggtcgtgtggagactggtgtcatcaagcctggtatggttgtcacctttggtccaactggcctgactactgaggtgaagtctgttgagatgcaccatgaggctcttcaggaggcccttcctggtgacaatgttggcttcaacgtgaagaacgtcgctgtgaaggatatcaagcgtggttatgtggcctccaactccaaggatgaccctgccaaggaggctgccagcttcacctcccaggtcatcatcatgaaccaccctgggcagatcggtaacggttatgccccagtgctggactgccacacctcccatattgctgtcaagtttgctgagctcattaccaagatcgacaggcgttctggcaaggagcttgagaaagagcccaagttcttgaagaacggtgatgctggtatggtgaagatgattcccaccaagcccatggtggtggagacattctcgcagtatcctcccctgggtaggtttgctgtccgtgacatgagacagacggttgctgttggagtcatcaagagtgtggagaagaaggacccggccggtgccaaggtgaccaaggctgctgccaagaagaaatgatgcgacctgtcgttgatgcagcgtctgcttttccaatacgtagctgagatgttccattttgacataagttttgtatgctgtggttgctgtttaccttgtgaactgttgagctctactattgggtgtccgtttatctgtttatgtagcatcttgttatttcacctattgcaatacaagaatgctatatgacatatatgttagacattttgggcaatgttaaatggatttttactaagtcgtgtagttagatttaaaaaaaaaaaaaaaaaaaaaaaaaaaaaaaaaaaaaaataaaaaattaa

SEQ ID NO: 56006 - DNA, 153 bp, Zea mays
  Clone ID: MRT4577_15106C.1
actagttctagatcgcgagcggccgtgcttattcttgttggtataagaactttgtgggtagattagtagattgtacagctacgggagggggctatataaaattacggaagtcggccaaaaaaattacatgagagccatatagttctactttct

SEQ ID NO: 56007 - DNA, 928 bp, Zea mays
  Clone ID: MRT4577_151070C.1
gcacattagcagcaccctaacaacaatggctaccaagatattatccctccttgcgcttcttgcgctttttgcgagcgcagcaaatgcgttcatcattccacaatgctcacttgctacaagttccattattacgcagttcctcccaccagttacttcaatgggcttcgaacacacagctgtgcaagcctataggctaccacaagccattcaggcaagcgtcttgctgcataccacatttgcaatgttgcaccattcaatccttggcacatctatcaatctcaaccatcgcaacgcaacagcaacatcaattcctaccagcagtgagccgcctagccatggtgaaccttgccgcctacttgccacagcagttgcttgcatcagacccacgtgctctggcaagcgtagttgcaacccagccacaacaacagctgcaacagtttctgccagcgttcagtcacctaaccagtggtgaaccctgccgcctccttgcagcagcaacaactgctttcatctagcccgctcgctgtggacaatgcacttacatacctgcaacaacaaattgttgcaacagattgtaccatgctctgacttaactagcgtggggcaaaccctgttgcctacttgcaacagctgcttccattcaaccaactgactctgtcgaactctgctgcgtacctacaacagcgacaacagttacttaatccattggtagtggctaacccattggtcggcgccttcctacaccagcaacaattgctcgcatacaaccagttctctttgatgaatcctgccttggcgaggcagccaccccatcggtggaggggccctcctttaaattacatatgagatgctctcgatagtggcgccctccaaccgacgtgggttttctagaaataatcacatttatcgactggcatttatcccgatc

SEQ ID NO: 56008 - DNA, 354 bp, Zea mays
  Clone ID: MRT4577_151071C.1
atacgtggatggggtttttgaagaggtggccctccaaatgtatttttattactgatgaaactgcaaaaagggcacaagtcctggatccgcccatcctaaatactgatcactcatttccaagcaaaagcaacctaacaataccggtgggcatgccgtaagcaaccgggaaaaggtggcctgccttccgaagctcatggtaaataacccatgggagcctttctctaatttacccaaacatttaaaccggcacttaaaggtcctacaccccgcaccaaaggttcaccttcaccttcttttgggcccctgaaaacgggttttccattttcagggggctccaatcccacttcccgaaac

SEQ ID NO: 56009 - DNA, 356 bp, Zea mays
  unsure (1)..(356): unsure at all n locations
  Clone ID: MRT4577_151072C.1
cccctcgggggccacccaccgtccgnagggcttggactccctccgacactcccacccatctcctggctccgagtgccccagaagctactaatcatggggtggcgtcaccgcccgcgccccggtcgcggacgtgggcccgtcgtccggcttccttggccactatagccggctcggccgcaccgcgagggccacgaggcgcaacctcaaggcggaggccgagggcgagggggtccccggacttacctgcccctcctacctcagacggaagactgacgggtcacaatagctaggacccgtagggcctgggggaggacccagggaacctgcagagcgacatgcaagcgaaactggtgaac

SEQ ID NO: 56010 - DNA, 835 bp, Zea mays
  Clone ID: MRT4577_151073C.1
gcggggatcacccataatattttgagcattcagaaacacacctagcgaagcgcactagcaacgacctaacaacaatggcttccaagacattatccctccttgcgcttcttgccctttttgtgagtgcaacaaatgcgttcattattccacaatgctcacttgctccgggtgccattattccacagttcctccctccagttacttcaatgggcttcaagcacccagctgtgcaagcttataggctacaacaagcgattgcggcgagcgtcttacaacaaccaattgcccaattgcaacaacaatccttggcacatctaacaatacaaaccatcgcaacgcaacagcaacaacagttcctaccagcactgggccacctagccatggtgaaccctgtcgcctacttgcaacagcagctgcttgcatccaacccacttgctctagcaaacgtagttgcaaaccagcaacaacaacaactgcaacagtttctgccagcgcttagtcaactagccatggtgaaccctgccgcctacctacaacagcaacaactgctttcatctagcccgctcgctgtggccaatgcacctacatacctgcaacaagaattgttgcaacagatcgtaccagctctaactcagctagctgtggcaaaccctgttgcctacttgctacagctgctttcattcaaccaactaactatgtcgaactctgtagcgtacctacaacagggacaacagctacttaatgcattggcagcggctaacccattgctcggtgccttgctacagaagaaacaatagctgtcatacaaccggttctctttgatgaatcctgtctt

SEQ ID NO: 56011 - DNA, 267 bp, Zea mays
  Clone ID: MRT4577_151074C.1
gacccactcgtccggtgcggttcctccacatatcgtatcggagtgaattccatcacacagagatcaataactcgggaagaccaacttagcctatggtagagcttgcttataaaccaaactacataaatatcatgacgatcattccaacttacgacccattgcccaatgaattacatagtaccttagcctgtactacataaacgacatcaagcttactactaccattaagctgcatgccttataaaaacaggcacactaggtctgtca

SEQ ID NO: 56012 - DNA, 582 bp, Zea mays
  Clone ID: MRT4577_151075C.1
gagcattcagaaacacaccaagcgaagcgcactagcaacgacctaaccaccattggctgaccaaggttttacccctccttgcgcttcttgccttttttgtgagcgcaccaaatgcgttaattattcaacattgctaacttgttcttagggccataattcaacagttcttccaaccagttacttaaatgggcttgaaacactatattgtgcaggccaacatgcaacaacaagcgtttgcggagagcgttttacaacaaccaattgcccaattgcaacaacaatccttgccacatctaacaatacaagccatcacaacgcaacagcaacaacagttcctaccagcactgagccacctagccatggtgaaccctgccgtctacttgcaagagcagctgcttgcatccaacccacttgctctggcgaacgtaattgcaaaccagcaacaacaacaggtacaacaggttctggcaacgctcaatcaactagccatggggaaccctggcggctacgtacaacaacaacaactggtttcatttagcccgctcgcttggggcaatgcgcctacatacctggaacaacaat

SEQ ID NO: 56013 - DNA, 775 bp, Zea mays
  Clone ID: MRT4577_151077C.1
ctcgaggccggccgggccgggattctcctcctcactcgccgtctgccttctgcgcctccatttcggactctgtcccttgcaagtccaatctcacctccaaccatgtgtaaagagaagtgccacatcaacattgaggttattaggccacgttgactctggcaagtcgaccaccacaggacacctgatctacaagctcggaggcatcgacaagcgtgtgatcgagaggtttgaagaagacgctgctgaaatgaacaagcggcccttcaagtacgcatggttgctcgacaagctcaaggcttaccgtgagagacgtatcaccattgatatcgctctgcggaagtttgcgaccaccaaagactactgcacggtcattgatgcccctagacaccgagtcttcatcaagaacatgatcactggtacctcccaggctgactgtgctgtccttatcattgactccaccactggtggatttgaggctggcatctccaaggatggccagacccgagaacatgcgtctccttgcgttcacccttggagtggagcacatgatgtgctgctgcaaccagatggatgcaaccactcacaaatactccaaggcacgttatgatgagattgcgaaggaagtctcatcctacctcaagatagttgcgtacgaccctggataaaattgacttcgtgtccatttctgtgtttgagggcgacacatgattgagaggtccaccaaccttgactggcagaaacgaactgccctgcttgaggctcttgaccagatcac

SEQ ID NO: 56014 - DNA, 974 bp, Zea mays
  unsure (1)..(974): unsure at all n locations
  Clone ID: MRT4577_151078C.1
cccacgcgtccggcgaagcgcactagcaacgacctaacaccaatggctaccaagaaatgagggcttcttgggcctcttggccttttaatgaacgccacaaatgccgtcattatttcacaatgcttaattggttctaatggcattatttcacagattcttccaccacatactctaatgggcttgaaacattcgnaccgcgcaagctatacaggttacatctagcgcttgcggagagcgctttacaacaaccaatggcccaattgcaacaacaatccttggcacatctaaccatacaaaccattgcaacgcaacaacaacaacaacaacagtttctgccatcactgagccacctagccgtggtgaaccctgtcacctacttgcaacagcagctgcttgcatccaacccacttgtttggcgaaggtagttgcataccagcaacaacaacagttgcaacagtttatgccagtgctcagtcaactagccatggtgaaccctgcggtctacctacaactactttcatttagcccgctcgcggtgggcaatgcacctaggtacctacaacaacagttgctgcaacaaattgtaccagctctgactcagctagctgtggcaaaccctgctgcctacttacaacagttgcttccattcaaccaactggctgtgtcaaactttgctgggtacctacaacagcgacaacagttacttaatccattggcagtggctaacccattggtcgctaccttcctgcagcagcaacaacaattgctgccatacaaccagttctctttgatgaaccctgccttgcagcaacccatcgttggaggggccatcttttagattacatatgagatggactcgacaatggggccctcaaaccgacatgtgtttcctagaaataatcaatatattgattgagatttatctcgataaaaaaaaaaaaaaaaaaaaaaaaaaaaaaaaaaaaaaaaaacaa

SEQ ID NO: 56015 - DNA, 764 bp, Zea mays
  unsure (1)..(764): unsure at all n locations
  Clone ID: MRT4577_151079C.1
cttggttttttttttttcaagataaatctcaatcaatatatgtgattatttctaggaaacacacgtcggcttgagggcaccattatacgagtacatctcatatgtaatctaaaagatggcacctccaacgatgggttgctgcctcgacaagacaggattgatggtagagaactggttgtatggcagcaattgttgctgatggaggaaggcggagaccaatgggtcagccactaccaatggattaagtaactgttgtcgctggtgtaggtactcaccaaagttcgacagattcatgtggttgaatggaagcagctgctgcaagtaggcaacagggttcgccacagctagttgagtcagaactggtacaatctgttgcaacaattgttgttgcaggtatgtaggtgcattgcccacagcgagcgggctagatgaaagcagctgctgttgttgtacgtaggcggcacggttcaccatggctagttgactaagcgctggcagaaactgttgcagttgttgttgctggtttgcaactacgtttgctagagcaagtgggttggatgcaagtagctgctgttgcatgtaggcgacagggttcaccatggctaggtggctcagtgctggtaggaactgttgttgctgttgcgttgcgntggtttgtctggtttgatgtgcccaggattgttgttgtgattgggcatacggttgttgtgcgacgctcgccgcctcgcgtgcctcggccgcgtcctcgctgnngggcgcttctg

SEQ ID NO: 56016 - DNA, 645 bp, Zea mays
  Clone ID: MRT4577_15107C.1
tccagactatgtcctatctgtcatccgtcggagctgacgttgtatcaacgtaccgcgcctccgtcatgtgacgtttacaccgatccgatcgccatggaaagcatgcactacctgtccaagaccatctcatctgagatcactgccggtggactgcacacctcatacctggatgatgatccctgcctccgacgagaacctcatggtcgaggactcagcgaggaaggtgaagatgacgttccacatcggcgtgatgatcctggacctcgtctacatcccccttgtcgacagcctgaccctgatgaacaacctccaagtactgcatggccttcgtctagcagctcgacgatcccgaacgccttccacttcctcatcaagaatcgcgcttcctccacgtgaagcccgtttcgatgaacgcaggggagccagaccctcagttcgttctccttcttgtacatagatggacgcactcgctagttcgctactacctgcgactcccaagttacacctacctgaacgatcttacactgacattggagagctctgactactctaagagtcggatcctccgagagcttgctatacaaatacattcgaggagagcgtaccatggctcggaccagaactgtgcaccaactgcctccttct

SEQ ID NO: 56017 - DNA, 227 bp, Zea mays
  unsure (1)..(227): unsure at all n locations
  Clone ID: MRT4577_151080C.1
gccggggcccccatcgtctagtgttcaggacattgtctctttcaagnaggcagcggggattcgacttcccctgggggtaccattgttttaaatttccaagatactgtaaagtgtcttattttagtgcaggatcgatcgtacatacactcgtgttgctggatctatgttcaggcgtggtgtcctggtggctgcggtgtgggaccttgcttggggggtgggggcgctgt

SEQ ID NO: 56018 - DNA, 248 bp, Zea mays
  Clone ID: MRT4577_151081C.1
cccatcaatatttatcgggggcctaccatatcaaccatcttagtgctatgagctgttaatcacatcatcacaaaagtgcatcgcaactttgctgatgaaagatcgaccaaccgctttcacgaaggttacctgctgtacactccgaggctgccttgccacttatcatgacactcggacccttttgctccagaagacccaactaaacccttgtgtcagtcaggactaagaaacctgctgcagggaagtgc

SEQ ID NO: 56019 - DNA, 1095 bp, Zea mays
  Clone ID: MRT4577_151082C.1
gccggtcgaggccggccgggagattcttctccccccacggccacacccacgcaccgcagcgccgcctcgtctcctctcgccggcgatggaggaggtgggcggggacatgcctctcccgaaacagaagctctccgctgcaccgtacagggacggaggtggcgtcgtgctcgtggccactgggagctttaaccctcccacctacatgcacctgcgcatgtttgagctggcaaaggatgaactcgagctgcgaggttattctgtgttgggcggctacatgtctccggtgaatgatgcatataagaagaaggacctcttaccggctgctcaccgaattcgcttttgtgaacttgcgtccaaaagctcatcttttgtgatggttgatccgtgggaggcaatgcagaatggttatcagcgcactttgaccgttctttcgagaatacgaaactcactatgcaaggatggtgtagctgaccaaggtagcctcaaggtaatgcttttatgtggctctgacttgctcgagtcattcaccactccaggtgtttggatcctagaccaggtcagaaccatatgccaggactttggtgtcgtatgcatacggcgagaaggaaaggatgttggaaaattgatagacaacagcgatatattgcaagaatgcaaggataacattatttcggttgatgagattgtgccaaatcagatcagttcatccagagtaagagactgcataagaagatctctatcgataaagtatctcactagtgatgaagtaattgaatacatcagagaacacaagctgtttatggaaggcaatggcggcgacatagcattgctgtaatagaggtatttggaggtaaactctgtaatcgacaaggatcggctgtggacgtctacctcaggagtcaggataccatctggaccgtgcattctgggcaattacttcgcacaaacacagaaataaacggaactggccacttaaattactactatatttttgttaaatttgattctggaggttgaagtgagttgcatgttgattaattttgcttttgtgccagaatcaagtgctacatacaacatgaattctgacaaccaata

SEQ ID NO: 56020 - DNA, 331 bp, Zea mays
  Clone ID: MRT4577_151083C.1
acctcggcgcggaaggcgtaggggtcggccttgacccgcactacttcgtcggcgcccagcacctcgaacttgtagagatcgccctcgccgacctgcggcacgaagatctcccacagcccgcactcatggcggcggcgcatcaggtggcgccggccgtcccactggttgaagctgccgaccaccgagacgcggcgcgcgctcggcgcccagaccacgaagcgggtgccgccggtgccctcgtggatctgcggatgcgcgcccattcactcgtagggccggtggtgcgtgcccttggacagcagatagagatcggtgtcgcggatcagcggct

SEQ ID NO: 56021 - DNA, 244 bp, Zea mays
  Clone ID: MRT4577_151084C.1
cccacgcgtccgcccacgcgtccggggagcgcacttcttctcccatggcgctcgacgcccctgcagcaaggcgccctcttcttcttcctctgcccagcgaccccctcttctccacggtgttcagagcgggagcagttcccttggccgagctccctgggagcacgccggcgctcctgctctccccttggccgccattttctccaagtgcaggcgcccaggtcaagctgcgagccctctgctccta

SEQ ID NO: 56022 - DNA, 326 bp, Zea mays
  unsure (1)..(326): unsure at all n locations
  Clone ID: MRT4577_151085C.1
ctcgggcgcgagcccaagnncatcagaggggcccatacagancatggacgccgnnatcngggggcgcganggannggccaagcngnncccgggnnnggaggacgccgcngagnncggcaagannggcaggnaccangccncggagagcangcngnngcnggacccggagaccgggaagaggagcnacnagaagacncccancnacagcaaggacacncncnaggagggcnnccaaagaggganaagggaaggganggcggggcaggagcnnggcgagcagaccancnncnaggaccgcnccaaaaccagaaaccgggagaaagaaa

SEQ ID NO: 56023 - DNA, 757 bp, Zea mays
  Clone ID: MRT4577_151086C.1
tcttccccttccccctccctcccgtggctcgccgccgccaccgccagctcgcgccccgtcttcctctccccgaatccgcccattccgaccccctgatccgccgcaggtccgcgatgctttccctgtcgaggacgctcgcgaggcggctcttctccaccgcggccgccgggtccgagggcgccgccgccgcgtcaacttcggtggtgaggaaggcgcagaaccccctcgaggagttcttcgaggtcgagcggagcaccgcggacgaccagcccgctccccactacggtcgtggttggaaggcttctgaattacgcctgaaatcttgggacgaccttcataagctatggtatgtccttctaaaggagaagaacatgcttatgtctcaacgccagatgctagcttcagagaacatgcatttcccaaacccagagcgcatttccaaggtgaagagatcgatgtgccggatcaagcacgtgctgacggagcgggccatagcggaccctgacccgaggaggactgcggagatgaagcggatgatcaacgccatgtgatccgctcgcgtcgcgccgcgcttcaatgtcttggagcagcagcagccgtagcagcattagcatctatctactagaaagaaagaatttgctcgcttcccttcttgtgttgtatgcctccccccatgagatgcataagaccagtaatccttgagacacctgtggaacgccatcgcccccgacagttccgcggatgaacgtcaatgcac

SEQ ID NO: 56024 - DNA, 302 bp, Zea mays
  Clone ID: MRT4577_151087C.1
acagggggggcgttcatacatagacacacacgttcttactttattaaggaggtaaatgtcctcccttctcattaacaacagggtttaacaagaacatgaccacaactattgggcaaaaggcgaaacaaaagaaattttttgatgctgtaccacaactgcgtgccaaagatacattaatccacttgtgttgaggacagtttttgcttcaggcaaaaattcacacaatgctggcatctaaacttctatgcaaacctttttgatacccggaacaccatatgcactgaaattcaagacacatattt

SEQ ID NO: 56025 - DNA, 384 bp, Zea mays
  unsure (1)..(384): unsure at all n locations
  Clone ID: MRT4577_151088C.1
cacacctcgctgcaattcgcagaaccggacacgccgcgtcaatacgacttcacacctcgctgcaattcgcagaaccggacacgccgcgtcaatacgacttctctcacctcnaaggcggcggcagaaggagaggatggcggcctgnaggcccgcgagcgcgcccagggcggccgcgacgtccgcgacgaccgcagaggcggcgcactcgtacaggaactccgtctcctcgtccacttcctgcatggganaggcggcggcggcagcgggtggcgccgacttcacgtgcaacacgaccatctcggcccgagagctctanaaacttcgggtctcgctcctgggagacggaacgggaacggccacacnangcggcggcggacaggggtt

SEQ ID NO: 56026 - DNA, 1207 bp, Zea mays
  unsure (1)..(1207): unsure at all n locations
  Clone ID: MRT4577_151089C.1
cgtccgtactcccgttcgaccccgcgtccgcccacgcgtccgcggacgcgtgggcggacgcgtgggtggcgctggattttcgggttcgcacacggaggaaggcctcgcatcgagtgatgccagagctgtgaaccaaatcctcgtcttcctcaaaaagtggtttgataagtgtccacagttcttttcaagtcctctctacctcgccggcgattcctactctggcatgatcgtgccaaccgttcatctgaaattgctggaggtgaagaagaggggagccaaccgactctaattctaaagggctacctcgttggtgatccagtcacagatttcaacttcggtggtccgtccagaatcccctttgctcacgggatgggtctcatctcgggcgaaatatacgaggccttcgagaagagctgccgtgtgggtgtcagtngatacccaagcactgagtgcataaatagccttggcgccatagatgagtgcatcaaaggcatctgcccgaaccacgttctggagccgctatgtgctttcgcgagtcctcagcctcacaagatgccgaagctgaagttgaattcaggtgcacaggagatgctccagctcccagtgtacactggagaggcagagcttcacttgtctgagatttcgctgcagtgcagaacagcaggatacataatgtcctacatatgggcaaacaatgactcagtaagagaggctcttggcattcacaagggaacagttcctgcgtggtcaaggtgcagctacgagataccttacactaatgatattccaagcacggtgaagtaccatctggatgtgaccactaagggctacagaagtctagtttataacggtgatcatgatatggtcataccttttgtcggcacacaagcctggattaagactcttaatttctccatcgtggatgagtggaggccatggtttgtcgacggccaagttgcaggatttacaaggtcatactcaaataacctcacctttgcaaccgtaaagggtggtggacatactgctccagagtacatgccaaggcaatgttatgctatgtttgagcggtgggtttctggtgaccccctttgacggcgtgcatagcagctccaaatttcaagcattgcattgcaagataaatgtattgctcggggacaatagttgtggaaggaattctgatttataatacaagttactcttagcatct

SEQ ID NO: 56027 - DNA, 227 bp, Zea mays
  unsure (1)..(227): unsure at all n locations
  Clone ID: MRT4577_15108C.1
cccnttttctcccccccagcagccaacacccaaggggggntataggaacnaaccacggcaaggcccaccgccaagggcnaaaaacaacagcacagaaaaggngncacacagcaanagcccgaccaagnncccnncccggaacaaggngccaacaacnncccanacaggggccannngnccagacgcggagcgagggnaggaacagaaccccaaacaaccaggaagaa

SEQ ID NO: 56028 - DNA, 358 bp, Zea mays
  Clone ID: MRT4577_151090C.1
acttgttcgctttcggtctctcgcctgtatttatccttgtacgggcttaaccggccggtttgggctgcatttccaaacaacccgactagttgtcggcgcctagcggggcgagcagggtgcgcccaggatggcgcttttatccttccatgcgtgcctttgcagagaactgggaaccggtccgtttttgaagacacctctgcagactacagttcagccggtgaggacggcctactatcctgctggcctgacaggaggggacgaggcgctactaaaacaagccaacttggtgccttactctgaacaggttacggaaacctgaccagcgctttgcgaactgctgacaacattgagcccgctg

SEQ ID NO: 56029 - DNA, 440 bp, Zea mays
  Clone ID: MRT4577_151091C.1
aaataaagaaagggctaactcaaatttatgtcatgacaacttgtaaacaccactttaaccaaaatggattaggactaatctaataacttcaagcggattgtcttgtacagaggacatgaagtatcaactttgaagcccatttcttcaaataattcaactttgaagcccatttcttcaaatcatttcagctataggacacaaaatgttcacctaagcaacaaacatacatgagttgatatgctgctagcagatcatgagcaaatctcacctcttcaagaaaagcaacatttggacatgccaactcagaaatctccttcaaagcttctaatgattcagaaaagaaagcaacatgagtgatccattaccaccccatgcacatatttgatttgtatcgtgacccattgccaccccactgaatcacctgatgacggatgtcttga

SEQ ID NO: 56030 - DNA, 750 bp, Zea mays
  Clone ID: MRT4577_151092C.1
ccttcttgatggatgatttccttgacgagcctgcagccactccatcagcaaaaagtgctgtagaacctcaggttgatctgtttgctgatgcagacttccaatcggcaatcccaggtgccgaaacaactgcgcatcaggatgtccaggaaactgttgacctttttttcgggaaatgctacctttgcttcagcatttccaccacagactgggtttatcccaccaccaacttctgggacaccttctaattctaatacttccgtttccaagaacacagtacctgaaccatttgatcctttcggtgatattcctttaagcagttttgggggatctgacccatttggtgacttcagctcatctagtgcaccaccaccacctgtacacagctccactggaaatattagcacgtcgagtcagaaccttgaggcagcatcggactttggtgcctttgaatcaaacactgtggatacagctaaagaccccttcgacttttcttccactggcaattttggcaaagcagatgtagcacctttggcagctcccaaaactgatgcgtctgactttggtgccttcgttgcaaacactgtagaagcaactaaagacccctttgatctttcttcaagtattaatggaagggcagaccaaacacctttggctgctcccaagcccaacaccaagaaagaaaattttcaggttaaatctggcatatgggctgactctttgagccgtggattaattgatctgaacataact

SEQ ID NO: 56031 - DNA, 922 bp, Zea mays
  Clone ID: MRT4577_151093C.1
cgagaataaatctcaatcaatatatggattatttctaggaaacacacgtgggtttgggggccccattatcgagtccatctcatatgtaatcaaaaagatggcccccccaacgaggggttgctgcctcgccaagacaggattcatcaaaaaaaactggttgtatggcaccaattgttgctgctgtaggaaggcggcgaccaaggggttacccactaccaagggataaagaaactgttgccgctgttgtaggtccccaccaaagttcgacaaagccagttggttgaatggaaccacctgttgcaagtaggcaacagggtttgccacagctagttgagtcaaagctggtacaatctgttgcaacaattgttgttgcaggtatgtaggtgcattgcccacagcgagcgggctaaataaaaccagttgttgttgttgtacctaggcggcagggttcaccatggctagttgactgaccgttggcagaaactgttgtagctgttgttgttgctgttttgcaactacgttcgccagagctagtgggttgcatccaagcacttgctcttgcaagtagccggcagggttcaccatggctaggtggctcagtcctggtaggacctgttgttgctgttgcgttgtgatcgcttgtattgttagatgtggcaaggattgttgtagcaattgggcaattggttgttgtaagacgctcgccgcaagcgcttgttgttgcatgttggcttgcacagctaggtgttccgaagcccattgaagtagctggtggcacggaactgtggaataatggcactaggagcaagtgagcattgtggaataatgaacgcatttgttgcgctcacaaaaagggcaagaagcgcaaggagggctatatattggtagccagtgttgttaggtagttgctagtgcgatgtcg

SEQ ID NO: 56032 - DNA, 1505 bp, Zea mays
  Clone ID: MRT4577_151094C.1
ggccgcttttttttttttttttttcttttttttttttttttttttttttttttttttttttttttttaagggagcaactaaaatttatttcaattttaatcacctttgaacataaatacataattagaataaaataaagtcttaaaaacaacttagcatttacattgtataatattcccaaaaaaaatatacatgctggtttctaacaatgcacatgcggatttatataccacatctaatctaaaatcgaaaacacattacacttggaaaggaccacatcgaaggaagggaaaataatcggaacacattacactactaactgtttacaaatatttagccgactactattatgctgaatacaaactaaccggctgaatattggatacattggccaccactgagcatctgaagtatgtaacccttcttatagatttctggcagggctaaaaacatgtccatttggttgggtcccttagcgaaaatgcttgcgggggttaccacttcaattccactaaacccaagcttcagtacttaaacaatggctattactttggccttcctctgaggcttttctaacatgtactccatttgttttcttatacctactactttgagcactgtgttttgcctgtccatattattttgactgctgtgtacgtgaaccttgaactctggcacgtacatggttcgcattcggtttgcctttttaaaaccgggtgtgacatgtaggaaggcagcgaccaatgggttagccactgcaagtggattaagtaactgttgtcgctgttgtaggtacgcagcagagttcgacacagtcagttggttgaatggaagcagctgttgcaagtaggcagcagggtttgccacaactagctgagtcagagctggtacaatatgttgcaacaattgttgttgtaggtatgtaggtgcattggccacagcaagcgggctagatgaaagcagttgttgctgttgtaggtaggcggcagggttcaccatggctagttgactgagcgctggcagaaatagttgcagctattgttgttgctggtttgcaactacgtttgccagagcaagtgcgttggatgcaagcagttgttgttgcaagtaggcggcagggttcaccatggctaggtggctcagtgctggtaggaactgttgttgctgttgcgttgcgatggtttgtattgttagatgtgccaaggattgttgttgcaattgggcaattggttgttgtaagacgctcgccgcaatcgcttgttgtagcttataggcttgcacagctgggtgttcgaaggccattgaagtaactggtggcaggacctgtggaataatgtgaactaggagcaagtgagcattgtgcaataatggacgcatttgttgcgctcgcaaatagcgcaagtagcgcaaggaggcatgatatcttggtagccattgttgttaggtcgccgttagtgcgcttcgcatggtgagttcgccacccgaaccccatgcctagcttacgg

SEQ ID NO: 56033 - DNA, 419 bp, Zea mays
  Clone ID: MRT4577_151095C.1
tccgattttcagcattacagaaacacactcaagtcgtaagcgcacttagccaacacacctaacacacaatgggctacacaagatattagcgcctcctgtgcgccttcttggcccttttagtggagcgcaacaaaatgcgttcatttattccaaacagtgctcacttgctcctagtgccattattccacagttcctcccaccagttacttcaatgggcttcgaacatccagccgtgcaagcctacaggctacaactagcgcttgcggcgagcgtcttacaacaaccaattgcccaattgcaacaacaatccttggcacatctaaacctacaaaccatcgcaacgcaacagcaacaacagtttctgccatcactgagccacctagccgtggtgaaccctgtcgcctacttgcaacagcagc

SEQ ID NO: 56034 - DNA, 214 bp, Zea mays
  Clone ID: MRT4577_151096C.1
gatacaaaaagctgatatttctggtccttcgccagcaacatacaaaaccaagatggaaaatgccaaaacgaagtgagccccactacagaagcaccaaagaattcaggaccgtaaagcgcaacactagtgaaagatgtaacttgctatccaacaataaccgacacacccttttcaaaagaaagactccctgaaccttacacacttttagcaggcc

SEQ ID NO: 56035 - DNA, 730 bp, Zea mays
  unsure (1)..(730): unsure at all n locations
  Clone ID: MRT4577_151097C.1
cctgccgggatcacccataatattttgagcattcagaaacacaccaagcgaagcgcactagcaacgacctaacaacaatggctaccaagatattagccctccttgcgcttcttgccctttttgtgagcgcaacaaatgcgttcattattccacaatgctcacttgctcctagtgccattattccacagttcctcccaccagttacttcaatgggcttcgaacacctagctgtgcaagccaacatgcaacaacaagcgcttgcggcgagcgtcttacaacaaccaattgcccaattgcaacaacaatccttgccacatctaacaatacaagccatcacaacgcaacagcaacaacagttcctaccagcactgagccacctagccatggggaaccctgccgcctacttgcaagagcagctgcttgcatccaacccactttctctggggaacgcgttgcaaaccaccaacaacaacaacatctacagctgtttgtgccaactcttaaacaacgagggatggagaactgtgccgtctacaaacaacaacaacatctgtttttatctagcccgctcggtggggacaatgcacctacatacctgcaacaacaattgttgcaacagattgtaccatctctgactcaagtaggttggggcaaaccctggtgccttcttggaacagtttgntttcatttaaccaagtggctgtgtngaactgtgntgcgtacctaacac

SEQ ID NO: 56036 - DNA, 316 bp, Zea mays
  Clone ID: MRT4577_151098C.1
cacaaatgaatgaacttcgtaagtatcagaccacggcccgtttcaaagattggcaagtgatgtctgtgtggggaattgctggtgttggaaaatctgatcttgtcaaaaatttgtactatgaaaggatgcttaaagaggacccaatgtttgacaagtatggttgggtccacgtgtcccatccattcaatttgagggacttctctcggaacttacttttggattttcactcagatgccgtgggaatcagagaccctattcaggagtgtcataagcttctaaaagaacatcagtgtcttgttgttattgatgatctaca

SEQ ID NO: 56037 - DNA, 352 bp, Zea mays
  Clone ID: MRT4577_151099C.1
gggactactccggccccaagctcatcagagctccgacgcggaccgcgccatggccctcgcggcgtagcggcctacagatccgcaagttttgatcgccgcccgatgtgtgtgtgtgtgcccctggtcaggtcacacatcctaaaacgtggacaggtagtatcagtctcggaaatgaaaaccagagcagatagtcagtaattaagctagtgatgtatagtagagtatatacagaacactagaacagaaaaagaaaagcaaatggtagtgtatgccttacaatataatccagtgtacgtagccttatgactacctgtaatatatatgaatcatccagttaaaaatgcacctcaaa

SEQ ID NO: 56038 - DNA, 444 bp, Zea mays
  Clone ID: MRT4577_15109C.1
gcggtccttattaaatcatcccacgctcgagccgctgctagatcatgccataatagcctgcgtagagccctcagggggatccgagccatgaaccctacctactcttgcctgttcctctgaatggtactctcgttagacaacgcctaatatcgtgctgtccagaagggaattctattcaacagctgatgttctgcaaatcttccagcatatgagagaatggctgattcacatgcacagctcatgatcctccatacgctcataaagatgctaagccaggcaatgctcttataacctggcgttaaggacatgcacctgttgcaactttaatggattcaggaagtgcagggcctgcaagataggaaatcacatctcgttctgaggcactacagacgcaggaatgggccgctgaccattgctctgctccttaccaggcccctgagttat

SEQ ID NO: 56039 - DNA, 525 bp, Zea mays
  unsure (1)..(525): unsure at all n locations
  Clone ID: MRT4577_1510C.1
gggggggggggggggggttaaaaaaaatttttttttggttttttttttttttttttttttttttttttttttttttttttttttttttttttggggaaaaaacaccacctacttccatggggcgaatggtacaaagaggggagctttttcgggggtttgaatggggggccaaccccccccaacccaatccaatccaatccaaaccaaaaagtacaaccatccccccccccccccccnaacttggcaaggggccagggacccgggatcaaataacctcggggtcctgggccccccccggggggcccccccccccccccggggggggccggggcttcttcattccgtgggggccaaacatgcgggcggggaggggccccgggccgggcccttatttttatttttttaggggggacccccccccgtggtggcaaaaagagaaggaggggggggcccccccgaacccctccttggtctatccctgttccccggccccggggagggggcccgggcccctggccagggcca

SEQ ID NO: 56040 - DNA, 1044 bp, Zea mays
  unsure (1)..(1044): unsure at all n locations
  Clone ID: MRT4577_151100C.1
ctcctcctcccaccccatcgccgccgcaggctttgactccatcgcctctccctcctcttcgtctccggccggccaggtagttaacagctccagcagccatggggaaggagaagatccacatcagcattgtggtcattggccatgtcgactctggcaagtcaaccacgaccggccacctcatctacaagcttggaggcattgacaagcgtgtgatcgagaggtttgagaaggaagccgctgagatgaacaagaggtctttcaagtatgcctgggtgcttgacaagctcaaggctgagcgtgagaggggtatcaccatagatattgctctgtggaagttcgagaccaccaagtactcgtgcactgtcattgatgctcctggtcaccgtgatttcatcaagaacatgatcactgggacctcccaggctgattgtgctgtgcttatcattgactccaccactggtggttttgaggctggtatctccaaggatggccagacccgtgagcatgctctccttgctttcactcttggtgtgaaacagatgatctgctgctgtaacaagatggatgccaccactcccaagtactcgaaggcccgttatgaagaaattgtcaaggaagtctcttcatacctgaagaaggtcggttacaaccctgacaaggttcccttcgttcccatctctgggttcgagggcgacaacatgattgagaagtccaccaaccttgactggtacaagggccccacccttcttgaggccctggaccagatcaatgagcccaagaggccctccgacaagcccctgcgtcttccccttcaggacgtgtacaagattggcggcattggaactgtgccagtgnggcgtgttgagactggagtcatcaagccaggcatggttgtcacctttggtcctactggcctgaccactgaggtgaagtctgtggagatgcaccacgagtctctcctggaggcgcttcctggtgacacgtcggcttcacgtcaagaatgtggctgtcaggatctcaagcgtgggaacgtgcttccactca

SEQ ID NO: 56041 - DNA, 875 bp, Zea mays
  Clone ID: MRT4577_151101C.1
ggcccgctccgagccggccgggccggggacctctctcttccccccgaccgccgccgccgcctcctcgtcctctcggtcccctctccttccttcgagtttgcttcagccatgggtaaggagaagactcacatcaacatcgtggtcattggccacgtcgactctggcaagtcgacgaccactggccacctgatctacaagcttggaggcattgacaagcgtgtgatcgagaggttcgagaaggaagccgctgaaatgaacaagaggtctttcaagtacgcctgggtgcttgacaagctcaaggccgagcgtgagagaggtatcaccatcgatattgccctctggaagtttgagacaaccaagtactactgcaccgtcattgatgcccctggtcaccgtgacttcatcaagaacatgatcaccggcacctcccaggctgactgtgctgttctcatcatcgactccaccactggtggttttgaggctggtatctccaaggatggccagacacgtgagcacgccctccttgctttcactcttggagtgaagcagatgatctgctgctgcaacaagatggacgccaccactcccaagtactcgaaggctcgttacgaagaaattgttaaggaggtctcttcgtacctgaagaaggtcggctacaaccctgacaaggttcccttcgtccccatctctgggttcgagggtgacaacatgattgagaggtccaccaaccttgactggtacaagggcccaaccctgcttgaggcacttgaccagatccacgagcccaagagggcctcagacaagcccctccgtcttcccctacaggatgtttacaagattggtggcattggaactgtgcctgttggccgggttga

SEQ ID NO: 56042 - DNA, 900 bp, Zea mays
  Clone ID: MRT4577_151102C.1
cagaaatatatcgagataaatctcaatcaatatattcgattatgttttagggaaacacatgaccgctatcgaaggcacctattatctgagtacatcgtcatatgttaatcataaaagatggcacctccaacgatgggttgctgccacgacaaggcagggtttatcaaagagaactggttgtatggcagcaattgttgctgctgtaggaaggcagcgaccaatggattagccactgccagtggattaagtaatggttgtcgctgttgtaggtacgcagcagagttcgacacagtcagttggttgaatggaagcagctgttgcaagtaggcagcagggtttgccacagctagctgagtcagagctggtacaatctgttgcagcaactgttgttgcaggtatgtaggtgcattaaccacagcaagagggctagatgaaagcagttgttgctgttgtaggtaggcggcagggttcaccatggctagttgactgggcgctggtagaaactgttgcaattgttgttgttggtatgcagctacgtttgccagagcaagtgggttggatgcaagcagctgctgttgcaagtaggcgacagggttcaccacagctagttggtcaattggttgttgtaagacgctcgccgtaagcgcttgttgtagcctgtaggcttgcacagctaggtgttcgaagcccattgaagtaactggtgggaggaactgtggaataatggcactaggagcaagtgagcattgtggaataatgaacgcatttgttgcgctcacaaaaagggcaagaagcgcaaggagggctaatatcttggtagccattgttgttaggtcgttgctagtgagcttcgcttggtgtgtttttgaatgctcaacctgcccgggcggccgctcgaaa

SEQ ID NO: 56043 - DNA, 821 bp, Zea mays
  unsure (1)..(821): unsure at all n locations
  Clone ID: MRT4577_151103C.1
aattcaccgggctcgagcccagcgcgtcgcgatacttttgagccattcagtaaacactacctaagcgaagctacattagcaacaactctaacaacaatgggctacccaggatattaatcccttccttgcggcttcttgcgcctttttgcgagccgccaacaaatgcgttcaattattccacaatggctttcacttgctccaagtttccattattacacgagttcctcccaccagttacccttcaatgggcttcgaacacccagctgtgcaagcactataggctacaacaagcaattgcggcgagcgtcttacaacaaccaatttcccagttgcaacaacaatccttggcacatctaacaatacaaaccatcgcaacgcaacagcaacaacaattcctaccagcactgagccacctagccatggtgaaccctgccgcctacttgcaacagcagttgcttgcatcaaacccacttgctctggcaaacgtagttgcaaaccagcctcaacatcagctgcttcagtttctgccagcgctcagtctactagccttggtgaaccctgccgcctacctacaacagtctcaactgctttcatctagcccgctcgctgtggcctttgcacctacatacctgcttcaccttttgttgcttcagattgtnccagctcttgactcagctagttgtggcaaaccctgctgcctacttgcttcagctgcttccattcaaccaactgactatgtcgaactctgctgcgttcctacaacagcgacaacagttacttaatccactagcagtggcttacccattggtcgctggcttcct

SEQ ID NO: 56044 - DNA, 568 bp, Zea mays
  Clone ID: MRT4577_151104C.1
tcgcgatctagaactagcgagctcttcgacgtgctgtgggaggccaggcgcaactccgtgcgcctccgctcgctgctgcagcggaaggaggccgcgcacgtcgtcgagctcgagaggcggttcaagctcttcgcgacctcatccagagggcgtcgcgggtggtttctccaggtgatggtgctaggggcggcggcgacgccgtcgtcgacctcgaggtcgaggcgaaccggaatcccgcgttggctgctgcggtggccgccgcggcaacagagatagaccgtggaagcaagggtggcttgggattggaaccgaagtccgtctcgtcgttgcatcgtgctacatcggctggtactgacacagaaaagctgggccttatccaagtcgcaagccttatagagtcatcggcaaagaaggggactacagagctcaatctccggggtaagctggtggaccaagttgagtggctccctgtctcgcttgggaagttacaggatgtcacagagcttgatctatctgagaataggatcatggcactcccatctacaattggtagccttagatacttgac

SEQ ID NO: 56045 - DNA, 303 bp, Zea mays
  Clone ID: MRT4577_151105C.1
acagaaaaacgtttttacactttttgggataagcgtttggataggtacacacgtttcctcttttgaagaaaaacgtctgtgttgagtcattctttccgtatcagggttgggtttacaaaaggtacctcctgccctattggggaggctctgcctggttctcctaaatccctgagaatggaaaaacgggggttatttttgggggccccacaatttcaaaggcttttaaaattttcctttgttaacaaaaaggttttttcaagattggcccgttgtacttagccaacattttttgggatggggcct

SEQ ID NO: 56046 - DNA, 1191 bp, Zea mays
  Clone ID: MRT4577_151106C.1
gcaccctagtgtgtcactgtggacagcctcaggcacccattcacatctgtaccctagtgcgcttcccttataaaacctagctcctcaagctccagacgcagtcggccgccgcagaccgggagtagccgacgcgccgtcactgaatcctcagatcacggctagccgtaatcacgacactctgctgactcccggcgaggtactctgacgcatgcgcgagcgcttctcttcttctcttttcgctgtgcttttagtctgttcgtttgatgcccagatctactaggtttgtgtgatgagccgagccgatttatgcactggatttttagtcaagtgttgtttccgcctccgctacctttagtgtctatgtctgaatttgggttgcagtgattatcgagctataaattatagttgttgcgctgttctatactagatccagttaccgatctatgatattacggggttgagcgattcatgtgctggagtactagtccaagatttgcttccgtctcctcatctacctttagtatgtactctgtatataaacttaattgcagtttgcaactgattctcggccatagattacctccgttgcgttgttcattagatccatttccgacctctgatattacgtgggtggggggtacttcgactttgttttttccggattgtttgattactggtctattcccatacatatttgtttctcattgattttatataattttgatgtaagcagcagtgtaacattttccttcagccatgggcaaggagaagactcacatcaacattgtggtcattggacatgtcgactctggcaagtcgaccaccactggccacctgatctacaagctcggcggtattgacaagcgtgtgattgagaggttcgagaaagaggccgcggagatgaacaagcggtcattcaagtatgcctgggtgcttgacaagctcaaggccgagcgtgagagaggtatcacaattgatattgctttgtggaagttcgagaccaccaagtactactgcactgtcattgatgcccctggacaccgtgacttcatcaagaatatgattactggcacttcccaagctgactgcgctggtcttatcattgactccactactggtgggtttgaggctggtatctccaaggatggacagacccgcgagcatgctctccttgcttctacgcttgaagtg

SEQ ID NO: 56047 - DNA, 2034 bp, Zea mays
  Clone ID: MRT4577_151107C.1
ccggccgggtcaaaagtgcaaaggcttgcggtggatacctaggcacccagagacgaggaagggcgtagcaagcgacgaaatgcttcggggagttgaaaataagcacattcttccccgagtcgccgtcgtctgctccgggctgctgttctgcgcctccacaaggctttggcctctgttgtaagccatgggtaaggagaagtcccacatcaacattgtggttattggccatgtcgactctggcaagtcaaccaccaccggccacctgatctacaagcttggaggcattgacaagcgtgtgattgagaggttcgagaaggaagccgctgaaatgaacaaacggtccttcaagtacgcttgggtgcttgacaagctcaaggctgagcgtgagagaggtatcaccattgatatcgctctgtggaagtttgagaccaccaagtactactgcactgtcattgatgcccctggacatcgcgacttcatcaagaacatgatcacgggtacctcccaggctgactgtgctgtcctgatcattgactccactactggtggttttgaggccggtatctctaaggatggccagacccgtgagcatgctctccttgctttcacccttggggtcaagcagatgatttgctgctgcaacaagatggatgcgaccactcccaagtattccaaggcccgttacgatgagattgtgaaggaagtttcatcctacctcaagaaggttggatacaaccctgacaagattgcctttgtccctatctctggttttgagggtgacaacatgattgagaggtccaccaaccttgactggtacaagggtccaaccctgcttgaggctcttgaccagatcaccgagcccaagaggccttcagacaagcccctgcgtctgcccctccaggacgtgtacaagattggtggtattggaactgttccggttggtcgtgtggagactggtgtcatcaagcctggaatggttgtcaccttcggtccaactggcctgaccactgaggtgaagtctgttgagatgcaccacgaggctctgcaggaggcccttcctggtgacaacgttggcttcaatgtgaagaacgttgctgtgaaggatctcaaacgtgggtacgtggcctccaactctaaggatgaccctgccaaggaggctgctagcttcacctcccaagtcatcatcatgaaccaccctgggcagatcggcaatggctatgccccagtgctggactgccacacctcccacattgctgtcaagtttgctgagctcataaccaagatcgataggcggtctggcaaggagcttgagaaggagcccaagttcctgaagaatggtgatgccggtatggtgaagatgattcccactaagcccatggtggttgagaccttctctcagtatcctcctctgggtcgttttgctgtccgtgacatgaggcagacggttgctgttggagtcatcaagagcgtggagaagaaggacccaactggtgccaaggtgaccaaggctgcaataaagaagaaatgatgcgtcctcccatgtgccctcgtttattttgtacttgtgcccgtatacttcgatctgttaaaatctattggttgtgtgccctgtgtctgttgtttgggtatctatactgttattttgagacatggttgacttgcatggtcatctggattgggttcgcatttctgagtcatttgtcttgacatgaaaatcttgcttttttttcttgatcccaaaaaaaaaaaaaaaaaaaaaaaaaaaaaaaaaaaaaaaaaaaaaaaaaaaaaaaaaaaaaaaaaaaaaaaaaaaaaaaaaaaaaaaaaaaaaaaaaaaaaaaaaaaaaaaaaaaaaagggggggtcccttttaaatgttccaattttcccaaccggggtttgccagtttttttttttttttttgggggccctaaatttaattccactggcccccattttaaaaaccctggaaattgggaaaaacccggggtttcccaatttttttgcggtttttgcccatatcccctttttcccc

SEQ ID NO: 56048 - DNA, 248 bp, Zea mays
  Clone ID: MRT4577_151108C.1
gtaataaaaccgcggaaaccagcacaacaaccgggggatggaagaacgcggaccggggcatcacacacgggcccagaggcacgctcacgaaccaccaccagcaagggccacaaagaccagtgggaggagacccacaagacgacccgcgaggacccgaggagaaaggcaggaggaggatccgaaaccaacggagcacagggcacacacaagagacccacgaacgccaccgaaaccagagaggaggaaaa

SEQ ID NO: 56049 - DNA, 899 bp, Zea mays
  Clone ID: MRT4577_151109C.1
gacgagccgtttaaataggtgtcaagtggaagtgcagtgatgtatgcagctgaggcatcctaacgaacgaacgatttgaaacgcatccatctaccacacaaaaacttcatatttgttcatttgtctccagcaatacaatggagtactcgtctactagggtcgtgtgtttagctctggcgttggccatggtcgccgtgacgccgtgcgcggcccagaactcgccgcaggacttcgtgaacccgcacaacgcggcgcgcgcggccgtgggcgtcggcccggtgtcgtgggatgagaacgtggccgccttcgcgcggagctacgccgcgcagcgccagggcgactgcaagctggtgcactccggcggcgggcccaaccactacggggagaacatcttctggggcggcggcagcgcctggaaggcgtcggacgccgtcggcttgtgggtgggggagaagcagaactacgactacaacagcaacagctgtgcggcggggaaggtgtgcggccactacacgcaagtcgtctggcgcaaatccaccgccatcggctgcgcccgcgtcgtctgcaacaacggcggtggcgtcttcatcacctgcaactacaacccgccgggcaacttccgcggacagagaccctactagctacctagctagctagttccaatatcgattatacgcgtacatatactctacatgctaccgattgaataagccacaaactaagcttaggccaccagttgattaggtttcttgtgaacctactcacccaggtttaagtgaagtgtgcatacatgtatgtgtatgttctgtgtggggtgtgacagttcgtttagtgtttcataaaataaataaatctctactactacttaagtccttaaaaaaaaaaaaaaaaaagcggcc

SEQ ID NO: 56050 - DNA, 1113 bp, Zea mays
  unsure (1)..(1113): unsure at all n locations
  Clone ID: MRT4577_15110C.1
taatcacacaaacctacttatattatactatgtctaccagttaaactaattaactggaatagtgaaataactcaccataactaaatttggctcgataatcgcaagaaccgcgaagtcgacgagagttccgtgactcgcgtaatttatcgagcaaatagtgagcatcacactagcacattaatttattcaacgattgaaatattctgaataactcatcagcttatcatgaccataatgatttgataatcgcagatcgatgatgagtattggttcaaacttcccatcgaacacttggcaggggttgtgctcgaaggcggcttccagaggaagagctcaacagggggctttggagctcaacacaagtagcacgtaattggaagatagatcgtcgagatcgacgagcatgtcgtggacacgacgaggagccaagggggctgctggctcctcaatttgacgagtaggtggacacgacggaagagtacacacccgacgtgcagctagagcagctagagaaagcgcgcacacgacacaagagcagagccgggtcgaggggcacaaactggaaggtcgatggtgccgggctactgctgcgacgatgggaggtgaggtccaacacgcagtccaaatccttgatgcagatcgacatcaaggtgaagccgagcgtgagcacaatggagatcgatggtcggcgacagacatggcagggaggacatcggcgagngtgaggtcatcagggcgcgacatggtagactgaagaccgacatgtgttaagaggccgaactcgatcgatgagggaggaacccagatgtggcttggatggaacagcaacagggagcatcagtagaagcgagcgagcgatgctcagcggctgcgggagaggctgacggcgccgggaaacaacggccggtgatgattgcagaggcgagaagagaccgaaggtggaggacgactggacttgtgcgagttcgaccgcggtgcagagcgctaccagggagccgatgagctactgtggagcgagtagcaggggagctgatgccgagctctaccgctactgccactccggcgtgctgcatgggtgagagacacggtgggaggatcatgacatggagagat

SEQ ID NO: 56051 - DNA, 1158 bp, Zea mays
  Clone ID: MRT4577_151110C.1
ctggaagaaggcaaggtagatgccctctaactcctgaagaggtgggtttgatgttgagagcgctgggctacagaaaggatgtccacatttatgtagcttctggagagatatatggaggtgcaaggactctggcacctcttaaagctctcttccctaatctccacacaaaagaaacaatatctagcaaagaggagctggctccattctctaaatattcttctcgcatggctgcacttgatttcattgtctgtgatgaaagtgatgcttttgtggctaacaacaacggcaacatggctaaaattttggctggacgaaggtatccgttgctgctatgtcatcagtggtttattacttgccctgaccatatttcgtgccctctgcaggagatactttgggcacaagagaacgatccgaccaaatgccaaaaggctctatcccttatttttgaacagaggaaacatgtcgtgggatgcattctcctcaaaagtacacatggttcagaaaggatttatgggagagcccaaagagctgaggccagggaggggagagtttcatgagaacccttctacctgcatttgtgaaaggactgatggcaaagcagtagccagagccaaatctcaagatgatcaagtattgaatagtgttgctgaccaaggcaaaggcattggcgagccagctgttcccaatcatacggatgaagaggcgggcgaacctgatgatgacggagatgtccctgctgacaaagaggttgttgacgctgaaatggttgacgatgtattggccggggatcctgagttagaacagattctttcagactagtatccatcatcagagatgtttgcacaaaccaatttttggccgagtgattgatgaattttgccacgtccctcgaaattgtacatactttttttttgcgatgtaaatgtacgtatacatccaatctactctagcttagctcgcagcctccttacacagtagctcttttgtaacgtttgtggattgttatagcttgtatcatgggttttgctttttgtgtagcaactctttgacgccctttttgtgtaagcatcttttggcatgtaggatgtgaggtgcttaagcacggataattaaggagagaacgttgttataccattttcataaatgagttacttgcct

SEQ ID NO: 56052 - DNA, 847 bp, Zea mays
  Clone ID: MRT4577_151111C.1
cattgggtacctcgaggccggccgggacgcatccttctaccaacaaaaacttcatatttgttcatttgtctccagcaatacaatggagtactcgtctactagggtcgtgtgtttagctctggcgttggccatggtcgccgtgacgccgtgcgcggcccagaactcgccgcaggacttcgtgaacccgcacaacgcggcgcgcgcggccgtgggcgtcggcccggtgtcgtgggatgagaacgtggccgccttcgcgcggagctacgccgcgcagcgccagggcgactgcaagctggtgcactccggcggcgggcccaaccactacggggagaacatcttctggggcggcggcagcgcctggaaggcgtcggacgccgtcggcttgtgggtgggggagaagcagaactacgactacaacagcaacagctgcgcggcggggaaggtgtgcggccactacacgcaagtcgtctggcgcaaatccaccgccatcggctgcgcccgcgtcgtctgcaacaacggcggtggcgtcttcatcacctgcaactacaacccgccgggcaacttccgcggacagagaccctactagctacctagctagctagttccaatatcgattatacgcgtacatatacttaaatcgcgttcatgctaccgattgaataagccacaaactaagcttaggccactaagcttaggccaccagttgattaggtttcttgtgaacctactcacccaggtttaagtgaagtgtgcatacatgtatgtgtatgttctgtgtgggggtgtgacagtttgtttggtggtttctaaataaataaatgatgaataataagagtggtcctgaccc

SEQ ID NO: 56053 - DNA, 889 bp, Zea mays
  Clone ID: MRT4577_151112C.1
ccggggaaaaaaaaaaaaaaaaaaacgcatccatctaccacacaaaaacttcatatttgttcatttgtctccagcaatacaatggagtactcgtctactagggtcgtcgtgtgtttagctctggcgttggccatggtcgccgtgacgccgtgcgcggcccagaactcgccgcaggacttcgtgaacccgcacaacgcggcgcgcgcggccgtgggcgtcggcccggtgtcgtgggatgagaacgtggccgccttcgcgcggagctacgccgcgcagcgccagggcgactgcaagctggtgcactccggcggcgggcccaaccactacggggagaacatcttctggggcggcggcagcgcctggaaggcgtcggacgccgtcggcttgtgggtgggggagaagcagaactacgactacaacagcaacagctgcgcggcggggaaggtgtgcggccactacacgcaagtcgtctggcgcaaatccaccgccatcggctgcgcccgcgtcgtctgcaacaacggcggtggcgtcttcatcacctgcaactacaacccgccgggcaacttccgcggacagagaccctactagctacctagctagctagttccaatatcgattatacgcgtacatatactctacatgcatgtccagatcgatgatatatatacctcgcgtgcatgctaccgattgaataagccacaaactaagcttaggccaccagttgattaggtttcttgtgaacctactcacccaggtttaagtgaagtgtgcatacatgtatgtgtatgttctgtgtggggtgtgacagtttgtttggtgtttcataaaataaataaatgaatgaataataagagtgttcatgaacaaaaaaaaaaaaaaaaaagcggcc

SEQ ID NO: 56054 - DNA, 606 bp, Zea mays
  unsure (1)..(606): unsure at all n locations
  Clone ID: MRT4577_151113C.1
ggaccctcgaggccggccgggggcagcagttggggagagagaggcagagcgagcgagcgagagagcgctggtcatggcgtcactgtctgtcgccgccgtggcggccaccatagcgatgccaagcagcagcggtgggagagggcgccgtctcagggtcgcgtccatggccacccagaagggccagaagccgacgcccaagaccgtctccggcacgagaagatcgggcacgacgacggtgttcccgcgggccccgccgtcgtgtacctcgtccccgaggagcaggcgtggcaggtggcgctgcaggccgtcgccgcgctcgtctgcgtggtcggaggcgccgccgcggtggccgcgtccacgttcgtgtccaggctgcagggctcctccagctgacgagcgcatttgcagccgtacctaatttcccgtgcatggctaagcagagaattgctctatgcttataacataattttgtgtagattatgtgctcccgtgtcaagattatgatacatgggatggatatatatatgccatatgtagcgagctgaagaggtgtgattgtgtcaagctttgcatggtacagtgagggtattccttctttctttgngg

SEQ ID NO: 56055 - DNA, 255 bp, Zea mays
  Clone ID: MRT4577_151114C.1
ccctcaagcgcaagctggctgctcatcgtagtacaatcctaagaagggatggcattccataatacggctatccatgctgtctccgaacacaaggcaacctcgaagagctccaagggcggactcctgttcctcgtcggcaggattgccagggtcctcaaggcgggcaagtacgcggagcgcgtctgcgccggcgcccccgtgtacctcgccgccgtcctctagtacctcgcggctgaagttctagaacttgccccc

SEQ ID NO: 56056 - DNA, 883 bp, Zea mays
  Clone ID: MRT4577_151115C.1
tttttccgggcactgattgggttggcagcgcgccgcggcagcagagggggagagagagaggcagagcgagcgagcgagagagcgctggtcatggcgtcactgtctgtcgccgccgtggcggccaccatagcgatgccaagcagcagcggtgggagagggcgccgtctcagggtcgcgtccatggccacccagaagggccagaagccgacgcccaagaccgtctccggcacgagaagatcgggcacgacgacggtgttcccggtgggcgagccgggcccgcggccggcgacgacgagcggcaaagcgccggttaagctgctgacgaacgtggagaagctgcggctgctgaccaaggcggagcgcgcgggcctgctgtcggcggcggagcgcgcggggctgtcgctgtcggcgatggagcggctgggcctactgtccaagctggaggagctgggcgcgctgtcggcggccacggaccccggcacgcccggcgcgctgcttgcgctcgcgctcccgctgctggccgcgggccccgccgtcgtgtacctcgtccccgaagagcaggcgtggcaggtggcgctgcaggccgtcgccgcgctcgtctgcgtggtcggaggcgccgccgcggtggccgcgtccacgtttgtgtccaggctgcagggctcctccagctgacgagcgcatttgcagccgtatctaatttcccgtgcatggctaagcagagaattgctctatgcttataacgtaataaatagtgcgtgcgttgcaacgggaacatataatatcacgataacttatatataaaatgtgtgttatactgttattagaaaagatttcataatttatttatgatcctaaccatacataaattttgttattttaatct

SEQ ID NO: 56057 - DNA, 267 bp, Zea mays
  Clone ID: MRT4577_151116C.1
attataataagcaagcggagagatacatctatatttcacaactgggaattcaaatctaagaggtccattacattctcgtcgctccggttttatatgagtatgcaagctagctactagtcgggttgggtgggagaccgttctaattttttttatttaattttctatatgatttcttttttatttatcctatctatttattcttatctttattttatttttatattttttattattatatattatctttattttttattattttttttt

SEQ ID NO: 56058 - DNA, 346 bp, Zea mays
  Clone ID: MRT4577_151117C.1
aagggagcgccttttatttaatagagggattttgtaccgtcagtatggaatattattgcgcactaaataaattcaaaaaggttcaaacgaaactacttcttttgttatctggtttcacaaggccaagttctatgacaatctaaaaaaaaatggttgctatctaaaaaacacccaatgcgggtaccccaaccagcaatagcagaggggaatggaccgataatttgagctctcaccggattggtgactgactagcagccgaacgggatgctcttaagctcgcgcatcatatgcatcctcctcccttagagggagcccaccggtgcatcccaacagtgattcttcacct

SEQ ID NO: 56059 - DNA, 444 bp, Zea mays
  Clone ID: MRT4577_151118C.1
ttttgctcatgggggggcgctcgatggacgagcatgggattcggtgctccaagcaccaggggcagctctgatatcataaaggctggcatctatggtggtgtatgagagtgtgccacctgcaactgtatcaccaggtgatgatggtcttgctgcaggtggaactgagccggcccgtcatgctccgctatggatgaccagagtcacaaggactacgacaactgggcacataaatataatatggggggataaatatgatcctgacatgtgtgctcttgattctctatccatggaggctacaggggatgatgctcatctgggaacagtggtcgcagagatgttcttatggtgccggaatgaatataaaacgcatgtatgctgtgattttacgggtgaggaattcaaatctatcacttcaaaatacaaagttttatcaatgatgttagc

SEQ ID NO: 56060 - DNA, 436 bp, Zea mays
  Clone ID: MRT4577_151119C.1
cagatgcttacggtatttacgctagaagctatttctgtatgagatggtgtcacgacaattatacctcaacgatcactagctcatgtagcatgccttcttcaacaataccttcgatccgtggtaggtgcactatgagcaaaagaagatgctcaatcgtataagcctcaagacgcacgccgtctacggattaaacctttataacgatggtggtatgagcaacgacgaggactatatgaactgcaagtatttggacgaacgcacgaggctcagaagctgcagccactgctgctatcggcgatcaagacagacgctttagctaagctgcttccatgctgtcagcgacaactatttgttatatgcatccgactggccacagcgaaatctgttgttgatttggaggcaccagtattgccttctacactgctagctactgact

SEQ ID NO: 56061 - DNA, 399 bp, Zea mays
  Clone ID: MRT4577_15111C.1
gtcagtccctgggggcagcggccgcgcctgttgtgtctgcgtgagcccatgcccgtgcgagcgcgctaacgcggagaccgtcgtggggagacgactgaacaccatgaccatcggcagacggagcaccaaagccagccccggcgggccctagggggggaccgagggcggccgttggcactgcaccagccgcacgaggggtacaagctgacaccgatgcggagggagcggcgactgagcctagccagaaaaagaacacgaccggagaggactacagcaagcctgctaacaaaaccagcggctcctaaataaaaggctgtgaagaggacaggcgaattaaacacccatggaccgctactggggtgacacgccagtagtaacgcagctcatgcctggtccgtc

SEQ ID NO: 56062 - DNA, 549 bp, Zea mays
  unsure (1)..(549): unsure at all n locations
  Clone ID: MRT4577_151120C.1
aaacactntaacagctcagttacggggggaaggtcttaaaaaaaacctagttctgggggggattatacctgttggtacccgattccaaaaatttgtgcatcgttccccacaagacaagaacctttatttttaaattcaaaaaaaaaatctattttcctcccaaataaaagaggggggggggggggcctacaaaaaaaaattctttttattcttacccaacaaacaatttttatttaacatcttaaacccccttttcccccctttattctatttaaaaatacataaaaaaaattttttttcttttatttaaacaatacttttntcctctttaaactcacacccctcattttttatttttttctcccataaaaaaaaanatttttttaaaaaaaaaaaaacacctttttttttttaactatctttttactccccctttatatcctccaaaaaaccttttcttcaccccattttttctttttttcaatctttttctctttttttttttttccccaaaaaaaaattttctttcctcctnttctccccccccct

SEQ ID NO: 56063 - DNA, 2172 bp, Zea mays
  unsure (1)..(2172): unsure at all n locations
  Clone ID: MRT4577_151121C.1
cccacgcgtccgcggacgcgtgggtgaggatgcggctaaaagacaggcaagtcggctcgagtatgctctcatgtgaataccctgacttttatatcggagatgactccttcagtaaatcagaagttgagattccaaaagagatgtgtggtgaaacaagtggggaattggagtttggcactccgacttctggccgctcttgggattttctgagtagaagtggaagtcctttctctgcgtcatgctctagtcaggcatcccatagaagggagccgtcagtagttagggaaggcaagaagaagattttagagagattgtctatggtatcatcaacagtcaatattgaggaagaaatggaaggtcgcagaagtacaggcacacttggtgacatgctcacaatatcgaaagtcaaggaccaggaagaaattggggctgaaacactggggagcccagcacctgagctggaacctgaggagcctttctcatgtttgccaagatctcgatcccttccactttctttgtcctatggagtcgctgagtcaaatggaataacctctggcactcatgaagctgaaaaggaaagaatcaggaagtcgtcatcgtttagggaaaaagtttctagcctgttctctaaanntaagaaatcaaccagggagaaggtagatccatctgtgagcaatagactcaaacatggaggggctgtgactactggtgatgtgaaggaaatctgcaaccatcttgccctagacaatcttcagaaacaacatacttgtctaaacacagatgagaagaacactgtgcaaggactcgtgactagttcttgtgagaccaatagtgcagctgatatccctgccaaggatatttcctccatttcaagtcttggtgtcccaggaatctttggtggccttcaggatgaacctagtcctgtatctgtactagatggaccgtttatatgtgataacaataggaggctactgtactcatctgaaaatttcatcacttcatccccacaagctttgtcaaggtctcccctgatcggatcattttcacggtcactgtcatgggaggatcccccgctggaagtcatgtcgccgaattcgttgagactctcaaggcttttctcgaaggctgatgaagatctagattcactgacgtttatccagaagctggtccactctcgaggcacgggtcgagaaagttgcatattagctgaccctttggacccgagtttgctcgagaagatttcggattacgaagaagatggaattaagtttgggaaaaggcggcccaaacagaggctccttttcgacgccgtaaacgaagcgctcatcgagcttgcttcgatggcggaactggctgcgtacccctggggtagatcatgctcttcggagcacggggattgcaagaacggttccagcagtaattctgcggctgaggaaatctggcgggtcattaggaactggtcgatacttgagaagtaccctcccggtgaagctattgaaagaaatctcttgctggagatgatactaaagagggaggtggcggaggcagccagcgctgacacgactcggttagagacgtttgatctcaacaccacggtctgcgccatggtcttggatggcctggttgaagagacagttgtagatctgactaactactgctagtgaggtacctctgccctctaactaataatctcgcgctctgctccctagtgttggtgtttggtgtgatacttgctgccgtaacactgctccatgctattactcgctcaaatgtgatgccaaataaatgggtcttctacgttgtttacgtttaaaaaaaaaaaaaaaaaaaaaaaaatcgggtcattttcacgcggtacctcatgggaggatcccccgctggaagtcatgtcgccgaattcgttgagactctcaaggcttttctcgaaggctgatgaagatctagattcactgacgtttatccagaagctggtccactctcgaggcacgggtcgagaaagttgcatattagctgaccctttggacccgagtttgctcgagaagatttcggattacgaagaagatggaattaagtttgggaaaaggcggcccaaacagaggctccttttcgacgccgtaaacgaagcgctcatcgagcttgcttcgatggcggaactggctgcgtacccctggg

SEQ ID NO: 56064 - DNA, 322 bp, Zea mays
  Clone ID: MRT4577_151122C.1
gctcaatctccctgcgccactccatacatctactcactcccaggacacgggaagctacgaagggtggcgttcgtcaccgcccgggcctcggtcgagacccttcgcccgtcggcggcatcgatcaaatcgtcggaggccttccttggccactctagccggctctgacgcacctgcgtattccacgaggcgcgaactcaagggggaagccaacggcaaggggctgcccagccttccctccacctgctaccttgacggcaacctgacgggtgacaatggctacaacccgttgggcctggctgaggaccactagaacctgcggtgg

SEQ ID NO: 56065 - DNA, 339 bp, Zea mays
  Clone ID: MRT4577_151123C.1
ccgggtcgacgggagccacgcgtccgattatctcgccgttcccatggacatcgatctctggcgctagacatgctaagaggcaggcttgatcagtgcgatgtatgaccgaatggaggcttgagggattgaaccatcaataacaagcaacgtgcttcttctcattacttatcttgtgcacgctgttttacgttcaagagatcaatcaaagcctctagaactgagaggtgaagatatccaaggtcggaaggctggaaagctctggattggagatctaactgcctcgtgtgcaagtggtatcaaacacatgatagacttacaacatgagggagaggagataga

SEQ ID NO: 56066 - DNA, 450 bp, Zea mays
  Clone ID: MRT4577_151124C.1
ccggccgggggggcaaggtcaatcgagcctgaacaggctcgaccgcgcccccaacccggccatgccctacgggatgcccatggcatacaacacgaaccccatgccaatggcttacgcagggaacactgggtattactaccctacttactgaggaggcctgttctttaatcatccttacagttgctgtgaatttttgttctgtgttggtgatcttccccgccctgcggttgtatccagcatcttctgttgttcccctgtccctggatcaaaccttttggtctgatatatgtaatgtaattttctttgtttggaaccaaatgcagcatccgagggtggtggctatagttgattacataatctcatattgatctttacactaaaaaaaaaaaaaaaaaaaaaaaaaaaaacaaaaaaaaaaaacaaaggaaaaaaaaaaaaaaaaaggcggcc

SEQ ID NO: 56067 - DNA, 413 bp, Zea mays
  Clone ID: MRT4577_151125C.1
caacatacgacccatcattttttaaataaacaatacgggacaaacaggtcagctcccgaaatcgacaaggtccaatgccttttttaacgggaagggcgacaggggggaccggtttccagcaccagtttgcctggtgggttcggaagccaagccaggaacgaccggggaccattcatgacatccaaataaaaccgggtggggcggtttctccttatttttttacggaacacgaagtacgttactactacaggtcacacagttacctcaggtcactgggtggtcgactaattatgctccgccgggtgatgctggtttaacacaaaggccccttccagggttttatggaccccgggtttgaacttctcctccttgcggcctcttttaaggttcataaaaatggcaaattttgcaaa

SEQ ID NO: 56068 - DNA, 400 bp, Zea mays
  Clone ID: MRT4577_151126C.1
tgggtacctcgaggccggccgggcagcttcttgttgcccgcgaaattgatcccctccaggctgcagcggtctcggacacgttcatgaaaggaggtgatgcacacaccgccgcaccagaggccgcatactaagggcgggagcatcatgagccagacaataaaacgcatctcccatgtcctgcagaggacagcgccgatcctaatctggttgttccaccagaaccgctgtccggactgaggtccgcattatcgaggatcgatgtactacatgtaaccttggccctcgagagacgctgaggaaagcaccgtcaccaaaaacactaggaactcacttggcctgatactcctcaagggcgacaatataactttgatgatgcacggcgggaagtgaaccattctta

SEQ ID NO: 56069 - DNA, 740 bp, Zea mays
  Clone ID: MRT4577_151127C.1
gggacaggctgctgaggccggaagtgatcgctgagccggagatcaccgtgacggagcgaacggtggaggacgagtgcctgatcctggcgagcgacgggatgtgggacgtgatcagcaacgacatcgcctgcaacgtggcccgccaatgcctggaggacgggaacccgcctcccgccgaccccactgcgggaggaggaggaggagctccggccgccggcgtagtcgtcgtcgccgcccgcgaggccgagccccggtgcctccgcgccgcctcgctcctggccaggctcgccatcggcagggagacacaggataacgtcagcatcgtcgtcgtcgacctcaagcacagggactgagtcagtgagtgagtggtggtatccggtttctgatcctgcagcgcatcagcgtaatcgatctagggctgagctgaactgatactgtgaggaggtgatcgtctagatcgtctagacctttgacatttccttggttctttcgattctaagatataagatttgtagcctgtttcttttctttcggtcgaaatgtatgtgtggagagaaagaaagtggatggaagatttgccgtcctcaactgaaggtggggggaaaaaacggaggacaaaaggaacaatgaaaaagagagcaattgtacagagtatgacaacatgatgctacatttatgtgcattattaataccaacttgtttccgttttctctaaaaaaaaaaaaaaaaaacttgcggcc

SEQ ID NO: 56070 - DNA, 365 bp, Zea mays
  Clone ID: MRT4577_151128C.1
aaaccaaccaaccgttttgggttaaccctttttttttttttttagggttaatcccaaaccccccattttaaaaagggctcgtttagtcgaaggtttcataaaaccacagggaaaattagggggccttaaaaaaacagcagcattattgcagcacccaaataaaatttacacataaaaacgcaggccaaaacccgaaaaaaaaccgaaaccccgccgccggcaaaaacaaaaatgcccccaaaaaaacaccattgcccaggggcgaaatataaaaaagggaacctaccccgggagttccaaccaaaacaaaagaccctttaccggttttggaaaggcgggggcgggacggggggggagcacttggg

SEQ ID NO: 56071 - DNA, 979 bp, Zea mays
  unsure (1)..(979): unsure at all n locations
  Clone ID: MRT4577_151129C.1
atcgagataaatctcaatgaatatattgattatttctaggaaacacatgccggtatgagggcgccattatcaagtacatctcatatgtaatctaaaagatggcacctccaacgatgggttgctgcctcgacaagacagggttcatcaaagagaactggttgtatggcagcaattgttgctgctgtaggaaggcagcgaccaatggggtagccactgctagtggattaagtaactattgtcgttgttgtaggtacgcaacagagttcgacacaatcagttggttgaatggaagcagctgttgcaagtaggcagcagggtttgccatagctagctgagtcagagctggtagattctattgcaacaattgttgttgcaggtatgtaggtgcattggccagaacgagcggggtagatgaaagcagttgttgctgttgtaggtaggcggcagggttcaccatggctagttgactgagcgctggcagaaactgttgcagctgttgttgttgctggtgtgcaactacgtttgccagagcaagtgggttggatgcaagcagttgctgttgcaagtaggcggcagggttcaccatggctaggcggctcagtgctggtaggaactgttgttgctgttgcgttgcgatggtttgtattgttagatgtgccaaggattgttgctgtaattgggcaattggttgttgtaagacgctcgccgcaagcgcttgttgtagcctgtaggcatgcacagctgggtgttcgaagcccattgaagtaactggtgggaggaattgtggaataatggcactaggagcaagtgagcattgtgaaataatgaacgcatttgttgcgctcacaaaaagggcaagaagcgcaagaagggctaatatcttggtagccattgttgttaggtcgttgctagtgcgcttcgctnaggtgtgtgtttctaaatgttcaaaatattatgggtgatcccaagcccggccggc

SEQ ID NO: 56072 - DNA, 230 bp, Zea mays
  Clone ID: MRT4577_15112C.1
ggcttagtatggacctgcaccgaggtggagcacgtcctgcagcaccgggcgcagttgaagagggagatgtcaaagtacatggactaggtcgacagcctttgcaccagcattgggaagactccgttcagcgggctcactgcctgatcctcgttggagggcacaaggagcctctaggaggaactaagactgacctgtctcgagacttgcggacatgaggacggagcgaggga

SEQ ID NO: 56073 - DNA, 816 bp, Zea mays
  Clone ID: MRT4577_151130C.1
ccgctccgagccggccgggccggggtatcctcacctcgcccgccgccgccgcctcctcctcctcctctcggctccttctccctccttccagtttcagccatgcggtaaggagaagactcacatcaacatcgtggtgcattggccatgtcgactctggcaagtcgaccaccactggccatctgatctacaagcttggaggtatcgacaagcgtgtgatcgagaggttcgagaaggaagccgctgagatgaacaagaggtccttcaagtacgcctgggtgcttgacaagctgaaggccgagcgcgagaggggtatcaccattgatattgccctgtggaagtttgagaccaccaagtactactgcaccgtcattgatgcccctggtcaccgtgacttcatcaagaacatgatcaccggtacctcccaggctgactgtgctgtgctcatcatcgactccaccactggtggttttgaggctggtatctcgaaggacggccagacccgtgagcacgccctccttgctttcactcttggagtgaagcagatgatctgctgctgcaacaagatggatgccaccactcccaagtactcgaaggcccgttatgaggaaatcgtcaaggaagtctcttcgtacctgaagaaggtcggctacaaccctgagaaggttcccttcgttcccatctctgggtttgagggggacaacttgattgagaggtcaccaaacttgactggtataagggccctaccccttcttggaggtctttgaccagatcaatgagcccaaaaggccctcccacaagcccctgcgtcttccccct

SEQ ID NO: 56074 - DNA, 638 bp, Zea mays
  Clone ID: MRT4577_151131C.1
gccggccggttttcgacattggtaaaagacgatcgaattggcaattagcttgatatattactacttactagctagctctagcgagatggcctgcttcttccggctaccgccgccggccccgtattgcctgctcatcgtcatcatcatatgctcgccgctgctctccacctgctcccacgccaagccttgcacccaatgttgcgacgacgacgacgacgaccaggatcttgcggtgctcaacatgagcttcgtctccaactctggcgccgccggacgacacttggtcttcgtcctcgctccgcaaactatgcagcagccatcattattcgtctccccaaggataccaccaaagctatccgtagagccctctagtcccacatggacgactataacctacagcgtggctgtgctggccatgtgcagatatattttgtttgctatatagatataacattatgtatatttctactgatagatagccttgttcccccttgtagttaagggtatatataagctgatctatatatttatttttttacaaaaaaaaaaaaaaaaagccatccttggtgtgtaaacaataatatatacatattatttactaaaaaaaaaaaaaaaaaaaaaaaaaaaaaaaagtccac

SEQ ID NO: 56075 - DNA, 352 bp, Zea mays
  Clone ID: MRT4577_151132C.1
tttttttttttttttttttttttttttttttgaactgaaaggccgaagggggctagaaataacagggggaggggggggcacaataatacataaggttcaacggcaccacattggccatttttttacagttgcgtaaaagaacagaaccaaccgcgtggttacatagcaaacaaactcagaccaagccttctggataaaaaaaaaacaactgcaacgaaattcaacaaaacaggcgcaataaaaaggcgtctcccaaaagcaagcggaagggcaggagcgatactagggagggggcgcaaaggacaggacggaaaaacgctaggggggcaaacgggacgagaattagggccgc

SEQ ID NO: 56076 - DNA, 1122 bp, Zea mays
  Clone ID: MRT4577_151133C.1
cgacaccaggccgatggggccggcgcccaccacgagcacgcccgtctcgggccccacccccacgcggcggcacgcgtgcacgcccacgctcagcggctcgcacatggcgccctcctccaggctcaccccgtcggggagcttgaagcacaggtcggccgggtgcaccacctggttcgccagcgagccgtgcaccggcggggtggcgaagaacttcatgtcctcgcacaggttgtaccgcccgcccttgcagtggcggcagcgccagcagctgacgcccggctccagcgccacgcggtcgcccacggacaggtgcgtcacgccggcgcccacctcctcgaccacgcccgcgcactcgtgcccgatcaccatcggctccttcaccacgaagtgcgcgatgcgcatctcctgcgagaatcgatgatgcgtaaagagtcagaatccatttttttttttttttttagccgtgcaacaattcccgcgccgtagaattacagagacatcggatcggatcacgcaccctgaggtagtgcacatcgctgccgcaaatccccactgctttcatgcgcacgcggacatcataagggccgacgggcgggagcttgaagggcatgatcttgagggtgttcttggcagccagccacgccgccatgttctcctccacctcgccgcccgccgccgccgcatcgctcccttgcgctcccttccccatttccccttgtctcctactcgctgcctcactctcactctattactgacaggaagagggagaccgtgtacgcagatgagagccctgctgcctacttgcaacagctgcttccattcaaccaactgactgtgtcgaactctgctgcgtgcctactacagcgacaacaggtacttaatccactagcagtgcctaacccattggtcactgccttcctacagcagcaacaattgctaccatacaggcagttctctttgatgaaccctgccttgtcgcggcagcaacccatcggtggaggtgccatccttgagatcgcatgtgagatgagatcgataatggtgccctcataccggcgtgtgtttgctagtaataatcaatctttctgtattgtcatgttctcccggcgctaaaaaataaaa

SEQ ID NO: 56077 - DNA, 1428 bp, Zea mays
  Clone ID: MRT4577_151134C.1
ccaggcgaggctctttaccaccaccctaccaccattggttaccaggatttaatccttcctgggccttttgggccttttggcaggcgcaccaaatgcgtcaatatttcaacaatgctaactggctccaggtcccatattacccagtttcttccaccagttacttaaagggcttcgaacacccagctgtgcagcctataggctacaacaagcaattgcggcgagcgtcttacaacaaccaatttcccagttgcaacaacaatccttggcacatctaacaatacaaaccatcgcaacgcaacagcaacaacaattcctaccagcactgagccacctagccatggtgaaccctgccgcctacttgcaacagcagttgcttgcatcaaacccacttgctctggcaaacgtagttgcaaaccagccacatcaacagctgcaacagtttctgccagcgctcagtcaactagccatggtgaaacgtggcgcctacctgcatcagcaacaaatgctttcatgtagtccgctagctgtggccaatgcacctacatacctgcaacaacaattgttgcaacagattgtaccagctttgaatcagctagttgtggcaatccgtgctgcctacttgcaacagctgcttccattcaaccaactgactatgtggatctgtgctgcgtacctacaacagcgacaacagttacttaatccactaacagtgggtaacccattggtcgatgccttcctacatcagcaacaattgctgccatacaaccagttctctttgataaaccctgtcttgtcgaggcagcaagccatcgttggaggtgccatcttttagattacatatgagatgtactcgataatggtgccctcattccggcatgtgtttcctagaaatattcaatatattgattgagatttatcgcaatatatttctgtaaaaaaaaaaaaaaaaaaaaaaaaaaaaaaaaaaaaaaaaaaaaaaaaaaaaaaaaaaaaaaaaaaaaaaaaaagaaattaaccaaaaaaaaaaaaaaaaaaaaaaaaaccctgggcggggccccccctagggggaatttttgcaaattcccatcacccggggggccgttcaaccttccttttaagggccccatttccccctaaaggggggggtttaaaatttaatgggccggggtttaaaaacgtcggaatgggaaaaaccttggggttcccaaattaaatccctttgaaaaaaatccccttttccccagttggcttaataccaaaaaggccccccccaatcccctttccaaaaattggcccaccctaaagggaaaagggcccccccctttaggggccctttaaccccgggggtggggggggttcccccaagggggacctttacatttgcaagccccttagcgcccgttctttaggtttttttcctttcttttt

SEQ ID NO: 56078 - DNA, 1019 bp, Zea mays
  Clone ID: MRT4577_151135C.1
ctccttgccacgcgtccggaaaatgagcctttcacgagaatgatggtgtttgagttcgctccacatggtagtctctcacagcaccttcacgtcaaagagtttgagcatctggactgggctgcgaggatgagggtcatcatgggcgtcgcatactgccttcaatacatgcaccatgagctcagtccacctatggcgatccacgacgtgcggtctgacacaaccttcatttcagatgattatgctgccaagattgcagatgttggtgtatggaacgagcttgctgccaaagcgaaggctggaaaggaggacggcagcagccgtgctgaagctcctccggatctcccaagcaacgcctactgcttcggcgcgctcatgatcgagaccatatccgggagggttcctgacccgtatgatcacaaacccatatgcagctgggcttctgagcatctgaaagacaagaactacggcaagctcgtggacgcgtcgctgaaggagcacaaggaaagcgagctggaggccgtctgcgaggtgatccaagagtgcatcgaccctgacccgacgcggcggccgtcgatgagagacgtcgtgggcaagctgcgagacgctctcggcatctcgcccgaggcggcggcgccgcggctgtcgccgctctggtgggcggagctggagctgctgtcggtgaagtcaacctagtgtggagaacgctgtgtatactgatactgtaccaacatgttccaacgctcctctagctgagctctaacaggattcgtataggggcttcaattcgtgctgctgatgctaccgacatttgtactggccgtaagcggtcgtaatttatgcagagagagagagagagagagagagacgttgtgaaaaaatgcgattgatgatgtaactcatgtacatgctgatctttatcaaggaggggaaatacagtgacttgtataaatatctgtaatcccaaactcgtgtgcctgtatagaaataaaacaaatagctggcgttcccagttgcccctc

SEQ ID NO: 56079 - DNA, 996 bp, Zea mays
  Clone ID: MRT4577_151136C.1
cacacgactctcggcaacggatatctcggctctcgcatcgatgaagaacgtagcgaaatgcgatacctggtgtgaattgcagaatcccgcgaaccatcgagtctttgaacgcaagttgcgcccgaggccactcggccgagggcacgcctgcctgggcgtcacgcatccccgccgccgcctccgctcggttccttctccttcctccgagcttcagccatgggcaaggagaagactcacatcaacatcgtggtcattggccatgtcgactctggcaagtcgaccaccactggccatctgatctacaagcttggaggtattgacaagcgtgtgatcgagaggtttgagaaggaagccgctgagatgaacaagaggtctttcaagtacgcctgggtgcttgacaagctgaaggccgagcgtgagaggggtatcaccattgatattgccctgtggaagttcgagaccaccaagtactactgcaccgtcattgacgcccctggtcaccgtgacttcatcaagaacatgattactggtacctcccaggctgattgtgctgtgctcatcattgactctaccactggtggttttgaggctggtatctccaaggatggccagacccgtgagcacgccctccttgctttcactcttggagtgaagcagatgatctgctgctgcaacaagatggacgccaccactcccaagtactcaaaggcccgttacgaggaaattgtcaaggaagtctcatcgtacctgaagaaggttggctacaaccctgagaaggttccctttgttcccatctctgggtttgagggtgacaacatgattgagaggtccaccaaccttgactggtacaagggccctacccttcttgaggctcttgaccagatcaatgagcccaagaggccctcagacaagcccctgcgtcttcccctttcaggatgtttacagattggtggcattggaactgtgcctgttggacgcgttgagactggtgtcatc

SEQ ID NO: 56080 - DNA, 1691 bp, Zea mays
  Clone ID: MRT4577_151137C.1
ggccgggaacctttcctctccccctcgccgtctgccttctgcgcctccatttcggcctctgtcccttgcaagttcaatctcacctccaaccatgggtaaagagaagtcccacatcaacattgtggttattggccatgtcgactctggcaagtcgaccaccacaggacaccttatctacaagcttggaggcattgacaagcgtgtgatcgagaggttcgagaaggaggctgctgaaatgaacaagcggtccttcaagtacgcgtgggtgctcgacaagctcaaggctgagcgtgagagaggtatcaccattgatatcgctctgtggaagtttgagaccaccaagtactactgcacggtcattgatgcccctggacaccgtgacttcatcaagaacatgatcactggtacctcccaggctgactgtgctgtccttatcattgactccaccactggtggttttgaggctggtatctccaaggatggccagacccgtgaacatgctctccttgcgttcacccttggagtgaagcagatgatttgctgctgcaacaagatggatgcaaccactcccaaatactccaaggcacgttatgaagagattgtgaaggaagtctcatcctacctcaagaaagttgggtacaaccctgataagattgcctttgttcccatttctggttttgagggcgacaacatgattgagaggtccaccaaccttgactggtacaaaggcccaaccctgcttgaggctcttgaccagatcaccgagcccaagaggccttcagacaagcccctgcgtctgcccctccaggatgtgtacaagattggtggtattggaactgtaccggttggtcgtgtggagactggtgtcatcaagcctggtatggtagtcacctttggtccaactggcctgactaccgaggtgaagtctgttgagatgcaccacgaggcacttcaggaggctcttccgggtgacaatgttggcttcaacgtgaagaatgttgctgtcaaggatctcaagcgtgggtttgtggcctccaactccaaggatgaccctgccaaggaggctgccagcttcacctcccaggtcatcatcatgaaccaccctgggcagattggcaacggctatgcccctgtgctggactgccacacctcccacatcgctgtcaagtttgctgagctcattaccaagatcgacaggcgctctggcaaggagcttgagaaggagccaaagttcctgaagaacggtgatgctggtatggtgaagatgatacccaccaagcccatggtggtggagacattctcagcgtatcctccccttggtaggtttgctgtccgtgacatgaggcagacggttgctgttggagttatcaagagtgtggagaagaaggacccaaccggcgccaaggtgaccaaggctgctgccaagaagaaatgatgcgatcctgcgcctgctttagcaatacctagttttcatcattacaagttttgtttgtggtcgttgctgttattgtgtgaactgttgagctctgttagcctgtgcacttttatctatttatttggtaccttcttgctatttcaccttctgcaatacaagaatgctgtaagagctatatgttaaccttttggcattgttaatttgattttaggaagtcgtatagttatcttcaaaaaagaagaaagaatcaagaagg

SEQ ID NO: 56081 - DNA, 620 bp, Zea mays
  Clone ID: MRT4577_151138C.1
ggccgaggtacgcggggatctccccataatattttcagcattcagaaacacaccaagcgaagcgcactagcaacgacctaacaacaatggctaccaagatattagccctccttgcgtttcttgcccttttagtgagcgcaacaaatgcgttcattattccacagtgctcacttgctcctagcgccattattccacagttcctcccaccagttacttcaatgggcttcgagcatccagccgtgcaagcctataggctacaactagcgcttgcggcgagcgccttacaacaaccaattgcccaattgcaacaacaatccttggcacatctaaccctacaaaccatcgcaacgcaacaacaacaacattttctgccaccactgagccacctagcagtggtgaaccctgtcgcctacttgcaacagcagctgcttgcatccaacccacttgctctggcgaacgtagctgcataccagcaacaacaacagctgcaacagtttatgccagcgctcagtcaactagccatggtgaaccctgccgtctacctacaactgcttccatctagcccgctcgctgtgggcaatgcggctacatacctgcaacagcagctgctacaacagatc

SEQ ID NO: 56082 - DNA, 1624 bp, Zea mays
  Clone ID: MRT4577_151139C.1
atcttcctcccaactcgtcggcgtcttctgcggcgctgccgtctacgcctccaatttggcctctctcccttgcaagtttaagcttcatcttcagccatgggtaaggagaagtcccacatcaacattgtggtcattggccacgtcgactctggcaagtcgaccaccaccggccacctgatctacaagcttgcgaggcattgacaagcgtgtaatagagaggtttgagaaggaggctgctgagatgaacaagcggtccttcaagtatgcttgggtgctcgacaagctcaaggctgagcgtgagaggggtatcaccattgatattgctctgtggaagtttgagaccaccaagtattactgcaccgtcattgatgcccctggacaccgtgacttcatcaagaacatgatcactggtacctcccaggctgactgtgctgtccttatcattgactccaccactggtggttttgaggctggtatctccaaggatggccagacccgtgagcatgctctccttgcgttcactcttggagtgaaacagatgatttgctgctgcaacaagatggatgcaacgactcccaaatactccaaggcgtgttatgatgagattgtgaaggaagtctcatcctacctcaagaaagttggctacaaccctgataagattgcctttgtccccatctctggttttgagggcgacaacatgattgagaggtccaccaaccttgactggtacaaaggcccaaccctgcttgaggctcttgaccaaatcaccgagccgaagaggccttcagacaagccgctgcgtctagccttccaggatgtgtacaagattggtggtattggaactgtaccggttggtcgtgtggagactggtgtcatcaagcctggtatggtagtcaccattggtccaactggcctgactaccgaggtgaagtctgttgagatgcaccacgaggcacttcaggaggctcttccgagtgacaatgttggcttcaacgtgaagaatgttgctgtcaaggatctcaagcgtgggtttgtggcctccaactccaagcatgaccctgccaaggaggctgccagcttcacctcccaggtcatcatcatgacccaccctgggcagattggcaacggctatggccctgtgctggactgccacacctcccacatcgctgtcaagtttgctgagctcattaccaagatcgacaggcgctctggcaaggagcttgaaaaggagccaaagttcctgaagaacggtgatgctggtatggtgaagatgatacccaccaagcctatggtggtggagacattctccgcgtatcctcccctgggtaggttagccgtccgcgacatgaggcagacggttgctgttggagtcatcaagagtgtggagaagaaggacccgaccggcgccaaggttaccaaggcagctgccaaaaagaaatgatgcaacctgtcgttaatcctgtatctgctttgcaatacctgacttgtcactccatccgaaggttttgtatgcggtgtactgttattgtgtactgttaagctctgctgcggcgtgccctgttgtttgggtagcgtcaacgtcgagcgccactgcggggtgtgcctttgtctgctacagtagcgg

SEQ ID NO: 56083 - DNA, 204 bp, Zea mays
  Clone ID: MRT4577_15113C.1
tccagatcagcaaaaccgcagtgcgtaaaaaggatcgtcgaacaaaacaacatgaaaatgggcatcggtctcgtcgtgtgcctggctcttgtaactggcaacgccttttgaatgcaaatgccctggccctgcgccgggctttaaggcttgtaccgggcttgggcccggcttaacaccattattggggcccgcgggctttacccc

SEQ ID NO: 56084 - DNA, 353 bp, Zea mays
  Clone ID: MRT4577_151140C.1
gagcaaaaacaatgaagttctgcagcagtataaagataggggggggacataccaggtgaccaggaacacctacaggttaagataatgaatgttttgggctggccacaagggaagtaatatttccaggacacggatagatcaccgcacttttctttagttgggggggaggcaccatatagggggataaatggggacgagccttgaccgacacaagggtaagcagaacttttggggggggccttgccatggctgccaccattggggggaaggaaaatcgcctggggtggcccctttggtgttcctcccaattccaaagggcctttggtaaaattccctcggtttggggggttttt

SEQ ID NO: 56085 - DNA, 1106 bp, Zea mays
  unsure (1)..(1106): unsure at all n locations
  Clone ID: MRT4577_151141C.1
ccttcacctcccacctcatcgccgccgcaggctttgactccatcgcctcctccctcctcctcttcgtctccggcaggccaggtagttaacagctccagcagccatgggaaaggagaagatccacatcagcattgtggtcattggccatgttgactctggcaagtcaaccacgactggccacctcatctacaagcttggaggcattgacaagcgtgtgatcgagaggttcgagaaggaagccgctgagatgaacaagaggtctttcaagtatgcctgggtgcttgacaagctcaaggctgagcgtgagaggggtatcaccattgatattgctctctggaagttcgagaccaccaagtactcctgcactgtcattgatgctcctggtcaccgtgatttcatcaagaacatgatcactgggacctcccaggctgattgtgctgtgcttatcattgactccaccactggtggttttgaggctggtatctccaaggatggccagacccgtgagcacgctctccttgcgttcactcttggtgtgaagcagatgatctgctgctgcaacaagatggatgccaccactcctaagtactcgaaggcccgttatgaagaaattgtcaaggaagtctcttcatacctgaagaaggtcggttacaaccctgacaaggttcccttcgttcccatctctgggttcgagggtgacaacatgattgagaggtccaccaaccttgactggtacaagggccccacccttcttgaggccctggaccagatcaatgagcccaagaggccctccgacaagcccctgcgtcttccccctcaggacgtctacaagatggtggcattggaactgtgccagtggggcgtgttgagactggagtcatcaagccaggcatggttgtcacctttggtcctactggcctgaccactgaggtgaagtctgttgagatgcaccatgagtctctcctggaggcgcttcctggtgacaacgtcggcttcaacgtcaagaacgtggccgtcaggatctcaagcgtgggtatgtcgcttccactcccaggacgacctgnncagaggctgcaacttcacgnccagtctcatcatgacaccct

SEQ ID NO: 56086 - DNA, 291 bp, Zea mays
  Clone ID: MRT4577_151142C.1
gagcctgacggaactgccacgatgctgccactttggactctttcactgctgctgggagcagtagcaggaaaagaagtttgctacgaaagactcggctgcttcagtgatgactccccatggtcaggaattacggaaagacccctccatatattgccttggtctccaaaagatgtcaacacccgcttcctcctatatactaatgagaacccaaacaactttcaagaagttgccgcagattcatcaagcatcagtggctccaatttcaaaacaaatagaaaaactcgctttatt

SEQ ID NO: 56087 - DNA, 291 bp, Zea mays
  Clone ID: MRT4577_151143C.1
cggactccggcatggctctccttgcctcagtcctcgtgcgtctggtgcctcctctctctacctagctctagctggccttcctggaccgcgggaaatatggctgcccctgctttcaccacggtggtggtggtgggagcgctggtgctgctgctcctcctgtctctcgccgcggcggcgcacatgtctattgtgtcctacggggcgcgcagtgacgagggctgcggcgcctgttgtacgctgagagtatgtgcggcgggtggtgcacctcctacaacggccggcgatgaggag

SEQ ID NO: 56088 - DNA, 793 bp, Zea mays
  unsure (1)..(793): unsure at all n locations
  Clone ID: MRT4577_151144C.1
agcgaccaatgggggttagccacttgccaatcggattaaagtaacctcgttgtcgcttgttgtagagtaccgcaaccaagagttcgacatacgttagttgggttgaatgggaagcagctcgttgcaagtanggcaacaggggtttgccacagctagctgagttagagctggtacaatctgttgcaacaattcttgttgcaggtatgtaggtgcattggccacagcgagcgggctagatgaaagcagttgttgctgttgtaggtaggcggcagggttcaccatggctagttgactaagcgctggcagaaactgttgcagttgttgttgttgctggtttgcaactacgtttgctagagcaagtgggttggatgcaagcagctgctgttgcaagtaggcgacagggttcaccatggctaggtggctcagtgctggtaggaactgttgttgctgttgcgttgcgatggtttgtattgttagatgtgccaaggattgttgttgcaattgggcaattggttgttgtaagacgctcgccgcaatcgcttgttgtagcctataggcttgcacagctgggtgttcgaaggccattgaagtaactggtgggaggaactgtggaataatggaactaggagcaagtgagcattgtggaataatggacgcatttgttgcgctcgcaaaaagcgcaagaagcgcaaggagggataatatcttggtagccattgttgttaggttgttgctagtgcgcttcgcttggtgtgtttctgaatgctcaaaatattataggtgatccccgcgt

SEQ ID NO: 56089 - DNA, 787 bp, Zea mays
  Clone ID: MRT4577_151145C.1
tctccgtggatatagcgccggccgctcgccccgtcccgtcccgaggagaggcttccagagtcgacagtccagtccaggcttggttgcacttgcagggagctcggcgaaatccggagcgtctcgcgtgtgtgcacctttgggaggcgaggacagccgccatggccgccaagagggtgctcctgctctgcggggactacatggaggactacgaggccatggtcccgttccagtcgctgcaggcgtacggcgtgaccgtcgacgccgtctgccccggcaagaaggccggcgacgcctgccccaccgccgtccacaagcccatcggccaccagacatatgcagagtcgaaaggtcataactttgcacttaatgcttcattcgatgagattgacgctgctgggtatgatggattggtgattcctggaggccgtgcaccagagtaccttgcgatggatgaaaaagtgcttgccttagttaggaagttctctgacgctaagaagcccatcgcatcagtttgccatggacagttgattctggcagcagcaggagtagtcagggaccgtacatgcaccgcgtatcctgctgttaggccagttttggttgctgctggggccaagtgggtagaagctgatactatgaagaaatgcgtcgtcgatggtaatctggtgacagcagcggcttacgacggtcaccctgaattcatcagcctgtttgtgaaagcacttggaggctccgtcgcaggcgcagacaaaagaattctggtccttttgcgggactacctggaggatta

SEQ ID NO: 56090 - DNA, 342 bp, Zea mays
  unsure (1)..(342): unsure at all n locations
  Clone ID: MRT4577_151146C.1
gacacgctctttttttttttcctgcctttggttttgactttttcttttcattccagctgcgtcccagcgagctaactcggcgcgattggcctctctcttgtcgggcgtgtttcgtcgtcccttttgccgaatcggccttggtgggggggggagtttcgtttgtgctcggcctgttctcttgggactcccggcgtctccgcnggttgccatgcgattctgtctcggttgtcttgcgggacctgggcgagcgcgctttcctctttgtcgtccaagctggggctgctgctggccgtcttgcgttcatccggggggcccgggcgtttctgttggtttctttcggcg

SEQ ID NO: 56091 - DNA, 583 bp, Zea mays
  unsure (1)..(583): unsure at all n locations
  Clone ID: MRT4577_151147C.1
ccaggcgggcgaatatataatggaatanatagcgagatggggactgaaattattttgctagagtgagcaacttgcgaagaattgggacaagcagaagatatgccactacgtataaaacatgggcacgtggataaatttgttgctgactcacttatgatagatgtgacttttttatttgtgatcgtgtacttcaaaaataaattagcgatagacaaacatttaaaaacagaagtgggatataggaggctaccaaaacacacatgcgtggggactgcgtaactctttgtgttattctatgtgtaacgtgtgagcaggtaatggtggggggttttacattcttgtgctcacaagcgctgatatttatacgcacaggtgactgagtgcgggtgaatgcgaccaaataaaggaggtggcgggatatacttctattttaatatacttgtggggaggggacaggcccancggggttcctacttttaaaggggagtgtaggactacggttgaggtgaacaatttcctgtgcaacctaacatgcgagggggtgctttttttaaaaaggggcagggaatgcgctgcagccccc

SEQ ID NO: 56092 - DNA, 154 bp, Zea mays
  Clone ID: MRT4577_151148C.1
acgcctctgccgccttgcgccactgctcggtctgcacgcgcaggcgccgaagctcgccgttcagcggctcccgggcgggcttcgacacccgcagttgctcggccacaccgggccatccgcgctgcgccctccttaagttcgtgctctgacttgg

SEQ ID NO: 56093 - DNA, 581 bp, Zea mays
  Clone ID: MRT4577_151149C.1
ccggccgggtgcggacgtccctaccgcgcctgctgttgacccgcattcaccacgcctagagcccattagaacttgccaccgtgcgccattgcaaagaagggggccgccaccggagaaattccatctgtgtcgacgccctgtcttcggcgcaccgctaggaagaatcacctggacgcgtggaagttgtccgtgccctcggggtgaagccggagcgttccgaggtgcgggaatttctcgtcggaggtggaggaccaccgcgggggacgcacgactccgtgggcgacttcaccgccgccactaccgtcgaagagacagtggctgaggatccgggtgcccagcagatagaagttgctgagcaggagctcattgaaggagaagaacaggtggtcgaggaggagccgcctaacactgaggctttctacttgatctaggtggcgtctcccagtcagctttgtggcgccagggaataatatttagttcgttttattttatcatttattttgtaagacttccactatgtaataagtactctgatgatattgtgacatttatcggaaaaaaaaaaaaaaaaatttgcggcc

SEQ ID NO: 56094 - DNA, 945 bp, Zea mays
  Clone ID: MRT4577_15114C.1
cactccatagggcgattgggttcctcgaggccggccgggccctctccgtcgcccgctctctcgcgcgcgcattacttgcacgtacgagctcagaaggaaggcagaggcaaaagcagccatggcgaactcgtcgtccggccttgcggtgaacgacgagtgcaaggtgaagttccgggagctgaagtcgcggcggagcttccggttcatcgtgttcaggatcgacgacacggacatggagatcaaggtggaccgcctcggcggaccgaaccagggctacggcgacttcaccgacagcctccccgccaacgagtgccgctacgcgatctacgacctcgacttcaccaccatcgagaactgccagaagagcaagatcttcttcttctcctggtcccctgacactgcacgcaccaggagcaagatgctgtacgccagctccaaggacaggttcaggagggagctggacggcatccagtgcgagatccaggccaccgaccccagcgagatgagcctcgacatcgtcaggagccggaccaactgaccgtcatcgtccatcaacgaccaagcaacaacacatccacactatatactcaattcacattgcatgcatcgttattattacatcatttatttcagaccccccgcccactgctaaccgtagtccataagagattcatcatccgtggactatgctcgatctcttccgtacgatacaattctcaaatatttctatttatttcctaagtgaattattatatatgtactatttcattccaggttcattttacttgtgaccattcttcagttcttttttctgtaaggatcggtatatcggagcatatgtgcatggctatgccagttgttgggcgtaagaatgtatttttttctgtaatatagaaaaaaactattttaagcaacaggtaataatcaaaaaaaaaaaaaaaaaaa

SEQ ID NO: 56095 - DNA, 473 bp, Zea mays
  unsure (1)..(473): unsure at all n locations
  Clone ID: MRT4577_151150C.1
aagcagnggtaacaacgcagaggactnnnnttttttttttttttttttttttnnaaggggnggtgggtttttttttttttttttttttttttttaactagaacacgcatgtccgttacgcacttgcaaaatttttacaagagggggggggatcagagaagctagtagcctagggggacacacacacagaaaacgcaggggtggcttaattttcactggctagaaaactgggggggggacccgacaactggaaagatcactactcctcatttttttttttagggggggcaaattattaaggggggaagaggacagggaagcacacaggggtggtactaagaatacgatggagcatgcgttttggataaccacaagagaaccaggcaaacatggccgaatggaaaaaacacgccgcggggcccttaatttttattcaccactaccacccgggtggagggggccgagataaggggg

SEQ ID NO: 56096 - DNA, 219 bp, Zea mays
  Clone ID: MRT4577_151151C.1
gttttagatcgcgagcgtccgccctttctatcttgtaaatgttgatggggagctgttctatacgcacctcgacaagtatactagattcacatacgccaacggatctaggggcccgtgggaatatttaccaatcaatcaaggcccacagtgtgagagcccaaaacatggaacatgggccctacttaaatcaggttcctgcaacttgggaccctctgaatt

SEQ ID NO: 56097 - DNA, 537 bp, Zea mays
  Clone ID: MRT4577_151152C.1
cccggtgtcgaacccacgccgtccgtaggggagctctgtcagaacaagactgttcttttggtgacccaccaagttgattttctgcctgtattcgattctattctggtatgctttattacgttatccttgttagatgtatagatatgcaaaggaacctttgcatatccatacatactaacaaggcttgacgttcaaaagcttacccgaatgcaaacatatatatcctgtgatgaccctttcagcgctgtaaatgcccacacaacaaccgagtctgttctaatgtaagtgctcaaaaaaacagctgtgaattgaagtatctatcctagactactacttttaaaaaaatctattttattggcagggatatgtcatgggagctctgtcagacaagactgttcttttggtgacccaccaagttgattttctgcctgtattcgattctattctggtatgctttattacgttatccttgttagatgtatagatatgtgagggttcctttgcatatgcacactcacttgggacttggtatcaaat

SEQ ID NO: 56098 - DNA, 277 bp, Zea mays
  unsure (1)..(277): unsure at all n locations
  Clone ID: MRT4577_151153C.1
gggttgatcgattggcntncgcgatgacgctacgaagctcgaattcgctcgaggtattcacaggatgcagcctctcttgcaatatccatcatggaaaagagactacggagcagcatctatgcgggttgtgacaacgagcctctgtccaggctagagatcatggaccgtagcaacataagcagtaaatgtgacacacagtttcatggcttcactgggactgatggtccgctggggaagaggatggacaactccaaaaactcggcaaagcttggatggc

SEQ ID NO: 56099 - DNA, 277 bp, Zea mays
  Clone ID: MRT4577_151154C.1
ggaggaggttccaattttgtgcccgtttgtttaggggggaaagaacttttcctgaattcagatcacaagtagcttatctatgctgtaactcgataatttgtggcgtcttaatttctactatctgtatggaggtgattcaagcttttgttgtaaaaaaaaaaaaaaaaaaaaaaaaaaaaaaaaaaaaaaaaaaaaaaaaaaaaaaaaaaaaaaaccaaaaaaaaaaaaaaaaaaaaaaaaaggtttgtccctgcccggggggccgttcaaaggggca

SEQ ID NO: 56100 - DNA, 328 bp, Zea mays
  Clone ID: MRT4577_151155C.1
acccacggaagttaggcaaaagcgcgcgccggacgacagccccccagacgaaccacgaccacgaagcagcagccccgccacagccagccgagcccgagccacagcggcccgcgggaggcacgggcaacgcacgcgcacggcacagcagcatcccgaacgcggaccgccggaaaacagcaaccgagcgccggccacggccccggccacgcagccccagccgcgccgagaggacagccccgcccccaagacgcggccgacgaggagccggcaaaacgcccacgagcgagaagccggaagaaagcgccgtttttttttccccccccccccc

SEQ ID NO: 56101 - DNA, 831 bp, Zea mays
  Clone ID: MRT4577_151156C.1
gtgtacgcgcagaaccttaaggaaaaatcaagtctgagaagccccagatatgaagcgcctatatatgcacacaccccaagttggaggcacggcaacagcacacactggacacgaagcaagcacacagtagacacagcagcaagcaagcaagacaccaaacattccattccagtgcccgccttataccgttgcatgacgaggatgagctcgagggcggcagtggtggcggcggcggcgttcctggtgctcgcggccgcctgtccgcagctggcctcggcgcagccagcgccgggcatgcctccgccgtccccggccgcgaacaactcccggctggagaaggcgtacgtggcgctgcaggcgctgaagcgcgccatcacggacgaccccaagaagctgaccaagaactggtgcgggcccgacgtgtgcagctacttcggcgtgttctgcgcgccggcgcccgacgaccccttccagcgcacggtggcctccgtggacctcaaccacggcgacctcgccgggacgctgcccgaggagctgggcctcctgtccgacctcgccgtcttccacctcaactccaaccgcttcagcggctccctccccgactcgctccgctccctccacctcctccacgagatcgacgtcagcaacaaccagctctccgggcccttcccgccgcagctcctctgcctccccaacgtccagtacgtggacatcaggttcaacaacttctgcggcgaggtgccggcgggcatcttcgacaagaaggtcgacgcgctcttcatcaacaacaaccacttcgagttcacgctgcccgacagcttcaccaactcg

SEQ ID NO: 56102 - DNA, 1918 bp, Zea mays
  Clone ID: MRT4577_151157C.1
cattgggtacctcgaggccggccgggacacaaacaagctccacggctcaagaaagcgaaaggatcacgaattcactggcagccaggtcaggcaggcaggtaggaaaattgtagtcacggctgcccaacttgtatcatggccccccaaacatgaacaaaatcgaagtggtcaacaatgatccaagcacaataaacaaagatagaggctgtacatatataccaaatcgaacacacggcaacggcacacaccggacacgaatcgctagtagacacagcgcacagcggcaagcaagaaaccaaacattccagtgcccttaccgttgcatgcagccatgacgaggatgagcttggcggtgtcggcgacgttctttgtgctcgcggtcgcctcggcggcgcagccggcgccgagcatgcccccgccggcggtggccgtgaacagctcccggctggagaaggcgtacgtggcgctgcaggcgctgaggcgcgccatcacggacgaccccaagaagctgacggagaactggtgcgggcccgacgtgtgcaactacttcggcgtgtactgcgcgccggcgcccgacgacccctgccagcgcaccgtggcctccgtggacctcaaccacggcgacctcgccgggacgctccccgaggagctgggcctgctgtccgacctcgccgtcttccacctcaactccaaccgcttctgcggctccctccccgagtcgctccggtccctgcacctcctccacgagatcgatgtcagcaacaacaggctgtccgggcccttcccgtcgcagctcctctgcctccccagtgtccagtacgtcgacatcaggtgagcgcgcgtctgcagaccgcatcagattaattacttcaaccagcgaaacaagtagtactgcaacttacttgattacgtgatgcacgtgtgcttcaaggtttaacaacttctgcggcgaggtgccggcggccatcttcgacaagaagatcgacgcgcttttcatcaacaacaaccacttcgagttcacgctgccggccagcttcaccaactcgacggcgtcggtgatcgtgctggcgaacctgccgcgggtgagcggctgcctgccgagcagcatcggcgacatggcccgcacgctcaacgagctcatcctcctcaacagcggcatctcctcctgcatcccgccggagatcggcaagctggacaagctcaccgtgctcgacctcagcttcaacagcatcgccggcgcgctgccggacacgatcggcggcatgcgggcgctggagcagctggacgtcgcgcacaaccggctcgccggcgagatccccgagagcatctgcgagctgccgcacctcaagaacttcacctactcgtacaacttcttctgcggcgagccacgccggtgcctcgaggtgccgcgcgtcgacgaccggcagaactgcatcgctggccgccccgaccagcggccaggcgaggagtgcgtctcattcctacaccaaccgcaagtccactgcgacgcccacgggtgcatcgcgccaccacctccagcggtgcatgctcctccgccgcctgtatactgaattactgatcagtggtaacttgtaaatgtttcctgctcctgcctcgtggtgtgaaaacttggagggtaaacgcatacacatggtatatactgtaatttttattcatcagcagaagagagtaataatggattcatagatttacattacgaaaatgcttcgctattctgaaaaggaaggaaaatttgctgctgcacgaaaaaactaaaaatatcgggaaagagacgtatcaatgtatttcattagtgtttcttgtactgtttttatatgtcgtagtacttaaaagtcagagccatcttaatgttctcttattagcagtacgacctgcaaatatatacttcaattcttat

SEQ ID NO: 56103 - DNA, 2503 bp, Zea mays
  Clone ID: MRT4577_151158C.1
gctgttcgcatcgttgacttactgaacactggcagtgactatattgccgaggtagaaacgctacagacataccaaatgcagacagacagtgaaagaaatgaagtcaaggacatgtcaaatagacttgaagcatgtgaactttcgactgctctaagtaagaactcatctgatgcaatgtatccaattgttagcaaggaatctttgctgcaagaaatgttcttcagtgcaaagacaacatcagggcgcctacatttggctaaggagttattgaagcttcctacagatgttcttaaatcatttgctgggtctaaagaaggactaagtacgctaaacttttggatacttgattcacttgggaaaaatgctactcaactactgcggcactgtgtgcgtttgcttgtgcttgtttccactgatctggtagctgtacgtttatcaggaattgggaagactgtaaaggaaaaggtttgtgtgcacacaagccgagatattcgtgctatagctcggcagttggtcagtgtgtggattgaagtttttcgtagagaaaaggatagcaacggcggactcaaattgctgcgtcgaatgccatcaattgaatcgagtaagaccaagagtaaggatctgcaatcaggaaagcctaccttacgtgtgccaaatggaactttggacaacaataaagtagtgtcccagcgccagcgtacaagattcgcaagtagtcaatcaccaccaaagataaacaagaagtatgataacaaggaaatgaaattggaaactgtgacagctgctatgtctgatggcaagttgctttcccaaaagcaacaacatggtattgaatctaaggtggaggaatgtggcattcctatgtctgaggaagaagctgctgcattcgctgctgctgaggctgctcgagctgctgctatagcagctgcacaggcatatgcatctgtagaggcagagataagtgtgcctcgtgagcttccaaagataccgtcgttccaatcttttgtgatgcgtgatcaccatttggacgaatctgatgcaagaaaaagaacattgaaggataattttgggagacttgagtgcatatcagaaaatgattccaagaatggcgaagttaaggatttgcctgaaaacaccaagtacgctgatggtgatagcttgaaaatgtctcatgataattttactcagcagagccactcaaatgagacagcttgcctagcaaacgctcaggatcattcaacagatactgttgttgtagacggtcggtttacaagggcatgggtggatactgatacaatctgcattgatggtgtcaaggatcctctagccattgagaggtggcaggcacaggcgatggaggctgataaagaattctacagtcggatacgcatacctgatgaagatgattcaagtagtcagaagcacacatgccgtagttctgcttcacagggtgccgatagcaaacctgcatctgagcggcaatcaagaggtgtggagcatataaaacagggtctcgtgaactttatagcctcgctgctgatgccattatatagaggaaaaaagatcgaccgagaggggtacaaaacaatcatgcgcaaatctgttaacaagatcattgatacatgctcagaaggagagaaatcaatgactactcttgagtttcttgatgataaaaggaaaattaagattgaatcctttgtgggcaaaatggttgacaagcatttgcatgttgttagcaagtcggccaaaccttaagattcatatgtgtagtgaggtgttctctgcaaagggatctactctcttttaaaacacctatgaatcagtgattgttgatccaagtgaactaaaatctcacttcagaagccagcatgactcatcagtgttgccgcaagatcaacaagaacacatattacccagactatatgcgtggtccagaagagcattgaccagatcaataccatgtaattctgtacttatataggcatcatttccatcttcgtagctatagctcagtcaaaggtttagacctctgtgcactcgacaagcatgttgggcatgcagtaagcttggatgccaagttaagtttctgtggcttgatgaagtggcgtatgaagatccgggattcagtgtggtctcatatgcaatgagggtttttatgtctttcatggcggtagttcagtctagcctagcggattaatcctgttcattgttcagagttaactttaccaaagtagatcctcctctctctttgttgtacagttttgcagtttctaacaagcgtttaacttatagaaaggctggagtttggcagagatttgcagcccgttgtatatccttggctgcttataatgagcctcattgatgattctcgaatgcggaatgattgccccgaagttcctcagttgatttctctccatacgttataattgtatgatatgattgattttcattcgactcttccagctgattgaaaatttgccagaatcttagcaagaagtcaaaa

SEQ ID NO: 56104 - DNA, 686 bp, Zea mays
  Clone ID: MRT4577_151159C.1
aaatcctacaacgggccgtcaggcacttgaattctacactgactctctacagaagtagtcttgttctcctcggccgccatgtcgcttcacgatgaacgaaccgatcatcccttcatccaaagtctgggccgactctccaccaccatagtgcccgagatgctgcatgtgcagaacaagaacaacaacctgtgtccactgaactacatgacccagaagcctgctgccttgagatgaccgacgaccactcctccatccaccggtcgatgattgacctgctggccacgctgcactccacttccaccatgccggccgaaaacagcgagaaaacgaacaccgccatgtacctcacgataacaaaactcagctccatcgatctcctctccatcgtcaccttcctggacaccgcccacacgatctgcccgatgcggcagatgacctacgactcccatcctacagtgctgaagctacatccacgccctccagactgcctccaacaccaacatctctgacggcctccagaggaactatcatgacctcatcgaccgcttgctcaactacagacgcgacaatgccatcatgctcatgaccgacagacagcataacccaagctagccatccgccaacataaagatcgcgaacataacgtggtacaccttctggatattcttgccactataccccactga

SEQ ID NO: 56105 - DNA, 414 bp, Zea mays
  Clone ID: MRT4577_15115C.1
agtgtcaagacaaagcttttattaagagatggttcattcacgcgttgatatctgtcataagtatcatagaaaatctcatctacataaccaagtagatcaatctcaagctttagctcagactggggattatcagtctttgcttctgcagacacaaatccaatgaacttccctcttggtgcaacattgtgggtgtatgaacataaaacatacctagaaagagaataccgacagaaatatcataactctgtcaagaatagtgatatgttcgataaaagtgtttaagtaaatagcatgagagaaggcctcatatgtctgatttgcgtccaagttgcttatgaggcacaatcattcgaatcgagtcggactcatttgtattaaggattgggtagctcatgatagcaattgacaaacaac

SEQ ID NO: 56106 - DNA, 945 bp, Zea mays
  Clone ID: MRT4577_151160C.1
aatggatttaagtaattgttgtcgctgttgtaggtacgcagcagagttcgacacagccaattggttgaatggaagcaactgttgtaagtaggtagcagggtttgccatagctagctgatgagttagagctggtacaatctgttgcagcaactgttgttgtaggtacgtaggtgcattgcccacagcgagcgggctagatgaaagcagttgtaggtagacggcagggttcaccatggctagttgactgagcgctggcataaactgttgcagctgttgttgttgctggtatgcagctacgttcgccagagcaagtgggttggatgcaagcagctgctgttgcaagtaggcgacagggttcaccactgctaggtggctcagtgatggcagaaaatgttgttgttgttgcgttgcgatggtttgtagggttagatgtgccaaggattgttgttgcaattgggcaattggttgttgtaaggcgctcgccgcaagcgctagttgtagcctataggcttgcacggctggatgttcgaagcccattgaagtaactggtgggaggaactgtggaataatggcactaggagcaagtgagcactgtggaataatgaacgcatttgttgcgctcactaaaagggcaagaagcgcaaggagggctaatatcttggtagccattgttgttaggtcgttgctagtgcgcttcgcttggtgtgtttctgaatgctgaaaatattatgggagtctatcagatcttcctattcaatattaaagaactgtcatggtacaccacaatcgaacagattgggtgctttccctttcaaagtttcacatcatttaggtaactaccccagcaaaaaaaacgttcacagatttttgcaaatgaaaaactatatgtggcctttccaagatcggattagcataacaccgccaccaatcaggatataacctcac

SEQ ID NO: 56107 - DNA, 824 bp, Zea mays
  Clone ID: MRT4577_151161C.1
ccgggccgggatctcccatatattttcagcattcaaaaacacaccaagcgaagcgcactagcaacgacctaacaccaatggctaccaagatattagccctccttgcgcttcttgcccttttagtgagcgcaacaaatgcgttcattattccacagtgctcacttgctcctagtgccattattccacagttcctcccaccagttacttcaatgggcttcgaacatccagccgtgcaagcctacaggctacaactagcgcttgcggcgagcgccttacaacaaccaattgcccaattgcaacaacaatccttggcacatctaaccctacaaaccattgcaacgcaacaacaacaacaacagtttctgccatcactgagccacctagccgtggtgaaccctgtcacctacttgcaacagcagctgcttgcatccaacccacttgctctggcgaacgtagctgcataccagcaacaacaacagctgcaacagtttatgccagtgctcagtcaactagccatggtgaaccctgccgtctacctacaactactttcatctagcccgctcgcggtgggcaatgcacctacgtacctacaacaacagttgctgcaacaaattgtaccagctctgactcagctagttgtggcaaaacctggtgcctacttacaacaggtgcttccattcaaccaactgggtgggtcacactctgtgggtacctacaccgcgacaccgtactttattccttggcaggggtaacccttggtcgctacttcctgcgacgcaaaaacattgctggctaacacaagtttcttttgtgaaccctgcctt

SEQ ID NO: 56108 - DNA, 251 bp, Zea mays
  Clone ID: MRT4577_151162C.1
gagaatacatacattaattattgcatgaatccagtaaaaagttaaaacgaattttaatttgagacggagggagtattacttaatttattttggcattctcatcaacttcatgccatagtaaatgatacttggcttcatgaccttcaccaagttgggtcttttttgaacttttgaaggagcataaacttggcttgtcttttcttacattttcagttgctcagtgcacgtgatatggctgaacggaaagtaat

SEQ ID NO: 56109 - DNA, 357 bp, Zea mays
  Clone ID: MRT4577_151163C.1
tttttgtttttttgttttgtttgtgacattttttacttatgttgctttcttctgtgaagttgttgtgttgtgttacatttctggggaaaaaaggaacgtcggaagaaaattccacccccggggggtccaccggcgcggagaggaagaaccgacaaagggcggaccagtttatgggggggaaatgaaggggggaccgccctggggaaaaaaaaaggggcgggcccaatcgaattttggggtccccgggttttttcccccagggggcaaaaggtgggccccccccgggggccgtttttgggcccccggtttcccctgggggggggggggggggggggccccggcctgccccccccgttg

SEQ ID NO: 56110 - DNA, 1459 bp, Zea mays
  Clone ID: MRT4577_151164C.1
gttttcttaagagggtagtgtgtaggagcaatctctcctttttaggatatgtgtggacatgtatttacttttttggggtgtgtgctccaggggactagccagccaacggttgctggctagccgtcgttgaaaggtgtagaagcaacgacaatctagagaccgtaataatttctgtgttttgcaaaaaaaaaaaaaaactcctctcagtccccccatccccgccgccgcctcctctcggttccttctccttcctcggagcttcagccatgggtaaagagaagactcacatcaacatcgtggtcattggccatgtcgactctggcaagtcgaccaccactggccatctgatctacaagcttggaggtattgacaagcgtgtgatcgagaggttcgagaaggaagccgccgagatgaacaagaggtctttcaagtacgcctgggtgcttgacaagctgaaggccgagcgtgagaggggtatcaccattgatattgccctgtggaagttcgagaccaccaagtactactgcaccgtcattgatgctcctggtcaccgtgacttcatcaagaacatgattactggtacctcccaggctgactgtgctgtgctcatcattgactccaccactggtggttttgaggctggtatctccaaggatggccagacccgtgagcatgccctccttgctttcactcttggagtgaagcagatgatctgctgctgtaacaagatggacgccaccactcccaagtactcaaaggcccgttacgaggaaattgtcaaggaagtctcttcgtacctgaagaaggtcggctacaaccctgacaaggttccctttgttcccatctctgggtttgagggtgacaacatgattgagaggtccaccaaccttgactggtacaagggccctacccttcttgaggctcttgaccagatcaacgagcccaagaggccctcagacaagcccctgcgtcttccccttcaggacgtttacaagattggtggcattggaactgtgcctgttggccgtgttgagactggtgtcatcaagcctggtatggttgttacctttggtcccactggtctgacaactgaggtcaagtctgttgagatgcaccacgagtctctcctggaggcgcttcctggtgacaacgtcggcttcaacgtcaagaacgttgctgtgaaggatctgaagcgtggctttgttgcatccaactccaaggatgaccctgccaaggaagcggccaacttcacctcccaggtcatcatcatgaaccaccctggtcagatcggcaacggctacgccccagtgttggactgccacacctcccacattgctgtcaagttcgccgagctggtgaccaagatcgacaggcgatctggtaaggagctggaggcgctgcccaagttcctgaagaacggtgacgctggtatcgtgaagatgattcccaccaagcccat

SEQ ID NO: 56111 - DNA, 2236 bp, Zea mays
  Clone ID: MRT4577_151165C.1
caactcgccgacgacatctgcgattctgccgtctacgcctccaatttggcctctctcccttgcaagtttaagcttcaccttcaaccatgggtaaggagaagtcccacatcaacattgtggtcattggccacgtcgactctggcaagtcgaccaccaccggccacctgatctacaagcttggaggcattgacaagcgtgtaatagagaggtttgagaaggaggctgctgagatgaacaagcggtccttcaagtatgcttgggtgctcgacaagctcaaggctgagcgtgagaggggtatcaccattgatattgctctgtggaagtttgagaccaccaagtattactgcaccgtcattgatgcccctggacaccgtgacttcatcaagaacatgatcactggtacctcccaggctgactgtgctgtccttatcattgactccaccactggtggttttgaggctggtatctccaaggatggccagacccgtgagcatgctctccttgcgttcactcttggagtgaagcagatgatttgctgctgcaacaagatggatgcaacgactcccaaatactccaaggcgcgttatgatgagattgtgaaggaagtctcatcctacctcaagaaagttgggtacaaccctgataagattgcctttgtccccatctctggttttgagggcgacaacatgattgagaggtccaccaaccttgactggtacaaaggcccgaccctgcttgaggctcttgaccagatcaccgagcccaagagaccttcggacaagcccctgcgtctccccctgcaggatgtgtacaagattggtggtattggaactgtaccggttggtcgtgtggagactggtgtcatcaagcctggtatggttgtcaccttcggtccaactggcctgactactgaggtgaagtctgttgagatgcaccacgaggctcttcaggaggcccttcctggtgacaatgttggcttcaacgtgaagaacgttgctgtgaaggatctcaagcgtggttttgtggcctcaaactccaaggatgaccctgccaaggaggctgccagcttcacgtcccaggtcatcatcatgaaccaccctgggcagataggcaatggctatgccccagtgctggactgccacacctcccacattgctgtcaagtttgctgaactcattaccaagatcgacaggcggtctggcaaggagcttgagaaggagcccaagttcctgaagaacggtgatgctggtatggtgaagatgattcccaccaagcccatggtggtggagacattctcgcagtatcctccccttggtaggtttgctgtccgcgacatgaggcagacagttgctgttggagtcatcaagagtgtggagaagaaggacccgaccggcgccaaggttaccaaggcagctgccaaaaagaaatgatgcaacctgtcgttaatcctgtatctgcttttgcaatacctgacttgtcactccatcccgaagttttgtatgcggttgttactgttattgtgtactgttaagctctgctgcggcgtgccctgttgtttgggtagcgtcaacgtcgagcgccacttgcgggtgtgcctttgtctgctatcagtagcggcaaaaattgaaagctctcgagacttatgtccaaaaaaaaaaaaaaaaaaaaaaaaaaaaaaatccaacaagcaaacctgcaggcatctcctccatcaccaccaaactcaacaacagccagctcgcgaaaataatgaaaagccgcagcatggcatcatcggccgcgctcttggggctagccctcgcgctaggggcggccaccgccccacaggtagcggaggcaaagaacaagaaagccgcggaaagcggcaaggcggatgaggcgaataacatccaggacgacttctgctcgacgctgtgcgagggcaagaaggggacggacctggtcgtgtgcaaggagtcctgcgagctctcccagcagtccaacctggtgctgtacggcaggatccagtgcaagggcaagtgcaccgagcaaaagggcatcacggcgccggccatgaaggtctgccaggaggagtgcgacaaggcgtacgtggcgaaggcgcccgaggtcaccaaggcctgcagcgtcacctgcgccaaggagaaaaaccccgcgctcaccgagaactgcaagaggtcctgcacccctcctccttcttgaagcgaaccccttgaaatgatgaaccatgcatgcatgc

SEQ ID NO: 56112 - DNA, 531 bp, Zea mays
  Clone ID: MRT4577_151166C.1
ccggccgggccagcccaaggcccccaagcctcaccatgagaagcccaagaagcccgagactcccaagggcccctcttacgagtagcccaaggctcctaagcctcaccacgagaagcccaagaagcctgagactcccaagaagcctgagtacaaccagcccaaggcccccaagccccaccacgagacccccaaggctcctaagcctcaccacgagactcccaagaagccttcttacgagcagcccaagcccaagcaggagcagcccaagaagccttcctacgaggcccccaagcagcccgcttacgaggctccccactactagattttctagaatctattgagtagttgatctcggtggtgtcttcgcctcttgtctctacgagactctgaggtatggactggtgtggatggaatgccgcatgtttggatgtttgactttttcttcttgtaattagttgccttattcttataatcacttcagtcaaatgaacaagaaggaatttcaaaaaaaaaaaaaaaaaacccgcggcc

SEQ ID NO: 56113 - DNA, 1784 bp, Zea mays
  Clone ID: MRT4577_151167C.1
ctcgaggccggccgggccggaattgatgatgaaacgattaccccaagcgcttaaatccactgatgccagtgatggaaagctatgttctcatagttttcgtggttttcatctgaaacacatacttccccgagtcgccgtcgtctgctccgggctgctgttctgcgcctccacaaggctttggcctctgttgtaagatttaagcttaacctccaaccatgggtaaggagaagtcccacatcaacattgtggttattggccatgtcgactctggcaagtcaaccaccaccggccacctgatctacaagcttggaggcattgacaagcgtgtgattgagaggttcgagaaggaagccgctgaaatgaacaaacggtccttcaagtacgcttgggtgcttgacaagctcaaggctgagcgtgagagaggtatcaccattgatatcgctctgtggaagtttgagaccacaaagtactactgcactgtcattgatgcccctggacatcgcgatttcatcaagaacatgatcacgggtacctcccaggctgactgtgctgttcttatcattgactccaccactggtggttttgaggccggtatctctaaggatggccagacccgtgagcatgctctccttgctttcacccttggggtcaagcagatgatttgctgctgcaacaagatggatgcgactactcccaagtattccaaggcccgttatgatgagattgtgaaggaagtttcatcctacctcaagaaggttggatacaaccctgacaagattgcctttgtccctatctctggttttgagggtgacaacatgattgagaggtccaccaaccttgactggtacaagggtccaaccctgcttgaggctcttgaccagatcacggagcccaagaggccttcagacaagcccctgcgtctgcccctccaggatgtgtacaagattggtggtattggaactgttccggttggtcgtgtggagactggtgtcatcaagcctggaatggttgtcaccttcggtccaactggcctgaccactgaggtgaagtctgttgagatgcaccacgaggctctccaggaggcccttcctggtgacaatgttggcttcaatgtgaagaacgttgctgtgaaggatctcaaacgtgggtacgtggcctccaactctaaggatgaccctgccaaggaggctgctagcttcacctcccaagtcatcatcatgaaccaccctgggcagattggcaatggctatgccccagtgctggactgccacacctcccacattgctgtcaagtttgctgagctcataaccaagatcgataggcggtctggcaaggagcttgagaaggagcccaagttcctgaagaatggtgatgccggtatggtgaagatgattcccactaagcccatggtggttgagaccttctctcagtatcctcctctgggtcgttttgctgtccgtgacatgaggcagacggttgctgttggagtcatcaagagcgtggagaagaaggacccaactggtgccaaggtgaccaaggctgcaataaagaagaaatgatgcgtcctcccatgtgccctcgtttattttgtacttgtgcccgtatacttcgatctgttaaaatctattggttgtgtgccctgtgtctgttgtttgggtatctatactgttattttgagacatggttgatttgcatggtcatctggattgggttcgcatttctgagtcatttgtcttgacatgaaaatcttgcttttttcgaaaaaaaaaaaaaaaaaagcggcc

SEQ ID NO: 56114 - DNA, 1216 bp, Zea mays
  Clone ID: MRT4577_151168C.1
ccagttcgagggccagatcccggacacgctgtgggcgtcgcccgccacggtcatcacgctggccaacaaccacttcaccggcgccgtcccggcggcctacgagttcggcgccggcgccggcgccggggccggtggccgggtccgcgaggtgctgttcctgaacaacaacctgaccggctgcgtgcccgaggcgctgggcttcctccccagcatgcaggtgctggacctcagctacaacgcgctgtcgggacacctcccggggacgctctcgtgcctgtcggggatcgaggtgctcaacctcgcgcacaacgccggccgagatctcacagccaaaaagagaggatctttaaccgccgtctaaggtcacaggtactgcaggtagccatgaccaggcggtggccacctttctctgcccgtgtcgccgccgccgtgttcctgctgctgctatcccccgccgcgacctcccagctcggcctgggtcccgccattgccgcctggattaacggctcgccgccgcctagccctgacgccgccgcggccgccggcgcgtcgacggtagtcgcgggcatcgacctcaaccgcgccaacctcaggggcacgctcggcgacgcggttgccctcctggcgcacctcaccttcctccacctcaacagcaactcacgggcgagctcccggacctgctgtgcgacctgcgccggatcaccaacctgtccgtgtccttgcaattcttctccgggatcagccagcgctgcgaccggcagctggggagccgcggcgtgttcgacttcgtgggcaactgcgtgcccgggcgggacatgcagcggccgcagcccgagtgcgacgagttcccgggggaaggcggcctcagctgcctccgcatccccggggcgcggccagccgggtgtggcgacgcgggcgtgactattggcgtgggcgtcggagtgggcatcggggggctgccgttcgggttgccaggcgctgccgctggaggcgtggtcaccgtcaccgtgccgtgatctgccgggggccactgcacctttgtttggttttcttttttttttctttctcttcttccttttgggcggcaattaccttccattcggctcggcgtaacgtacgcatcgatggtaatgggtgaacattggttggttctcggctggttaaaaaaaaaaaaaaaaaaaactcgagagtcctttggaaaaaaaaaaaaaaaaaa

SEQ ID NO: 56115 - DNA, 411 bp, Zea mays
  unsure (1)..(411): unsure at all n locations
  Clone ID: MRT4577_151169C.1
ataatccccattacactactatatancttgcatcagcattcnagtaccagatgntgacnatgtagnatttagtagattggntgnanntttgagtaaatgactattaattngtgtcnacgttggtgtcactctgcttacagttgtatccnttgnacacaatgtcttttgtgttaggatttgattcatagattaccctatcaacctatctgccntcgatagcancntcaatggcnccntcagctccnacaatattgntataatatgccgccacggccacagtagctatatactctctgctattggccttaccntattattacctattatatggcnacctgccgacggaagcttcnatggaaacttacggccctattacgttataaatgccagccgctctgnncgtggcagccg

SEQ ID NO: 56116 - DNA, 922 bp, Zea mays
  Clone ID: MRT4577_15116C.1
cactcctacgggcgattgccccgcggccggccgcgatctctctctatcgcattgcttgcgcgagcgcagaaggcacacacgtacagccatggcgaactcgtcgtccggcctggcggtgagcgacgagtgcaaggtgaagttccgggatctgaaggcgcggcggagcttccggttcatcgtgttcaggatcgacgacaaggacatggagatcaaggtggaccgcctcggcgagccgaaccagggctacggcgacttcaccgacagcctccccgccgacgagtgccgctacgccatctacgacctcgacttcaccaccgtcgagaactgccagaagagcaagatcttcttcttctcctggtcccctgatactgcacgcacccggagcaagatgctgtacgccagctccaaggacaggttcaggagggagctggacggcatccagtgcgagatccaggccaccgaccccagcgagatgagcctcgacatcgtcaagagccggaccaactgatcgtcatcgtcctactatcaagcaacacgatcgaccaccacctcgattatatatgcatcattatagtatcgtttattaatttcagacccacccactgctaaccacatcgtccacgagagattatattcatccgtggactacgctctcgatcttacaatttgaaacctttctattttcctaattactatgtattccaggttcattttgattgtgaccattcttcagttctttctgtaaggatcggagcatattatatactctatgtggctatgccaattatattgttgggtataagaatgcattttgtttctgtaatacggaaaaatatattttctttaagcaacaacaaggtaaaaactaacctcgttgcatattttatttatgtcaagaaaacaaaaaaaacaaaaaagaaaa

SEQ ID NO: 56117 - DNA, 621 bp, Zea mays
  Clone ID: MRT4577_151170C.1
tgggtaccccctcgaggtcccggccaaaaaaagaaaaaaaaaaaaaaaaaaaaaaaacaccattccaaaccctagccgccgccagcctatcgctccctcccggtgctcgcccaacagcgcgccggcacagcgccctcgcccccacagtcgtgtccaccggcttgtgggcgttcacctcctaggctatggcggtctcggacgtcggcgctatgtcaaccgcgcggggcggcggctcctcgatgcctgtccctggtttcctcccacagggcgttggccattttcccatggactccagctttattgagtgcaccgcacggcgtcctgcttcagcagtggcggagtgatggctgttagctctgtcttcggtgtcaaggctggtcagaccatgagttccttggaggcgctgttggatcactagaggaaggacgtcgtcaacaagaagggcgagccagaactctgccaggacgaggtgtaaagctcgggaggctgctgctgctggggactgctcctccaagggaatcttggactccaagatgatgagaaggcccaggtcagcactattcttgcatcccgtttcagaaacttgtcgatggtgtccttgacgccgccattatatccatg

SEQ ID NO: 56118 - DNA, 978 bp, Zea mays
  Clone ID: MRT4577_151171C.1
gccgggaacacccatatattttgagcattcagaaacacacctagcgaagcgcactagcaacgacctaacaacaatggctaccaagatattatccctctttgcgcttcttgccctttttgtgagcgcaacaaatgcgttcattattccacaatgctcacttgctcctagtgccattattccacagttcctccctccagttacttcaatgggcttcgaacacccagctgtgcaaggcctacaggctacaacaagcgcttgcggcgagcgtcttacaacaaccaattgcccaattacaacaacaatccttggcacatctaaccatacaaaccatgcgcaacgcaacagcaacaacaatttctaccagcactgagccaactagctgtggtgaaccctgtcgcctacttgcaacagcagttgcttgcatccaacccacttgctctggcaaacatagttgcataccaacaacaacaacaattgcaacagtttctaccagcgctcagtcaactagccatggtgaaccctgccgcctacctacaacagcaacaactgatttcatctagccctctcgctgtggttaatgcacctacatacctgcaacaacagttgctgcaacagattgtaccagctctgactcagctagctgtggcaaaccctgctgcctacttgcaacagctgcttccattcaaccaactgactgtgtcgaactctgctgcgtacctacaacagcgacaacagttacttaatccactagcggtggctaacccattggtcgctgccttcctacagcagcaacaattgctgccatacaaccagttctctttgatgaaccctgccttgttgtggcagcaacccatcgttggaggtgccatcttttagattacatatgagatgtactcgataatggtgccctcatagcggcatgtgtttcctagaaataatcaatatattgattgagatttatctcgatatatttctgag

SEQ ID NO: 56119 - DNA, 927 bp, Zea mays
  unsure (1)..(927): unsure at all n locations
  Clone ID: MRT4577_151172C.1
cattgggacctcgagccggccgggagacaccagacgcggtcggctgccgcagactggtagtagccggcgcgccgtcaccgtatcctcagatcagaggcgagcagaaaccacaccactctactgacgcccgacgagtgtaacattttccttcagccatgggtaaggagaagactcacatcaacattgtggtcattggccatgtcgactctggcaagtcgaccaccactggccacctgatctacaagcttggaggtattgacaagcgagtgattgagaggttcgagaaagaggctgccgagatgaacaagcggtcattcaagtatgcgtgggtgcttgacaagctcaaggctgagcgtgagagaggtattacaattgatattgccctgtggaagttcgagaccaccaagtactactgcactgttattgatgccccgggacaccgtgacttcatcaagaatatgatcactggcacttcccaagctgactgtgctgttcttatcattgactcaaccactggtggttttgaggctggtatctccaaggatggccagacccgtgagcatgctctccttgctttcacacttggtgtgaagcagatgatttgctgctgcaacaagatggatgctactacacccaagtattcaaaggcccgttatgatgagattgtgaaggaagtctcttcctacctgaagaaggttggatacaaccctgataagatccacttcgttccaatctctggttttgaaggtgacaacatgattgagaggtccaccaaccttgactggtacaagggcccaaccctacttgaggctctggacttgatcaatgaagccaaagtaggcctttatttttttttttttttttttttccttcaggacgcgcacaagacnggnggananaggaacagccccagccggacgcgccgag

SEQ ID NO: 56120 - DNA, 552 bp, Zea mays
  Clone ID: MRT4577_151173C.1
tccgggaagaccagatgaagaagctgtgcctggagccgacgtccttcaccgtcaaggcggagggcatcgccaagaacgccccgcccgagttccagaagaccaagctcgtgcccagctaccgtggctcctccttcctcgaccccaagggccgcggcggctccaccggctacgacaacgccgtcgcgctccccgccgggggcagaggtgacgaggaggagctccagaaggagaacatcaagaacgccgcctcctccaccggcaacatcacgttgagcgtcaccaagagcaacccggagaccggcgaggtcatcggcgtcttcgagagcgtgcagccgtccgacaccgacctcggggccaaggcgcccaaggatgtcaagatccagggggtctggtacgctcagctcgagtgattcgagtgtctaactgctaggtgtccgaccgccgtcatggatcttgggaaggtgtatgtataccatggaaaactttggagagcagaggaggaatcgtgtatgtaatgtacttgttaatgcaaattcgggctgtcgctttttt

SEQ ID NO: 56121 - DNA, 1777 bp, Zea mays
  Clone ID: MRT4577_151174C.1
ccggccgggggatgcgatactaccagcactaaagcaccggatcccatcagaactccgaagttaagcgtgcttgggcgagagtagtactaggatgggtgacctcctgggaagtcctcgtgttgcattccacaagctcagccaaagcaggtcatattcttccccgagtcgccgccgtctgctccgggctgctgttctgcgcctccacaaggctttggcctctctgttgtaagttttaagcttcacctccagccatgggtaaagagaagtcccacatcaacattgtggttattggccatgtcgactctggcaagtcaaccaccactggccacctgatctacaagcttggaggcattgacaagcgtgtgattgagaggttcgagaaggaagccgctgaaatgaacaaacggtccttcaagtacgcctgggtgcttgacaagctcaaggctgagcgtgagagaggtatcaccattgatattgctctgtggaagtttgagaccaccaagtactactgcactgtcattgatgcccctggacatcgcgacttcatcaagaacatgatcacgggtacctcccaggctgactgtgctgtcctgatcattgactccaccactggtggttttgaggccggtatctctaaggatggccagacccgtgagcatgctctccttgctttcacccttggggtcaagcagatgatttgctgctgcaacaagatggatgcgaccactcccaagtattccaaggcccgttacgatgagattgtgaaggaagtttcatcctacctcaagaagggttggatacaaccctgacaagattgcctttgtccctatctctggttttgagggtgacaacatgattgagaggtccaccaaccttgactggtacaagggtccaaccctgcttgaggctcttgaccagatcaccgagcccaagaggccttcagacaagcccctgcgtctgcccctccaggacgtgtacaagattggtggtattggaactgttccagttggtcgtgtggagactggtgtcatcaagcctggaatggttgtcaccttcggtccaactggcctgaccactgaggtgaagtctgttgagatgcaccacgaggctctccaggaggcccttcctggtgacaatgttggcttcaatgtgaagaacgttgctgtgaaggatctcaaacgtgggtacgtggcctccaactctaaggatgaccctgccaaggaggctgctagcttcacctcccaagtcatcatcatgaaccaccctgggcagattggcaatggctatgccccagtgctggactgccacacctcccacattgctgtcaagtttgctgagctcataaccaagatcgataggcggtctggcaaggagcttgagaaggagcccaagttcctgaagaatggtgatgccggtatggtgaagatgattcccactaagcctatggtggttgagaccttctctcagtatcctcctctgggtcgttttgctgtccgtgacatgaggcagacggttgctgttggagtcatcaagagcgtggagaagaaggacccaactggtgccaaggtgaccaaggctgcaataaagaagaaatgatgcgtcctcccatgtgccctcgtttattttgtacttgtgcccgtatacttcgatctgttaaaatctattggttgtgtgccctgtgtctgttgtttgggtatctatactgttattttgagacatggttgatttgcatggtcatctggattgggttcacaaaaaaaaaaaaaaaaaagcggcc

SEQ ID NO: 56122 - DNA, 1133 bp, Zea mays
  Clone ID: MRT4577_151175C.1
ggtggaaaaaaaggcaacagcaacaccgccgcgacgacgacgacgatggcagcctcgctccaagccgcggccaccttgatgcagccggccaagatcggcggccgggcgcactccgcctcgctgccgtcccggccgtcgtcgcacctcgccagggcgttcggcgtcgacgccggcgccgccaggatcacttgctccctccagtctgacatcagggacgtcgccagcaagtgcgtcgacgccgccaagctcgccggcttcgctctcgccacctctgcgctcctcgtctcgggcgcgagcgcggagggcacgcccaggaggctgacctacgaccagatccagagcaaaacgtacatggaggtgaagggcacgggcacggcgaaccagtgcccgaccatcgacggcggcgtggagtcgttcccgttcaaggccggcaagtaccagatgaagaagctgtgcctggagccgacgtccttcaccgtcaaggcggagggcatcgccaagaacgccccgcccgagttccagaagaccaagctcatgaccttcctcgtgcccagctaccgtggctcctccttcctcgaccccaagggccgcggcggctccaccggctacgacaacgccgtcgcgctccccgccgggggcagaggtgacgaggaggagctccagaaggagaacatcaagaacgccgcctcctccaccggcaacatcacgttgagcgtcaccaagagcaacccggagaccggcgaggtcatcggcgtcttcgagagcgtgcagccgtccgacaccgacctcggggccaaggcgcccaaggatgtcaagatccagggggtctggtacgctcagctcgagtgattcgagtgtctaactgctaggtgtccgaccgtcctcatggatcttgggaaggtgtatgtataccatggaaaactttggagagcagaggaggaatcgtgtatgtaatgtacttgttaatgcaaattcgggctgtcgcttttttatttttttattttcagtttgggtttcttctctttcttgtgttctcaagaactacatcccctgtgcaaaacacaaagagaggttgtttgataccagagatgaattgttagttataaaaaaatgtcataaaaagaaaaaccaag

SEQ ID NO: 56123 - DNA, 1947 bp, Zea mays
  Clone ID: MRT4577_151176C.1
ctcgccgtctgccttctgcgcctccatttcggcctctgtcccttgcaagttcaatctcacctccaaccatgggtaaagagaagtcccacatcaacattgtggttattggccatgtcgactctggcaagtcgaccaccacaggacaccttatctacaagcttggaggcattgacaagcgtgtgatcgagaggtttgagaaggaggctgctgaaatgaataagcggtccttcaagtacgcgtgggtgctcgacaagctcaaggctgagcgtgagagaggtatcaccattgatattgctctgtggaagtttgagaccaccaagtactactgcacggtcattgatgcccctggacaccgtgacttcatcaagaacatgatcactggtacctcccaggctgactgtgctgtccttatcattgactccaccactggtggttttgaggctggtatctccaaggatggccagacccgtgaacatgctctccttgcgttcacccttggagtgaagcagatgatttgctgctgcaacaagatggatgcaaccactcccaaatactccaaggcacgttatgaagagattgtgaaggaagtctcatcctacctcaagaaagttgggtacaaccctgataagattgcctttgttcccatttctggttttgagggtgacaacatgattgagaggtccaccaaccttgactggtacaaaggcccaaccctgcttgaggctcttgaccagatcaccgagcccaagaggccttcagacaagcccctgcgtctgcccctccaggatgtgtacaagattggtggtattggaactgtaccggttggtcgtgtggagactggtgtcatcaagcctggtatggttgtcacctttggtccaactggcctgactaccgaggtgaagtctgttgagatgcaccacgaggcgcttcaggaggctcttccgggtgacaatgttggcttcaacgtgaagaacgttgctgtcaaggatctcaagcgtgggtttgtggcctccaactccaaggatgaccctgccaaggaggctgccagcttcacctcccaggtcatcatcatgaaccaccctgggcagattggcaacggctatgccccagtgctggactgccacacctcccacattgctgtcaagtttgctgagctcattaccaagatcgacaggcggtctggcaaggagcttgagaaggagccaaagttcctgaagaacggtgatgctggtatggtgaagatgataccgaccaagcccatggtggtggagacgttctcagcgtatcctccccttggtaggtttgctgtccgtgacatgaggcagacggttgctgttggagttatcaagagtgtggagaagaaggacccgaccggcgccaaggtgaccaaggcggctgccaagaagaaatgatgcgatcctgcgcctgctttagcaatacctagttttcatcatcacaagttttgtttgtgatcgttgctgttatcgtgtgaactgttgagatctgttagcatgtgcacttttatctatttatttggtaccatcttgctatttcaccttttgcaatacaagaatgctctaagacctatatgttaaccttttggcattgttaaattgattttaggaagtcgtataaaaaaaaaaaaaaaaaaaaaaaaaaaaaaaaaaaaaaaaaaaaaaggtagaaaaaaaaataaaaaaaggaattggggcgtgtatttatctctgacacctccaaacagacacataaatctgtacataaagagagcactacatcaagcctttccaaaaagtgatacatatttgacctttgaataaaattagaattccctaaatcatacaaaaaacatgccccaattacaaatactgtacacactgtggcctgaaaaatgagagatcaaactcatttagatctctgcgcactcacaacccattatactcgctaaac

SEQ ID NO: 56124 - DNA, 969 bp, Zea mays
  Clone ID: MRT4577_151177C.1
taggggccttttttttttttttttttcgttataatctgagacggaggaagtaacaattaatctctggtgtcaaacagccactcttcgtgtttgcacacgggagtccactggagtacacaagaaagaaagaagaaacccaaactgaaattaaaaaccaacagcccgaatttgcattaatagttacatacacgattcctcctcctctctcaaaagttctccatgacggtccgacgcctctaacagttaaaacgaatcactcgagctgcgcgtaccagactccctggatcttgacatccttgggcgccttagccccgaggtcggtgtccgacggctgcacgctctcgaatacgccaatgacctcgccggtgtccgggttgctcttggtgacgctcagcgtgatgttgcccgtggacgaggcggcgttcttgatgttctccttctggagctcctcctcgtcgcctctgcctccggcggggagcgcgacggcgttgtcgtatccggtggagccgccgcggcccttggggtcgaggaaggaggagccgcggtagctgggcacgaggaagggcacgcgctcgccgcccgggagctgcacggtgacggcggcgtagtcgatgccgtccttctcctcgaacttgagggtgccgtcggaggcgacctcgagcgggccctcgatctcgtccagcgtgtaggtgaggcgggtcatgagcttggtcttctggaactcgggcggcgcgttcttggcgatgccctccgccttggcggtaaaggacgtcggctccaggcacagcttcttcatctggtacttgccgggcttgtacgggaacgagtccactcctccgtcgatggtcgggcaatggttcgctgtggccgtgcccttcacctccaggaacctctccctctggttctcgtcgtaggtcagacaatgtaggcgtgccctcagaactcgcactacgcgtccgtcccgcgtcc

SEQ ID NO: 56125 - DNA, 316 bp, Zea mays
  Clone ID: MRT4577_151178C.1
ggaccccccggcgaataacgggggacgagcgcctctcggcggcggccgccccccacacagggggcttcaaaaagaaacggcggggccgcccacacacaaaagccgcgcacacccaacacccgcaacaacgacaaacccaccagagacaaaaccaaccacacacacaagccacgcgcaaacaacaacgcacgacaccaggccccaaaaaacaaacagaggcacccaacctccacgggatgccaagccggcaacgaggaacccgggcccgcaggaagaacaaaccacccagaaggcgcgccgcaaccaaccgaatgcc

SEQ ID NO: 56126 - DNA, 665 bp, Zea mays
  unsure (1)..(665): unsure at all n locations
  Clone ID: MRT4577_151179C.1
tttttttttttttttgattggctacagaggaattttgttgatttcttagtacacagctcacaaaagagactcggtggagcttatgagaaacctcccgggacctttgttcctcttctctatacacaggtcctttatttctctcctcccgtctcccgcggcattaacttcaatacttaaaccccttactgaccctcaagctcagcaagaatcttctcacccttggccttggcggaggcgaagtcaccaaccatgtagaaggcaccctcaggaaggttgtcaccttcaccgttaaggatggccttgaaggagttgatggtctccttaaggtcaacgagcttaccctcgataccagtgaaaacctgggcgacagtgaaaggctggctcaggaaacgctggatcttacgggcacgctcgacagtaagcttgtcggcctcagacaactcatccatacccagaatggcaataatatcctgaagagacttgtactcctggaggatctgctggacacgggtggcgacgtcgtagtgctcttgaccaacaactcggggatccaacatacgggacttagaatcgagagggtcgacagcggggtagatacccaactcagagataccacgagataagacagtggtggcgtncaaatgggcgaaagtggtggcaggggc

SEQ ID NO: 56127 - DNA, 1902 bp, Zea mays
  unsure (1)..(1902): unsure at all n locations
  Clone ID: MRT4577_15117C.1
aggtttagggaatgccagaataattaaaggatctgaaatactctactcatgcaaaactcancctttgagaggtttactgaagtgatgattcatctaacagtgttttttttttttttttttagaaaaagaaacgcaaagggttataagagtaatatgaaagtgtaggaacaaatgccaacggacctctgctccactcagccaactgtttactaggacagagagactggcccctcatccaagcttcagaggtgccatttgagttcagcaaggaaaacatataggctaagcccaattctttcatcgcaagcccaggcaactgaagcagaacctcagcttacttgcagagtcgcggtgtcatttgtgtttacatgggcggacatggaatgcattgggcagatttcaatatgcagtagtgactggctcactgcaccaggatgacatcatgggttttgccagcatccttgtcaggatttggctcatctacaaaggttttatttcctacagatcaaacacagcatgcgtgcttgaagtttggacgatgttagcagttctcactaaggcttaactatattccagcacgtgaactcagaaggtattatgttttcattacaggaaatcgcagctttggcagtcaactttccaaccaaaccatgatacagaagacctcgtgcaccaagtccaccaactagccaaaatgtgcagttgctcttattgcctagtaaatcatccaaacaacccaaaagtggcaatgacccatttgttgtaagtggaggcatggctcgtattccagctcttgcgcgtacaaaatcccatttactaattcttggatatacgccagaagctttagggagcaactcttcgattgcagtaagagattcttcatcggaaacagttgaagaatcgttctcagaaatccattgccaagatgatccgatagaaacagttcggggaccttggaatgctagccatgcatcagataagattgaagcactttgactgtcatattcttctactgtagtggatggcaactgaaattcagcgataactcctctgcaggtcctaagaggcaacttatttgcaagttcaggaagtgagcaagccttggccccaaggcagatgatcaccgaatcataattgcctgccaaaaggtgtagattatcaacatgttgcttgtaaagcttgatttctttctgctcacttggtaatgaggaggcttcatctgccagattttggcatgcagagaacagtgcctgcagatatttcttagggttgatgttcagtgccagtggcatgtaaacttagcatatctgcataatctcaatccagcagtacctccagcaatatggctgcagctttctcagttgtaggcggtcgtacaatcccccttctccagataaggttatcatcttgactagttgtatttgataccgaggttccatttgcttgctcggcgctgcgaaggagatccatgctttctttccagaactcagcacccctccagagaagcttcactttaggcgagtagggatggagaagtccacccgagacgcccgacgcgcctccgccgaccccgttctcgtcgtagatgtccactgacacgcgggaatccctcgggctatgcttgaggaggtgccacgcgacggagagacccgcaaagccggcgccgaggacggcgtagcgcaaagggcggcggccgtgccctcctgccggcgagggcgaggccgcggtggccgcggcggcggatgcgacagttcgcctggagtagagggtgagattgggggagaagcttcactttaggcgagtagggatggagaagtccacccgagacgcccgacgcgcctccgccgaccccgttctcgtcgtagatgtccactgacacgcgggaatccctcgggctatgct

SEQ ID NO: 56128 - DNA, 776 bp, Zea mays
  Clone ID: MRT4577_151180C.1
cctcgaggccggccggaggatgcgatcataccagcactaaagcaccggatcccatcagaactccgaagttaagcgtgcttgggcgagagtagtactaggatgggtgacctcctgggaagtcctcgtgttgcattcctaaaagccaaaaggcatcaccgccgcgacgacgatggcagcctcgctccaagccgcggccaccctgatgcagccggccaagatcggcggccgggcgccctttgcctcgctgccgtcccgcccgtcgtcgcaactcgcctgcagggcgttcggcgtcgacgccggcgccgccaggatcacgtgctccctgcaggacgtcgccagcaggtgcgtcgacgccgcgaagctcgccggcttcgcgctcgccacctcggcgctcctcgtctcgggcgcgagcgcgcagggcacgcccaataggctgacctacgactagatccacaggaaaacgtacatggaggtgaaagtgacgtcaacgactaatcagtgatcgatcatagacgtggtagagtcagtatgcccacgatcaagtcggcagacattagacgaagaacatgtgcatgtcaagacaaccgcatactacatggtgcgagtgcattgcctcgaattcaccaacagacgcccagaccaagtcaagagagactggtatgatcaagcatccgagatacatcagatccgccgtaagatgcttgacattatgatcaaccaagcgtctacatgagacctgaaagaacttgtttcgaagttcattccagaagctattg

SEQ ID NO: 56129 - DNA, 1877 bp, Zea mays
  Clone ID: MRT4577_151181C.1
agcacatttcgtacatacctcgagtagcgtagcgcaccctagtgtgtcactgtggacagcctcagtcacccattcacattcacatctctaccctagtgcgcttcccttataaaacctagctcctcaagctccagacgcagtcgaccgccgcagaccgggagtagtcgacgcgccgtcactgaatcctcagatcacggctagccgtaatcacgccactctgctgactcccggcgagcagcagtgtaacattttccttcagccatgggcaaggagaagactcacatcaacattgtggtcattggacatgtcgactctggcaagtcgaccaccactggccacctgatctacaagctcggcggtattgacaagcgtgtgattgagaggttcgagaaagaggccgcggagatgaacaagcggtcattcaagtatgcctgggtgcttgacaagctcaaggccgagcgtgagagaggtatcacaattgatattgctctgtggaagttcgagaccaccaagtactactgcactgtcattgatgcccctggacaccgtgacttcatcaagaatatgattactggcacttcccaagctgactgcgctgttcttatcattgactccaccactggtggttttgaggctggtatctccaaggatggacagacccgtgagcatgctctccttgctttcacgcttggagtgaagcagatgatttgctgttgcaacaagatggatgccaccacacccaagtactccaaggcccgttatgatgagattgtgaagggaagtctcttcctacctgaagaaggttggatacaaccctgacaagatccacttcgttcccatctctggtttcgaaggtgacaacatgattgagaggtccaccaaccttgactggtacaagggcccaaccctacttgaggctttggacttgatcaatgagccgaagaggccttcagacaagcccctgcgtctccccctacaggatgtgtacaagattggtggtattggaactgttcctgttgggcgtgttgagactggtatcatcaagcctggtatggttgttacctttggtcctagtggccttactactgaggtgaagtctgttgaaatgcaccatgaggctctccaggaggccctacctggtgacaatgttggcttcaatgttaagaatgttgctgtgaaggatctgaagcgtgggtatgtggcctccaactccaaggatgaccctgccaaggaggctgctagcttcacatcccaggtcatcatcatgaaccaccctgggcagattggcaacggctatgccccagtgctggactgccacacctcgcacattgctgtcaagtttgcagagctcattaccaagattgataggcggtctggcaaggagcttgagaaggagcccaaatttctcaagaatggtgatgctggtatggtgaagatggttcccactaagcccatggtagttgagaccttctctgaatatcctcctcttggtcgctttgctgtccgtgacatgaggcaaacggtggctgtcggagtcatcaagagtgtggagaagaaggatccaactggagccaaggtgaccaaggctgccgcaaagaagaaatgatgtgtctggctggttctgtgtttgcttgagggatacctagtggaaacataaaatatctcgtcttgttcacgtcattgtctgaacctatgctcgcaacgtttgcctggtcgatttagaactgttattttcgttaaaaccagagtgttatttaagatctatccgaacatctggtgagccatatatggttactagttttgttactacccttgttggtgttgtgtgcttctttaccaaatgtgctgtttcgaaaaaaaaaaaaaaaaaagcggcc

SEQ ID NO: 56130 - DNA, 2048 bp, Zea mays
  Clone ID: MRT4577_151182C.1
tgctcccttccaccggttcggcaacaccagcagcagctcgctgtggtacgagctggcgtacgccgaggccaagggccgggtaaggcgcggccaccgcgtgtggcagatcggcttcggctcggggttcaagtgcaacagcgccgtgtggcgcgctctacgcgacgtgccgccgctgccgtcgtcggcgggagccgcggcggggccggggggcaggaagggcgcgccgcagagctgctgcaacccctgggtggacgacgtggacaggtaccctcccaaggcgtacggtcacggggccacaacaactgcatgatcccaatcccattcggatttcctcacgacgaattaatgaagaagggcgtgtgagtgtgagggagaaagttatacttgtatgtattttttcagttttattttgtcgtttcgttttcctttctttttcccagtaggttgccgtacgtgagtagacaatgctggcttttggaattcagagatgtagtatgtggtgtaaaatgaattccaaaagctagcagtgcctaccctatttgttgtctagttcttttatcttccttggcgttctagacgcccgtccggggaggtagaacggacagacgaacccaacagtgtgcaagatcacatgactagctagagaatcatcgaccaatgcaagtgtgaattactgattataatatagtattactacataaaaaaaaaaaaaaagacagacagaggagaggagaaagggcaaaaggcaacaccgcccgcgacgaccacgatggcagcctcgctccaagtccaagccgcggccaccttgatgcaaccggccaagatcggcggccgggcgccgtccgcctcgctgccgtcgtcccgcccgtcgtcgcaactcgccagggcgttcggcgtcgacgccggcgccgccaggatcacgtgctccctccagtccgacgtcagggacgtcgccagcaagtgcgtcaacgccgccaagctcgccggcttcgcgctcgccacctcggcgctcctcgtctcgggcgcgagcgcggagggcacgcccaagaggctgacctacgacgagatccagagcaagacgtacctggaggtgaagggcacgggcacggcgaaccagtgcccgaccatcgacggcggcgtggactcgttcccgttcaagcccggcaagtaccagatgaagaagctgtgcctggagccgacgtccttcaccgtcaaggcggagggcatcgccaagaacgcgccgcccgagttccagaagaccaagctcatgacccgcctcacctacacgctggacgagatcgagggcccgctcgaggtcgcctccgacggcaccctcaagttcgaggagaaggacggcatcgactacgccgccgtcaccgtgcagctcccgggcggcgagcgcgtgcccttcctcttcaccgtcaagcagctcgtcgccaccggcaagccggacagcttcggcgggcccttcctcgtgcccagctaccgcggctcctccttcctcgaccccaagggccgcggcggctccaccggatacgacaacgccgtcgcgctccccgccggaggcagaggcgacgaggaggagctccagaaggagaacatcaagaacgccgcctcgtccacgggcaacatcacgctgagcgtcaccaagagcaacccggacaccggcgaggtcattggcgtattcgagagcgtgcagccgtcggacaccgacctcggggctaaggcgcccaaggatgtcaagatccagggggtctggtacgcgcagctcgagtgattcgttttaactgttagaggcgtcggaccgtcatggagaacttttgagagaggaggaggaatcgtgtatgtaactattaatgcaaattcgggctgttggtttttaatttcagtttgggtttcttctttctttcttgtgtactccagtggactcccgtgtgcaaacacgaagagtggctgtttgacaccagagattaattgttacttcctccgtctcagattataatatattttgatctttttaaaagaaaaaaaaaaaaaaaaaagcggcc

SEQ ID NO: 56131 - DNA, 2222 bp, Zea mays
  Clone ID: MRT4577_151183C.1
cggtcaaaaaagattattttcatcagcctttgatttatgaaaattattcatatcactattattgtgtctcaagacaatcgatctaccaatgctactcgtttcttcaggttgtattctagacgccgcctcgtcgctcacctccttttctgcgaaacataatatcagacaattgatcacgtacacacaaaatccaagtagatcatggttatcaaggagctactttagcgtatgcagtatgcttttatatatggctctatcttcattaacgggcttgcctgatctgcacgcacagctacctgatcagttggtcgttggcagttgatgagtgatctgtactaggttgccttccagctagcaccgtgaggggttgtttctctttgtaatattacactatttcctgcatataccatatacaaatgtaatgttgtattttccttttgtttaccatcatatggggctttcacatacgtacgttgaggttttagaagtcgtgcttaattataagcctatatatctactagcagttcttgtactaataatacatgtgcttccacaatgaatcgtgaaaagcacaaaacaaaacccatcgggacagatgatatacactgatgaaacaatctctacaccctttatagcctccgcttcaactaatgtacatataccagtacgtcacattccttagccctcagtcgattaagaacgcatcacacgaactgatccggcccagaaaggaacgtaacatcgatcgcgtttcaagatttgtcttcctttatttcagctcggaccacatgacctgatggaccgtcgactcaacccgacagggtctggatgatggtgttgtgccaaaagccaaaaggcatcaccgccgcgacgacgacgacgacgaacgatggcagcctcgctccaagtccaagccgcggccaccctgatgcagccggccaagatcggcggccgggcgccctttgcctcgctgccgtcgtcccgcccgtcgtcgcaactcgcctgcaggggcgttcggcgtcgacgccggcgccgccaggatcacgtgctccctccagtccgacgtcagggacgtcgccagcaggtgcgtcgacgacgcgaagctcgccggcttcgcgctcgccacctcggcgctcctcgtctcgggcgcgagcgcggagggcacgcccaagaggctgacctacgacgagatccagagcaaaacgtacatggaggtgaagggcacgggcacggcgaaccagtgcccgaccatcgacggcggcgtggagtcgttcccgttcaaggccggcaagtaccagatgaagaagctgtgcctggagccgacgtccttcaccgtcaaggcggagggcatcgccaagaacgccccgcccgagttccagaagaccaagctcatgacccgcctcacgtacacgctggacgagatcgagggcccgctcgaggtcggctccgacggcacgctcaagttcgaggagaaggacggcatcgactacgccgccgtcaccgtgcagctcccggggggcgagcgcgtgccgttcctcttcaccgtcaagcagctcgtcgccaccggcaagcccgagagcttcggcgggcccttcctcgtgcccagctaccgtggctcctccttcctcgaccccaagggccgcggcggctccaccggctacgacaacgccgtcgcgctccccgccgggggcagaggtgacgaggaggagctccagaaggagaacatcaagaacgccgcctcctccaccggcaacatcacgttgagcgtcaccaagagcaacccggagaccggcgaggtcatcggcgtcttcgagagcgtgcagccgtccgacaccgacctcggggccaaggcgcccaaggatgtcaagatccagggggtctggtacgctcagctcgagtgattcgagtgtctaactgctaggtgtccgaccgccgtcatggatcttgggaaggtgtatgtataccatggaaaactttggagagcagaggaggaatcgtgtatgtaatgtacttgttaatgcaaattcgggctgtcgcttttttattttcagtttgggtttcttctctttcttgtgttctcaagaactacatcccctgtgcaaaacacaaagagaggttgtttgataccagagatgaattgttagttataaaaaaatgtcataaaaatgttatctgctgagctcgcactagcttagcataaaaaaaaaaaaaaaaaagcggcc

SEQ ID NO: 56132 - DNA, 285 bp, Zea mays
  Clone ID: MRT4577_151184C.1
ggaaaccccatggtttttttttaacaaagcccaaaagacctaaacctggggaattcgttccggggcgggggcttttaagttaaaacccaaaagggcacccgggtccaaaaccaggttggttcccgggtccgggggccccgttcacattttttttcagcataaacaacccccaaatttgggctgcccccaaaggcctttgggcccccccttgttgggggggcaaaaatttttcttttctctaacctactggggcttgaacatggggcgggacagggccaccccccg

SEQ ID NO: 56133 - DNA, 963 bp, Zea mays
  Clone ID: MRT4577_151185C.1
attgggtacctcgaggccggccgggtttgtcataatcgcatgtaccctgggtggaccaactgtctatctagtcgaccattacgacgatcccatcaatcaaatgggcaattcgggctacatcatcgctaacttcttcactgacgggctcatgctatggcgcacattcgttgtgtggaacaagaactacttcgttgaaaaagggcaaaagccaaaaggcatcaccgccgcgaccgacgacgacgatggcagcctcgctccaagccgcggccaccctgatgcagccggccaagatcggcggccgggcgccctttgcctcgctgccgtcccgcccgtcgtcgcaactcgcctgcagggcgttcggcgtcgacgccggcgccgccaggatcacgtgctccctgcaggacgtcgccagcaggtgcgtcgacgccgcgaagctcgccggcttcgcgctcgccacctcggcgctcctcgtctcgggcgcgagcgcggagggcacgcccaagaggctgacctacgacgagatccagagcaaaacgtacatgggaggtgaagggcacgggcacggcgaaccagtgcccgaccatcgacggcggcgtggagtcgttcccgttcaaggccggcaagtaccagatgaagaagctgtgcctggagccgacgtccttcaccgtcaaggcggagggcatcgccaagaacgccccgcccgagttccagaagaccaagctcatgacccgcctcacgtacacgctggacgagatcgaggaacccgctcgaggtcggctccgacggcacgctcaagttcgaggagaaggacggcatcgactacgccgccgtcaccgtgcagctcccggggggcgagcgcgtgccgttcctcttcaccgtcaagcagctcgtcgccaccggtaagtccgagagcttcagagggaccttcctcgtgcccagctaccgtggctcctccattctcga

SEQ ID NO: 56134 - DNA, 172 bp, Zea mays
  Clone ID: MRT4577_151186C.1
cccccgacgtcgcggaggccgctcagtccggcgagctcacgccgtcactcagggggttcctcctcagcatcgtgtccggtcgggtcgtgctcattggtattgtcggcgccgtcgtcggcgtctccaacttcgaccccgtcaagagggcctgatctgaatccatcgtatcgat

SEQ ID NO: 56135 - DNA, 490 bp, Zea mays
  Clone ID: MRT4577_151187C.1
aaaaaaattaattttccccaaaccccgccggcaagcaaacaggccttacccaaaacttcgcaggggggagcccggccgggataaaggaggaccggcaacaggcccaaaaaagggggggaacagggacacacggccgggatcgaccagagcaccaggcaggggccaggggacaaaacaacaaaaacagggcttcaagggaggggaagggaacggagcacgggcttaaccaagaacaggacacacgtatctctcggggggggggggggatcccgggggagggccgggcgaaaaaaaaaaagcgggagttcttgacaaacaaaaaggggtccccccccaagggggaaaaggggtgggcccacacctttggggccacccaaaacgggccctcgaagccgggcccccccaacaagaggaactccgggtccacaaaaggaacaagcccgttgtcctgggagaagggggggaagcgggggagcccccagcggccccc

SEQ ID NO: 56136 - DNA, 309 bp, Zea mays
  unsure (1)..(309): unsure at all n locations
  Clone ID: MRT4577_151188C.1
ccggggtgggagttgtgaatctttgcgcggnttaaatttttgtgcgttatgtatnggtgtcgatgcatgatttgggcccgctttttgtcctgccagtgccactgccagccatgctttctggctgctcgctcaggtcagtcaggtcacccagggcagctgctcgggttcggtacatccgtggaccggtggacggctccggggggggggcggtttccgtctcgcagggacacacccaacccaagcacgcgaactttttccaacctgtgcagtgtgccacaaactatttctgctgcttcaacgggtaagcgc

SEQ ID NO: 56137 - DNA, 332 bp, Zea mays
  Clone ID: MRT4577_151189C.1
aaaaaaaaaaaaaaaaaaaaacaaaagaaaaaaaaaaaaaaaaaaaaaaaaaaaaaattataaaaaaaaaaaaaaagggtgacacgttttagaggataccaaaatttaaatacaggatgcatgcgaacgtattaactttaggtatgggtgcacctttattttttttaaatggcccgaggttttacaaactggtgggggggggtaaaagcttggggttgccggaattctattggggttgcggagcttccccttttcgccgtgtggcttaatggcaaaggggcccggctcgttgcgcccttcccaactgttggcgcactttaaatggcaattgg

SEQ ID NO: 56138 - DNA, 324 bp, Zea mays
  Clone ID: MRT4577_15118C.1
gggtggggttttaacatgttatcctttttttttttttaacggagaatacatgcggaaccagttttttttttgctccacgtttaaacaaacgggcgttgtgtaatgtttcggaaagcttctctaaacattttagagtatatttacacacttgggcgggcgcataaacacacaatttacccgtttgccttttgacgggttgctgtcaaaccatattcctaggacgactttgggaagccttcccttagttttccatatttttaaacagtgtgggagactcccttataaacctctcccaatatccagtgggggccacgggggggtggg

SEQ ID NO: 56139 - DNA, 492 bp, Zea mays
  Clone ID: MRT4577_151190C.1
tgtaatgggcatggactgttcctcttggagaactctactactttcctttacatttgctttggtggccaactgactgctgcctgatgctacgcaaaactacaatgaattgcgcaggactagatgtgtctgtgcttggatgctacacgagaacctgaccaggtctctccctactgccaggacatctgaggcttgccggacgcacccctcattccaatcttgaacctatccatccactgcacgacagtctatcgtgcatacaaaggacatggtaggggctatcccgaacccgattgcaggaagagcttgctttcctgctaacttggtcatgctcctaacacgccggcgcgttccaaaggtagtaattcttgcaatatatcatcactctggccagctgtcgtacatgcatatagagggccccctatcgcctataccgacaggtgttacaactgactggccaatggtctaccactgtatgactgcaataaccgtggc

SEQ ID NO: 56140 - DNA, 293 bp, Zea mays
  Clone ID: MRT4577_151191C.1
gataagcgctatcgctgaaaaactgcatttgttcactgcacaagagacgtgggatccgcttgcacaagaacacaaggtctctcatgcacgtggtgagttgtatattatagagaactcgcatcactgcacgatgatcgaaaaccatgctatgatataataagtacatgtcatacatcggctggcaaaacatctcgagcccttgtgtgtcgtctaacaagtacgcggttctatgcatcattgctaatttcagactttgtagcatagaactttgctacttctctaacgcataccac

SEQ ID NO: 56141 - DNA, 267 bp, Zea mays
  Clone ID: MRT4577_151192C.1
aaacggtgctttgctctgtgtttgtgctcctgatttccctggaggttctggatgaaggctgaacacaggcttgttaatgacagtctgtgctgatgacctcagggacttgaggttgcatttttgagcatggggtgcaggagcctttctggatttggatgtggctatggatagaacacagaagccaaggtcatgtgcatgcaatgaggagtttgagttagtcacctcggggattttatccattttgcagtaaaatgttaaattaatgta

SEQ ID NO: 56142 - DNA, 366 bp, Zea mays
  unsure (1)..(366): unsure at all n locations
  Clone ID: MRT4577_151193C.1
gttacgccttctttcgcgccgccggcgacgtcgccgctacgcccggtacctcgcttgaatttgtgtcgccaagatgaccaatcccaccaanaatgcagggatggttggcaaatatataaccaggattggtgctagctcgcgtaagcagatcaagatgatggaggtctctcagcattaccagtactgctgcgagttctgtgggaagtttgctgtgaagagggaagcagttggaatgagcgggtgcaaggactagtacaaggtgaaggctggtggtgcttacaccatgaacactgatagtgcagtcaccgataggagcacgatcacgctgctgacggagcagactgaagcatgatatagctttttata

SEQ ID NO: 56143 - DNA, 330 bp, Zea mays
  Clone ID: MRT4577_151194C.1
gggggccccaaaccccccccagggaaaaaatggcccaaatgggaacaagggggcccccttaacaggggccccggcagcctgggctcaaccccggggaataggggccccctccggggcgggggcagcccgacatgctcccccatggtcacggcctccatggccaccccgtccgggaggccccccccgaacccgggccccaggtttgcccccccggggggcaccccttttaaggggagaactcccccggggcaaatgcgtcggccggcccccaacgggaacagttttaaagggcccccgcccccctccacggggggggggggccccaaaaac

SEQ ID NO: 56144 - DNA, 634 bp, Zea mays
  Clone ID: MRT4577_151195C.1
tcacgaaccaaccaaacaaacaaaatggcggacccaactccccctcctccaccttccccggagcgcaaatctcccctcccaatccccacccccgtcggtagccgatcgcgtcgacgatgctgggcgccgcgaggagatccggatgcgtgctggggcaactgatgcagaccctccgcccggcggcgtcggcggccacggcggcgaggagctactccgcgaccccgaaggagatgactgtgcgtgaagcattgaattccgcccttgacgaggagatgtctgccgacccttctgttttcttaatgggagaagaggttggagagtaccaaggtgcgtacaagataacaaagggtttgctggacaagtatggtcctgatagggttctcgatacaccaatcacagaggctggttttactggcattggcgttggtgctgcctaccaaggtcttagacctgtagtagagttcatgacatttaacttctcgatgcaggcaattgatcacatcatcaattcagctgccaaatcaaactacatgtcagctggtcagatatccgttcctattgtttttcgaggaccaaatgggggcagctggctggagttggtgctcaacactcgcagtgctatgcagcatggtat

SEQ ID NO: 56145 - DNA, 358 bp, Zea mays
  unsure (1)..(358): unsure at all n locations
  Clone ID: MRT4577_151196C.1
gggaaaacccaccggctcaacaattgggttaatccccccgacattgggggttaacacccgggacaagaaacgaaaccccccccgggcctcacattggggccaaaaaaaaatcccatttagccaaaggcccccgagccccctttatttaatttgggggaagggggggggggggccagggaaccccccccaggggggggagccccccccccgccataaaaaccaccacgtttgggggggctggcgaaccaacccccggcctgttggtattgggcccaccccggntgccggccttccaatcgggcgtcctgcccccccccggggccaaccacgccccgggggccatggggggggggttggg

SEQ ID NO: 56146 - DNA, 295 bp, Zea mays
  Clone ID: MRT4577_151197C.1
tcgtttccgttgtaaatcctccccgcgcccgctaggatactactcgccggtattccactggatccgacccgacacgcgcatctcttggatcgccgcagtcggccgacaaggcagaagccggcaggctgaggaggaggagtacgagagcgaccttgacgactcgcccctctccgcgttgtgtcgccgggacgctgcgagcgacgacaagggccacgaccaagatcacgacggaggtaggcctttaacgcggatttaagccggactctatgctttactccgacgggcaggttgccgt

SEQ ID NO: 56147 - DNA, 304 bp, Zea mays
  Clone ID: MRT4577_151198C.1
acgcgtccatctaaggtcggtctaagtgaagcaaaaatgcttaccttgtagtagctaaatttacatgtgcggggatatacgttgtaatagaatatttctgcgccccgtacgtggctgtttgatgaaaaaaaaaaaaaaaaaaaaaaaaaaaaaaaaaaaaaaaaaaaaaaaaagacggctgcaaaggaataagatttaagtatacgtgcaattaaagtcaaagtaatgttacaacgagagaagcaacaaatttaaaataacgtggagatcaatttacaacgatcgcaaaagcaaaaactgtaac

SEQ ID NO: 56148 - DNA, 267 bp, Zea mays
  Clone ID: MRT4577_151199C.1
cagccttttcccaaagataagcttcctgcacatattgttgagatcttgacgtttgcgggcttgctcatctgcgtggagtgctcgagtggtgatgagagtttgttttgtgaaagggagacggttgctggcttgatacatgtgtctcatggcaaaatcaacaagttgtttctcctgactaaacaaaacaaatgaaaaaaaaaaaatatcaacagctaaataaagaagtgattacaaaaccaatgaaaacccaaatgaaaacatgcgcgt

SEQ ID NO: 56149 - DNA, 1138 bp, Zea mays
  unsure (1)..(1138): unsure at all n locations
  Clone ID: MRT4577_15119C.1
cattgggaccctcgaggccggccgggacttctcttcaaacagaccagagaaccaccgccggcagctttctcgtcaagcccggagcgctggacctggacgcgatgttgtcgccgccttcttttgctccttcccatattgtccccaatctcaccctctactccaggcgaactgtcgcatccgccgccgcggccaccgcggcctcgccctcgccggcaggagggcacggccgccgccctttgcgctacgccgtcctcggcgccggctttgcgggtctctccgtcgcgtggcacctcctcaagcatagcccgagggattcccgcgtgtcagtggacatctacgacgagaacggggtcggcggaggcgcgtcgggcgtctcgggtggacttctccatccctactcgcctaaagtgaagcttctctggaggggtgctgagttctggaaagaaagcatggatctccttcgcagcgccgagcaagcaaatggaacctcggtatcaaatacaactagtcaagatgataaccttatctggagcagggggattgtacgaccgcctacaactgagaaagctgcagccatattgctggaggtactgctggattgagattatgcagatatgctaaggtgcttcttttgtgtttcttggtgcatcattttaattgcttcaacctattcaagatagaatgttcagaaatgcctcgagagttgcagccttcaactgcttgattctgatgctgcacagcgtctaatccctgggctgtgtactccatttgacttcgcagtttacatgccactggcactgaacatcaaccctaagaaatatctgcaggcactgttctctgcatgccaaaatctggcagatgaagcctcctcattaccaagtgagcagaaagaaatcaagctttacaagcaacatgttgataatctacaccttttggcaggcaattatgaattcggtgatcatctgccttggggccaaggcttgctcacttcctgaacttgcanataagttgcctcttaggacctgcagaggagttatcgctgaattncagttgccatccactacagtagaagaatatgacagtcaaagtgcttcaatcttatctgatgcatggctagcattccaaggtccccgaactg

SEQ ID NO: 56150 - DNA, 2490 bp, Zea mays
  Clone ID: MRT4577_1511C.1
gccggctcggcccgcgtcgttctcccgtgctccccgcgtgcgctctatctgtttctggtggcgacgacttggcggtcgccggctcgccgccgccgccgtgcacagtcctttattttggggaccttcaccggcgacgagcacccaccaggttgcttcacaaaacttacaacatccaggatacaactaataaggattccttcatctttatctggattttgaggaggttgctgagagcccatccagcagggtgtctcagacatactaatggacggggcgcccaagatccttgaaaaatcatcacatgaatgcatgtactcttggtacttcacccgggaagaactcgagaaattttcaccatcaaggaaagatggtattactgaaaacaaggagtcagaaatacggcatttatattgttcatttatccgggacgttgggatcaggctgaagctacctcagatgacactagcaacggcaatcatgctttgccatcgcttctatttacaccagtcccttgccaaaaatggatggcagacaattgcaacagtatgtgtatttctagcgtcaaaagttgaagatactccttgtcccctggactatgtagttagagtatcctatgaaacaatgtataggcgggacactgctgcggctcaaaggatccgccagaaggatgtttttgagaagcagaaagcgctcattttgattggagagagattgcttcttacaactattcgatttgatttcaacattcagcatccttatagaccacttcttgatgccatgcaaaatcttggcatcaatcaaaaagaagtgaaacaagtagcatggaactttgtgaatgactggcttaaaacaacattgtgtctacagtataaaccccagtacatagctgctggttccctttatctggctgcaaagcttcacaatatcaagcttcccttgcatggagcgcatgtttggtggcaccaatttgatgttgcaccaaagcctctggaagccgtcattcatcaaatgatggagcttgcggctttgaaaaagttgatgcctgctcgacccaatccggttaagctgaaggaaactttatgtgaagctaaactgagcttatctaatagcccagactctgtgttgaatcaatcaagcttgttaataagcagctcaagtcctgatattggcgagcccagtgacaaagtgcaggtggattcctgccaatacttgataagcagtcacatgggtgattgtagggtctcaggtcctgacagcagttcgttgaatacttgtgctaatagaaatgtctcttgtaaagcacatgatgaagagagcttggatcaggccttaataatcaaacatgacagtgggatgatgccttctagtaatcagacatcattatatgctactgtaggcactgagggcagtgctgaactgaagcaggatgtaagccattgtaatgacttcaatatcagagtcaatgacgaaagcttgaaccaggtgttaagaaatcagcatggtgatgctatcccattacctgacgtggtatcgctggatgccaaggtggacaaggaaaggagttggtgtgtggaaccattaattgcaaactctgattgctgtactgacagtgttaatgtggatagcttgtgcactgatcagagattggctgatgctccttcaggccccacagctgatgcaccatccatgctggccgaggaggaatcttatccttttagtgcaaagcttgaaaatattgatgttgccaggatcaaaggtttattgatgaagaggaagagccggagagagatccaagaccgagccattgcttcagatggtctaagtgaagaagactggatcgagagagagcttgaatctgggattgttacaaaacaagaagccaattgtgctgccatctcagacgagctaagtgacgaagcctggattgagagagaactcgagtcagggattgtggtcggaccaagaaatgagcaagcgatcacttttgatggtttgagtgaagatgattggatcgagagagagctggagtctgggatcatcgttgagccagcacctgctaccaagaagcggaagctggagtcaagctgttagctctgcattcgaaggccagattccaagcaggtgaataataacagatggttgcgagtaggaccacatcgaagccaagagatacatgtcgcacagatgggaggatcaatattatcctttttttttatttctttataaccaaacaccttggagtactttgacacaaggggtgtgttcacagtgggatctccccagtttcttgaatgcagaaccgtatccgttgtatttgttccttcttgtcgtgagtgtaaatctagcgtgtccgaagttcggttttagattgtaggtgtaactgtagcagggattatctggtgttaagcccaacgagaaaatgattcagtgtaactgttactgtaaggaaagaagttattcagtgtagatttatggttaacacaagaggcc

SEQ ID NO: 56151 - DNA, 1290 bp, Zea mays
  Clone ID: MRT4577_151200C.1
tcgaggccggccgggccgggatttgaaagcgtgttggttggttatctactagctgacggtctcactgatgctcatgcctccgcctccctgcccgccgacgctgccgcaccttctccgccacctccgcggccgcatgctcaccacccagctcctcgaccacctcatcaggtcaacctcatcctcgccgttcccctccctctccttctccgtcttcatcctcctcctccgctcctccctccgcccgtcccacttcactttcccattccttgcccgcgccgccgcgcgcctttcctccgcctccctcgcgtctgcgctccacgcgcacccgctgcggctcgggctcctccccgccgacctccacgtcgccaactccctcgtccacatgtacgcggcctgcgccctgccggaccacgccaaccgagtgttcgacgaaatcccgcgccccaaccttgtctcctggaacgcgctcctcgatgggtacgccaagtgccgcgacctcaccgctgcgcgaaaggtgttcgctcggatgccccagagggacgtggtgtcctggagcgccatgatcgacgggtgcgtcaagtgtggggagcaccgcgaggcgctcgcgctgttcgagatgatggagaatgctgccgccaggtcagcagaggaggaggatggtgagggtggagcgagggctaacgacgtcacgatggtgagcgtgcttggagcctgtgcgcagcttggagacctcgagcgcggaaggcgggcgcaccggtgcctgagggaacgtggctttgcattgaacctcaggcttgcgacctcgctcgttgacatgtatgccaagtgtggggccatcagtgaggcaatggaggtgttctgggctgtgccggtggagagcaccgatgttctgatatggaatgctgtgatcggtggccttgcggtgcatggcatggccaccaaatcggtggagatattcctggagatgcagcgtgctggggttgcgccggatgagatcacgtacctttgtctgctgagcgcttgtgcccatggcggtctagtggatgaggcttgggagttcttccgctcacttgaagcgcaagggctcagaccacatgttgagcattatgcttgcctggtagatgtgcttggccgagcaggacgcctggaggaagtgtatggtgttgttaaaagtatgccaatgaaacctagtgtttctgtgcttggtgctctcttaaatgcctgtcatttgcatggatgggtggagctgggggaggtactcggtaggcagcttgttcagttgcagccaga

SEQ ID NO: 56152 - DNA, 121 bp, Zea mays
  Clone ID: MRT4577_151201C.1
tttagcaatattatgcagttgttaggcaagtcaactaagattgactatcttatggaagatattgtggataagctgcgcaataggtttgctggagtggatgatgccatacagagggagcata

SEQ ID NO: 56153 - DNA, 262 bp, Zea mays
  Clone ID: MRT4577_151202C.1
gggagggaatccatatttatcttttaatttattttttcactttattaccaaatacaaagatggtaaatttactttgctgagtgatgtccaattgttgtgtgacaagttgtgtttttggtcgacggaaacggaaagcaacatgctgcctttgttcaaaagtggcgttttgccaggtacggggcctttcattcataccagtacgcgaacgccgcaatggacacggccggggccacgccgaccgtggggtgccatgcccattcct

SEQ ID NO: 56154 - DNA, 1774 bp, Zea mays
  Clone ID: MRT4577_151203C.1
tcgaggccggccgggccgggattccaacacgccgtcgtcttctgcggttctgccgtttactcctccactttggcctcctcacttgcaagtttaatcttcgcccccagccatgggtaaggagaagtctcacatcaacattgtggttattggccacgtcgactctggcaagtcgacaaccaccggccacctgatctacaagcttggaggcattgacaagcgtgtgatcgagaggtttgagaaggaggccgctgaaatgaacaagcggtcctttaagtatgcttgggtgcttgacaagctcaaggctgagcgtgagaggggtatcaccattgatattgctctgtggaagtttgagaccaccaagtactattgcaccgttattgatgcccctggacaccgtgactttatcaagaacatgatcactggtacctcccaggctgactgtgctgtccttatcattgactccaccactggtggttttgaggctggtatctccaaggatggccagacacgtgagcatgctctccttgcgttcacacttggagtgaagcagatgatttgctgctgcaacaagatggatgcaaccactcccaaatactccaaggcacgttatgatgagattgtgaaggaagtctcatcttacctcaagaaagttgggtacaaccctgataagatagcatttgttcccatctctggttttgagggtgacaacatgattgagaggtccaccaaccttgactggtacaaaggcccaaccctgcttgaggctcttgaccagatcaccgagcccaagagaccctcggacaagcccctgcgtctccccctccaggatgtgtacaagattggtggtattggaactgtgccagttggtcgtgtggagactggtgtcatcaagcctggtatggttgtcacctttggtccaactggcctgactactgaggtgaagtctgttgagatgcaccatgaggctcttcaggaggcccttcctggtgacaatgttggcttcaacgtgaagaacgtcgctgtgaaggatatcaagcgtggttatgtggcctccaactccaaggatgaccctgccaaggaggctgccagcttcacctcccaggtcatcatcatgaaccaccctgggcagatcggtaacggttatgccccagtgctggactgccacacctcccatattgctgtcaagtttgctgagctcattaccaagatcgacaggcgttctggcaaggagcttgagaaagagcccaagttcttgaagaacggtgatgctggtatggtgaagatgattcccaccaagcccatggtggtggagacattctcgcagtatcctcccctgggtaggtttgctgtccgtgacatgagacagacggttgctgttggagtcatcaagagtgtggagaagaaggacccgaccggtgccaaggtgaccaaggctgctgccaagaagaaatgatgcgacctgtcgttgatgcagcgtctgcttttccaatacgtagctgagatgttccattttgacataagttttgtatgctgtggttgctgtttaccttgtgaactgttgagctctactattgggtgtccgtttatctgtttatgtagcatcttgttatttcacctattgcaatacaagaatgctatatgacatatatgttagacatttgggcaatgttaaatggatttttactaagtcgtgtagttagatttatgcacttgttccattttcaatagttttattttttctgcaaaaaaaaaaaaaaaaaggacccctagggcc

SEQ ID NO: 56155 - DNA, 1425 bp, Zea mays
  Clone ID: MRT4577_151204C.1
cggacgcgtgggtatctccaaggatggccagacccgtgagcatgctctccttgctttcacacttggtgtgaagcagatgatttgctgctgcaacaagatggatgctactacacccaagtattcaaaggcccgttatgatgagattgccaaggaagccccccagtacctgaatggggcttgaaccaccaacctggccaggccacctggcacaaccagcgcttgcggcgagcgtcttacaacaaccaattgcccaattgcaacaacaatccttgccacatctaacaatacaagccatcacaacgcaacagcaacaacagttcctaccagcactgaggccacctagccatggtgaaccctgccgcctacttgcaagagcagctgcttgcatccaacccacttgctctggcgaacgtagttgcaaaccagcaacaacaacagctacaacagtttctgccaacgctcagtcaactagccatggtgaaccctgccgcctacgtacaacaacaacaactgctttcatctagcccgctcgctgtgggcaatgcacctacatacctgcaacaacaattgttgcaacagattgtaccagctctgactcaactagctgtggcaaaccctgttgcctacttgcaacagctgcttccattcaaccaactgactctgtcgaactctgctgcgtacctacaacagcgacaacagttacttaatccattggtagtggctaacccattggtcgccgccttcctacagcagcaacaattgctgccatacaaccagttctctttgatgaatcctgtcttgtcgaggcagcaacccatcgttggaggtgccatcttttagattacatatgagatgtactcgataatggtgccctcataccgacgtgtgtttcctagaaataatcaatatattgattgagatttatctcgataaaaaaaaaaaaaaaaaaaagagggaccgagaaagataagaaaggcggtggtcaacttgtgtcctgaggtgcccgtagaagcccaaggacaagaaacaaggagaagagtagatctacatctactccaccgatgagcgcgtctcggttcatcaagtgcgtcaccgtgggggacggtgccgtcggaaagacctgcatgctcatctcctacacatccaacactttccccactgactatgttccaactgtgttcgacaacttcagtgccaatgttgtggttgacgggagcactgtcaacttgggtctgtgggatacagcaggacaagaagattacaatagactgcgtccgttgagctatcgtggtgctgatgtttttctgctcgccttttctcttatcagcaaagcaagctatgagaatgtctctaagaagtgggttcctgaattaaggcactatgctcctggcgtgcccataatccttggtgggacaaaacttgatc

SEQ ID NO: 56156 - DNA, 3319 bp, Zea mays
  unsure (1)..(3319): unsure at all n locations
  Clone ID: MRT4577_151205C.1
tgaattcggcacgaggctcgtcgtggcggccgccccccattccccatccttgtcgccgtgacgcctgacgccttctccccggaccccgatccggctccggcaatcccacgcccaggctgtccagctccaggctccaccgctccagcacgacagcaccaccagcgccgccctgcccctgtccctactccctaatcccacgcggccacacccaggtcccaggaaccagcactaggaaccagccggcgtccactccgtccagcggaaattcgaaaccagcgtccagcactagggtgaactggctgtttggacccgttctttatcttgcgtcgttcagccggcgtcctctctctctctctcgtggcgacgactgggcgacctccccgcccccgctgctctacgccaggtgcccaggtcttcgtcgggcccttcgccgaagagcagccaacaggttgccggtctgcgagttgaatcatggcggagcacttggcttcgatcttcggcactgagaaggacagggtcaactgccctttttacttcaagattggggcctgtcgtcatggggatcgctgctctcgtctgcacaacaggccaactatatcaccaactcttgtgcttgctaacatgtatcagcgccccgatatgataacccctggagttgatgctcaaggccaacctattgaccctgagaagatgcaggagcattttgaggacttctatgaggacatctatgaggagttggggaagtttggtgagattgagaatctgaatgtttgtgataaccttgctgaccacatgattgggaatgtctatgtccagttcagggaggaagagcaagcagccgcagcatacaatgctcttcaggggcgcttttactctggccgccctataattgttgagtattctcctgtgaccgacttccgtgaagcaacctgtaggcagtttgaggagaacagctgcaaccgtggtggctactgtaatttcatgcatgtgaagcaaattggcagggatctcaggaggaagctgtatgggcgttctgcttccaggaggtaccatgggagaagccgaagccgaagcccgccaccacaaaggaggggccaccgtgaccgtgatgactaccgtggtggcggcggtggtggaaggggaagaggtagcaggtatgacaggtacgatgatggagccggcagaggtggcaggcatgacaggtatgatgatggagcaggcagaggcggcagacatgacaggtatgatgatggaggaaggcgcaggcatggtagccccccaaggcgtgcaaggagcccagtcagggaaagcagcgaggagcgaagggccaagattgagcagtggaaccgtgaacgagagggaaaacagtgagggctactgttcgccggactctctcatccctatattctaagtatgcttgtgtggatgacattctgcctggctaagtaaaacctttttaagatcaggattcctcggttcattttatggttaaaccagacatcatttgtttccatctgtgttgtgtcggatcctttgctattatgttattttgacaattggtgtcaaatcttttgaggtgtgctattagcttatgatgatgtcagttgtggttaaaaaaaaaaaaaaaaaactcgaggtcgacggtatcgataagcttgatatcgaattcggcacgagcttttagtgagcgcaacaaatgcgttcattattccacagtgctcacttgctcctagtgccattattccacagttcctcccaccagttacttcaatgggcttcgaacatccagccgtgcaagcctacaggctacaactagcgcttgcggcgagcgccttacaacaaccaattgcccaattgcaacaacaatccttggcacatctaaccctacaaaccattgcaacgcaacaacaacaacaacaacagtttctgccatcactgagccacctagccgtggtgaaccctgtcacctacttgcaacagcagctgcttgcatccaacccacttgctctggcgaacgtagctgcataccagcaacaacaacagctgcaacagtttatgccagtgctcagtcaactagccatggtgaaccctgccgtctacctacaactactttcatctagcccgctcgcggtgggcaatgcacctacgtacctacaacaacagttgctgcaacaaattgtaccagctctgactcagctagctgtggcaaaccctgctgcctacttacaacagttgcttccattcaaccaactggctgtgtcaaactctgctgcgtacctacaacagcgacaacagttacttaatccattggcagtggctaacccattggtcgctaccttcctgcagcagcaacaacaattgctgccatacaaccagttctctttgatgaaccctgccttgcagcaacccatcgttggaggtgccatcttttagattacatatgagatgtactcgacaatggtgccctcataccgacatgtgtttcctagaaataatcaatatattgattgagatttatctgantaagaggctcagtgctggtaggaactgttgttgttgctgttgcgttgcgatggtttgtattgttagatgtgccaaggattgttgttgcaattgggcaattggttgttgtaagacgctcgccgcaatcgcttgttgtagcctataggcttgcacagctgggtgtcccccactgaagaaactatgtgctgtagtatagccgctggctagctagctagttgagtcatttagcggcgatgattgagtaataatgtgtcacgcatcaccatgggtggcagtgtcagtgtgagcaatgacctgaatgaacaattgaaatgaaaagaaaaaagtattgttccaaaaaaaaaaaaaaaaaactcgagccccggccacggccaccatggccacggcgggtacgggtacgggcgcccggcgatgccgcagtacccgccgccgccggcgtactactacccgatgccgcagcgccacccgcacgacagcatgttcagcgacgagaaccccaacgggtgctcggtgatgtgaggcgaggcgcggcggcggcctgcggggggctccggagaaagtgaaccaggcaaccagccagccagccaaccggaaggagggagctcgggcccgtcaggtcggaggcggccgccgtgagtggaagagtcgtcgtcggtatacatgaagaaaaaaaaactagctatatgctatagcaccagccgtaacctcgccgccccatttcgttttcgtctttcccctagtttgttttcacctttggtactttttgtttcccttctctgaacaaagaaagatcaaa

SEQ ID NO: 56157 - DNA, 1420 bp, Zea mays
  Clone ID: MRT4577_151206C.1
gccgcgtctcgtacttccagtagatgtccatgagcaggaagaggcagaagggcaccacggacatcatgggcttgagcgcgctccgcaccacggagaccatgccccggcgcaggccgtccagccccggcagcgtcagcagcagcagcatgaccgcctccgcgcccgccgcgtagcccagcaccacccactccagcgccatggccggtggatcgaggcctcgatctgggtcgagcgggaggagggaactgggaagatttggggatttggggtgagcattcagaaacacaccaagcgaagcacattagcaacaacctaacaacaatggctaccaagatattatccctccttgcgcttcttgcgctttttgcgagcgcaacaaatgcgttcattattccacaatgctcacttgctccaagttccattattacacagttcctcccaccagttacttcaatgggcttcgaacacccagctgtgcaagcctataggctacaacaagcaattgcggcgagcgtcttacaacaaccaatttcccagttgcaacaacaatccttggcacatctaacaatacaaaccatcgcaacgcaacagcaacaacaattcctaccagcactgagccacctagccatggtgaaccctgccgcctacttgcaacagcagttgcttgcatcaaacccacttgctctggcaaacgtagttgcaaaccagccacaacaacagctgcaacagtttctgccagcgctcagtcaactagccatggtgaaccctgccgcctacctacaacagcaacaactgctttcatctagcccgctcgctgtggccaatgcacctacatacctgcaacaacaattgttgcaacagattgtaccagctctgactcagctagttgtggcaaaccctgctgcctacttgcaacagctgcttccattcaaccaactgactatgtcgaactctgctgcgtacctacaacagcgacaacagttacttaatccactagcagtggctaacccattggtcgctgccttcctacagcagcaacaattgctgccatacaaccagttctctttgataaaccctgtcttgtcgaggcagcaacccatcgttggaggtgccatcttttagattacatatgagatgtactcgataatggtgccctcattccggcatgtgtttcctagaaataatcaatatattgattgagatttatctcaatatatttctgaactatgttcatcatataaataattgaaaacatcaaatcgtaattataaactcatgcttggtcaatacatagataatacaatattacttcaacatcccaatgatgtcatagcccaacctcttgaatgttactgttttaatgtgtgagggtatatttataagattgacgtgactatttgtcgtaaaaaaaaaaaaaaaa

SEQ ID NO: 56158 - DNA, 544 bp, Zea mays
  Clone ID: MRT4577_151207C.1
actccgtccgggggaaccattccattccatggcacgcaccgtcgtcttgcgggaatttggatttgggggagtataccgagacccgagagcgagcgaggcgtaccccttccgaaagagccgccctccctctccggctcctgctccggcgacggcgacccctgctgctgcaagtcccatccgtcacgcgacgaatgggatgctcccacgtgaacgggcatggtcgctttgcttcgcttgttctgcggcggtcaagattatcatgccagcgacagagttgccccccgtcgattcgccagaatctgacgatccacttcctcctccacatgactcaccgggctccccgcgcccctggatctctctttctccgaaaggcagaagcagtgcttgcttctatcttgaaatcacatcatgtgtttggtcgaccgtatttgatggtgcttacattgaggtatgcaatgaattggtgtttggttgctgtcaaacagactcgtatttgatgatgcttacatctaggtatgcaataaactggtgtttggttgttgcc

SEQ ID NO: 56159 - DNA, 1010 bp, Zea mays
  Clone ID: MRT4577_151208C.1
agtttataattacgatttgatgttttcaattatttatatgatgaacatagttcaacaatatatcgagataaatgtcaatcaatatattgattatttctaggaaacacatgccggtatgagggcaccattatcgattacatctcatatgtaatctaaaagatggcacctccaacgatgggttgctgccacgacaaggcagggttcatcaaagagaactggctgtatggtagcaattgttgctgctgtaggaaggcagtgaccaatgggttaggcactgctagtggattaagtaactgttgtcgctgttgtaggtacgcagcagagttcgacacagtcagttggttgaatggaagcagctgttgcaagtaggcagcagggtttgccacagctagctgagtcagagctggtacaatctgttgcagcaattgttgttgcaggtatgtaggtgcattacccacaacgagagggctagatgaaagcagttgttgctgttgtaggtaggcggcagggttcaccatggctagttgactgagcgctggcagaaactgttgcaattgttgttgttgttggtatgcagctacgtttgccagagcaagtgggttggatgcaagcacctgctgttgcaagtaggcgacagggttcaccacatctagttggctcagtgctggtaggaactgttgttgctgttgtgttgcgatggtttgtatggttagatgtgccaaggattgttgttgcaattggttaattggttgttgtaagacgctcgccgcaagcgcttgttgtagcctgtaggcttgcacagctaggtgttcgaagcccattgaagtaactggtcggaggaactgtggtataatggcactaggagcaagtgagcattgtggaataatgaacgcatttgttgcgctcacaaaaagggcaagaagcgcaaggagggctaatatcttggtagccattgttgttaagtcgttgctaggtagcttcgcttggtgtgtttctgaatgctcaaaata

SEQ ID NO: 56160 - DNA, 252 bp, Zea mays
  Clone ID: MRT4577_151209C.1
atcttttttttttgtggctggagggtattgttgtttagagggaagaaactacaaaatgcaattttttcccccacccttttaaagcaaaacatccaaagaaaactatgcggtgggttaaaatgctcagggaaggataatttttcccataaacctccatatggcaacattgttgttcaagattttttatgagaggggaccctgcaaaatattgtggccatgcaaattcaaaatggaggaaaaaggcaatttaaa

SEQ ID NO: 56161 - DNA, 695 bp, Zea mays
  Clone ID: MRT4577_15120C.1
gggtaccattgggtacctcgaggcgggccggagctcaccatcagcgatccttctctcttgagtgtcctcccatctcatccaatccatccccgccaccacaggcaaaggcaacccaaaaggagccgccatgggctcccgctacgaggtggaggtgacggtggggtcggcgagcaacctgaagaacgtcaactggcgcaacggcgacctccggccctacgccgtgctgtgggtggacgacgggcccaagtgctccacccgcgtcgaccccgacaacggcgaggaccccgtgtgggacgagaaggtggtggtccccgtcctacccgcctccgccgcgcgcctgggcgacgccgtcctccacatcgacgtcgtccacgccgccggcgacgacgccgacgccggcgtcaagccgctcgtgggctccgcgcgcctcccgctccgagacgtcctcgatgacgccggcggcgtcggcggcgccagggtctcgcgcacgctcaggctgaagcggccctcgggccgcccgcagggacggctcgagacccgcatcgccgtccgcgaggccgcgccgccgccgcgctactacgacccgaacccgtacccggcgcccgcgtacgggaacccccgcgccgccgccgcccgcgacccgtaatacgcggcgccgcccgccttccccgggcatcccccataccccccccccc

SEQ ID NO: 56162 - DNA, 1302 bp, Zea mays
  Clone ID: MRT4577_151210C.1
ttccccccccccttttttttggggtgccccccggttttttcccccccccccggtttttaaaacgcgccccccttttttttttttttgtccccccaaaaaaaaaaattatttcccccccccgcggaagtaaaatttttttttttttaaaagggccccccccttttttttttttttttttcttttttttttttttttaaaaacttctttttttttttttttttttttttttttttttttttttttttttttttttttttttttttttttttttttttttttttttttttttttttttttttttttttttttttttttttttttttttttttttttttcgagataaatctcaatcaatatattgattatttttaggaaacacatgccgctatgagggcaccattatcgagtacatctcatatgtaatctaaaagatggcaccaccaacgatgggttgctgccacgacaaggcagggttcatcaaagagaactggttgtatggcagcaattgttgctgctgtaggaaggcagcgaccaatgggttagccaccgctagtggattaagtaactgttgtcgctgttgtaggtacgcagcagagttcgacacagtcagttggttgaatggaagtagttgttgcaagtaggcagcagggtttgccacagctagctgagtaagagctggtacaatttgttgcagcaactgttgttgcaacaactgttgttgcaggtatgtaggtgcattgcccatagcgagcgggctagatgaaagaagttgttgctgttgtaggtaggcgatagggttcaccatggctagttgactgagcgctggcagaaactgttgcaactgttgttgttgttggtatgcagctacgtttgccaaagcaagtgggttggatgcaagcagctgttgttgcaagtaggcgatagggttcaccacggctaggtggctcagtgcttgttgctgctgcgttgcgatggtttgtatggttagatgtgctaaggattgttgttgtaattgggcaattggttgttctaagacgctcgccgcaagcgcttgttgtagcctataggcttgcacagctgggtgttcgaagcccattgaagtaactggagggaggaactgtggaataatggcactcggagcaagtgagcattgtggaataatgaacgcatttgttgcactcacaaaaagggcaagaagcgcaaggagggataatgtcttggaagccattgttgttaggtcgttgctagtgcgcttcgctaggtgtgtttctgaatgctcaaaatattatggtgatcccggcc

SEQ ID NO: 56163 - DNA, 448 bp, Zea mays
  Clone ID: MRT4577_151211C.1
cttcacacggccgaagtagaacccgttatacatctcaaaactctcacgggggaggccacaggccgtcataccccgtatgtcccgccgagcctgtcattccagacgcgtatgcgctgctctagctgcaacacccggacgagcgccacatgtcagacgcaatggcattctgcacgtgctcatgtgtgcgagcagctgaactaccctgtggaagcggccggaggggactatccgcgaggatgtacagcatcacatcgcctaatacagcagcgggacgcaaaaacaccaagagaagccttgctgcaatacaaggtatacaagggacaggtacagaatacgcaaggaggtcaacagctattcctacacagttattcggaggaagccctagctctggagctggctgctctggagaaaatgcagacatacagggaggccggtgcatataacgctg

SEQ ID NO: 56164 - DNA, 3378 bp, Zea mays
  unsure (1)..(3378): unsure at all n locations
  Clone ID: MRT4577_151212C.1
tgaagtcccggccgcagcagccggcgcctgccccggcccagccgaggcgccgcgtccgggttctcttcgaggatcctgacgccacggactcggactccgacgacgaggaggccggcgcctctacgtgcccggcgaaggccaagcgcttctccttcgagacgttcgtcggcaaggtcccagccaggccggtccttccggcggccgctgtcgccgcgtgcgccagtggcggggccccggagagctaccgcggagtgaggctccgcaagtggggcaagtgggcggcggagatccgcaacccgttcacgggcaagaggcagtggcttggcaccttcgacacggccggcgcggcctccgcagcctacctatccgcttcccggagcttcgccgacgagaagcgccgccgccgcgggcagcctgtgccctcttcctcaccagttccttcggcaagcgccaccccgacggcctcctcttcgtcgtccacctcgactgctccgttcgcgcacccgtcgccgtcgtctgttcttggacccgccaccaaggaggcgccgctgaacccgcagtccccggagctggtcgcgacaccaacgctcgtcctgccgtccgatgagtccgcggagctgccggacgacccggagttctaccaggaccttctccgcggcctgcagctgccagacatcagcccgatggacttccgtgccgggcttgacgctctggacgtctccgatgcgcccttctgcctggacgatgagcaggacctgctgcttggggacttcggggacgaggaactggagatcgacctcgacctcgacgatatcaacgacgtcttcccggagatgcctggctgcgacctcggccgcggcatggacgatttcctgcaaaccgttgatttctgcgtgtgaattaagtcagtgccttaatatgttagggttgatggtttgataagcgtgcttggaaggggggattgtcttgggtttttccctcgggcatttcagtctgctcgggcccaagatttctcttcttcccaaacagcacattagcttccggagaggtaattttgataggttacattatgttaagttatagtggttgtgttttttctgttatttggtaatgcttgtcaagacattatgaacaagtcattgagctgttactattggcgacgactacaaagaattcggcgaccacgccgtctgccttctgcgcctccatttcggcctctgtcccttgcaagttcaatctcacctccaaccatgggtaaagagaagtcccacatcaacattgtggttattggccacgttgactctggcaagtcgaccaccacaggacacctgatctacaagcttggaggcattgacaagcgtgtgatcgagaggtttgagaaggaggctgctgaaatgaacaagcggtccttcaagtacgcatgggtgctcgacaagctcaaggctgagcgtgagagaggtatcaccattgatatcgctctgtggaagtttgagaccaccaagtactactgcacggtcattgatgcccctggacaccgtgacttcatcaagaacatgatcactggtacctcccaggctgactgtgctgtccttatcattgactccaccactggtggttttgaggctggtatctccaaggatggccagacccgtgaacatgctctccttgcgttcacccttggagtgaagcagatgatttgctgctgcaacaagatggatgcaaccactccgaaatactccaaggcacgttatgatgagattgtgaaggaagtctcatcctacctcaagaaagttgggtacaaccctgataagattgccttcgttcccatttctggttttgagggtgacaacatgattgagaggtccaccaaccttgactggtacaaaggcccaaccctgcttgaggctcttgaccagatcaccgagcccaagaggccttcggacaagcccctgcgtctgcccctccaggatgtgtacaagattggtggtattggaactgtaccggttggtcgtgtggagactggtgtcatcaagcctggtatggtagtcacctttggtccaactggcctgactactgaggtgaagtctgttgagatgcaccacgaggcgcttcaggaggctcttccgggcgacaatgttggcttcaacgtgaagaacgttgctgtcaaggatctcaagcgtgggttcgtggcctccaactccaaggatgaccctgccaaggaggctgccagcttcacctcccaggtcatcatcatgaaccaccctgggcagattggcaacggctatgccccagtgctggactgccacacctcccacatcgccgtcaagtttgctgagctcattaccaagatcgacaggcgatctggcaaggagctcgagaaggagcccaagttcctgaagaacggtgatgctggtatggtgaagatgattcccaccaagcctatggtggtggagacattctccgcgtatcctcccctgggtaggtttgccgtccgcgacatgaggcagacggttgctgttggagtcatcaagagtgtggagaagaaggacccaaccggcgccaaggtgaccaaggcggccgccaagaagaaatgatgcgatcccgtgtctgcttttccagtgcctggataacttgccactaaagttgtgtatgcggttgttgctgttattgcgtggactgtttgctgcggtgtctcctgtttgtttgggtagcgcagcgtcggcctcttcaggtgtctgttgtctgttgtctttactatcagtaatgctcctgagacttgtatttctccttttggcgccgctaaatggaattttcgaacaatgattttcgtgttaaaaaaaaaaaaaaaaaaaaaaaaaaaaaaaaaacagggcccgcccaataaaaaaaaaaaaaaaaaaccctctttgttttttttgggggacctgttggttgcgggttctcttgtttgttggggacccccacccccccccttttaaggggccggtggcttgtaatttttcctataaaaaatgccccggaaacttttttttttcttttggcccccgttaatgggattttccaaccaatgtttttcgggttaaaaaaaaaaaaaaaaaattcgcttatagtcccgccggcccccctaaaaaaaaaaaaaaaaaaaaaaatttttttttttggggggccctgttggtgtgggggctctctttttgttgtggggagaccaccctccccccctttcaaggggggcgggtgntttccggcctccactaaacaaaaccctcccgaaactttttttttttttttttgggccccctttattgtagttttttccaacacttgtttttgttttaaaaaaaaaaaaaaataaattatctgctcccgccccccccctct

SEQ ID NO: 56165 - DNA, 430 bp, Zea mays
  unsure (1)..(430): unsure at all n locations
  Clone ID: MRT4577_151213C.1
ttgggtacctcgaggccggccggggncaagccaggccactctaccaccgcacgctcaactcaaacccccgtcccgaacgcagaagaccggcggcagcggcggggtgtgtgtggactggactgtaaccaattgccatcaatccaggcatccatccatccacccgccccgctgacggcggcaatggcccggctcgtgctctccgagtgctgcggcctcgcgccgctccgccgcctgcgcgccggccggggcgccattgcggcgccgtcaccccccgcgctctccgcagcgccgcgccgccgncccgcgnccgcgnccatccaccgcgactgggcgctccgcgnctccgcgcccacccgcctcgcctccgccgccgncgaggaggacaagacgagcgccgcgccggggcaggaggagggcgccgcgggcgggg

SEQ ID NO: 56166 - DNA, 305 bp, Zea mays
  Clone ID: MRT4577_151214C.1
caagttgagatttcgagtaaggatggcaaaaaggtgcccatgaagttggaggtctcatgtggagttcaaactacatcatccattgtggaacaagaagtgcactcatggtttgttggggtagagtcatggctgcagcaacctcagccaaggctggcttctcatcaccatcaaccaatctcagcacgacaagaagcggctacaatgtataagctacagccagaagaggatcacattgtgtgctcaaagcctgacataacaagttcaggtcccatcaaagtgcaagacatacatgggcctttcaaagc

SEQ ID NO: 56167 - DNA, 167 bp, Zea mays
  Clone ID: MRT4577_151215C.1
tcttgttcacactgatcctggatggcaccgatactcgtgctctgtggtactgtatgctgccagacatttaccacctaaagcctgagaatgctgccaggagttccaggaactacgaccacggtagctggtaaccatgcattggaggttccacgccgcgcttcacttgt

SEQ ID NO: 56168 - DNA, 569 bp, Zea mays
  Clone ID: MRT4577_151216C.1
aaaaaaaaaaaaaaaaaaaaaaaaaaaagaaaaaaaaaaaaaaaaaaaaaaaaaaaaaaaaaaaaaaaaaaagaaaaaaaaaaaaaagggggggagtgtataggagcacaaatttagtgtgccgtggatttggcaacagaatactttggtttatgggcttgggctaacccaatttcaatggcctggtcggtggggggggccttttttggggtaccccttttgcctccccgcccgttgcggcttggcttttttttctttttgggccccctgactgtttattggggggggccttttcccgctgcctttttgggagaagccgggggttgtcccttgtatgggggccggcccagtttccgttttctggcgggggggggtgtggatttgccccccgccttcccccttccttcgggggccctcccctgggggcttttgggtggcccctcctttttgggttttacagggggggggggtggcggggttcacccttaaggggggggttttttttgtgggtctcccttatgagggcctttttttcggtttgccccctttttttttcggccggggggggg

SEQ ID NO: 56169 - DNA, 628 bp, Zea mays
  Clone ID: MRT4577_151217C.1
tcttgatcattcattttatcaaactcatcaatgcagacaacaccacgatcagcaagaaccatggcacagcttcaagccttctttccccagtctcttgtcagaagtcacagcagcagtcaatccaacaccagatgaacctctgccagttgttgatatagccaaaggagcaatgttcatgacagctcttaggagctgggacttggcaactgaaggatctcccgccatcatcatgtttatatctcctctcaagtgagttccattttttagattcttttcaacaccaccaagcatcaatagtactatggccatctatggataaagaaggcagtagtactactcatgcttggtggtgttgaaaagaatctaaaaaatggaactcacttgagaggagatataaacatgatgatggtgggagatccttcagttgccaagtcccagctcctaagagctgtcatgaacattgctcctttggctatatcaacaactggcagaggttcatctggcgttggattgactgctgctgtgacttctgatcaagagactggggaaagaaggcttgaagctggtgccatggttcttgctgatcgtggtgtcgtctgcattgatgagtttgataaaatgaatgatc

SEQ ID NO: 56170 - DNA, 2820 bp, Zea mays
  Clone ID: MRT4577_151218C.1
atcgtcctgtcgatgccggccgggaaatcaaatccgcccgcctgccgcagcccccattctcgcgccccgccttcttcctccagcagccccgctcgttcttccggcctcgcgttccgtctccgaagccgcaggcagccatggaaatcaacgaggaggcaatggcggcgcataagcgcgccttcctcgacttcctcgaccaagacgtcgggaagggggtttacatgcaggccgtccgcgacatggtccagaacaagcgccaccgcctcatcatcggcatggacgacctccgcaatcacaatctcgatctcgcccgcagggtgatccggacccccggggagtatatgcagccggcgtcggacgcggtgtcggaggtggcgaggaacctggatcccaagtttttgaaggaaggggagcgcgtgatggtgggcttctcgggtccgttcgggttccacagggtcacgcccagggatctcatgtcctccttcatcggcaccatggtctgcgttgagggcatcgtcaccaaatgctcgttggttaggccaaaagttgttaagagtgtccacttctgccctgtgactggggactttctctcgcgtgaatacagggacatcacttcttttgtaggcttgcctactggctcggtttatccaacaagggatgacaatggtaacttgttggttaccgagtatggaatgtgtgaatacaaggatcaccagacattgtccatgcaagaagtgcctgaaaattctgcacctggacagctcccaagaactgtcgatgttattgtagaagatgatcttgtagattgttgcaaacctggcgaccgtgtctcaattgtcggtgtgtacaaggctctaccagggaaaagcaagggaagtgttagtggtgtcttcagaactgtccttatcgcaaataatgtgtcgcttcttaacaaagaggcaaatgcacctgtctacactcgggaagatctgaagcggatgaaagaaatatcaaggagaaatgacacctttgacttactgggaaattctcttgctccatccatatatggtcatctatggataaagaaggcagtagtactgttgatgctaggtggtgtcgagaagaatctaaaaaatggaactcacttgagaggagatataaacatgatgatggtgggagatccttcagttgccaagtcccagctcctaagagctgtcatgaacattgcccctttggctatctcaacaactggcaggggttcatctggtgttggtttgactgctgctgtgacttctgatcaagagactggggagcgaaggcttgaagctggtgccatggttcttgctgatcgtggtgttgtctgcattgatgagtttgataaaatgaatgatcaagatcgagttgctattcatgaagttatggaacagcaaactgtaaccattgcaaaggcaggaatacatgcctcactaaatgcaagatgtagtgtaattgctgcagcaaatccaatatatggaacttatgatcgttcattgacaccaacaaagaatatcgggcttccggattcactgctttcccgttttgatttactttttattgttcttgatcaaatggaccctgagattgaccggcaaatctcagaacatgttgcccgaatgcatagatattgcactgacgatggaggagcaaggtctcttgataaagagggatatgctgaagaagatgatggtgatgctaatgcagccatttttgtcaagtatgatagaatgctccatggtcaggatagaagaagaggaaagaaatccaagcaggacaggctaactgtcaaatttctgaagaaatatattcattatgcgaagaaccttattcaaccaaggctcactgatgaggcatctgatcatattgcaacctcatatgctgagctcagggatggtagtgcaaatgcaaagtccggtggaggtacacttccaattacagcaaggacactggaaaccataattcgtctatcgacagctcatgccaagatgaaactgaggcatgaggttctgaaatccgatgttgaggctgcattgcaagttctaaattttgcaatataccacaaggaattgactgagatggaagagagagaacagagagaaatggagatgaaacagcaagctgatcatgatgcaggtgcaaccggtggcactgtggatgggcatggaagctctggcaatgatccaatggatgtggatgtaggatcaaatgatcagaatgtttctgcagagagaattgaagcatttgaagcacttctgggtcagcatgtgttggcaaaccatatagatcaaatgtcaattgatgaaatcgagcagatggttaatagggagtcaactgcaccttacaccagaagccaagtagagtttattttggagaggatgcaagatgcaaacagggtaatgatacgagatggtgttgttcgaatcatataactacctgtctaccaggacgtttacctgtggatcccatggtcatgctgtgtcatggtgcctgtctctgtctgtaaccaacttatatgtcgaagtatttgtttcttagtgtttgtccacaaaggattgaggcaatcattgccccccttggtacttttagttcatgtgatgtattgcttacttacctgacctagtgatatctagtactcagtcacgtctggttgtgttgagttaatttgcaaaagttgcattctgacgagtagtaaaattcacatgtgctgacctgggagtactaggaaaaaaaaaaaagcttcggtctatgattctctaactccgagagtcgaatctctaataaagtgattctgagtggttttctagt

SEQ ID NO: 56171 - DNA, 425 bp, Zea mays
  Clone ID: MRT4577_151219C.1
gtacgtaagctcggaattcggctcgagttcttgccgatcgtttgtatctggcctccacgggccagacggagggggggtttattgcaaagttcggccgcacacacacacagctgaggtcgccggcatgtatgtggtcactgttggaatgcccgtggtctggatgccttctgtgctgtatgtactcggagcccatggcggacgctcgctgagagggggcaggctgggtgctaggtaccaccaggactcggattagagtgaacgctgaggcggggtcgtgagtacctcagcgcttggcaacgaggaccacgaccctgctagtggcgggtactgctaccagaccagaaagcctcattctgcgggccccacaatgacgggcgaagccatgtcatcgttgaagggcattaagctctggcggagcttcacct

SEQ ID NO: 56172 - DNA, 576 bp, Zea mays
  Clone ID: MRT4577_15121C.1
ctcacacaagctacatagtctgttgaataaatgcaaagtatacaaagaatggtatgcagaattaacactacaattaaattcatttctaagtactaccattttccaaaggaaactaagtttatgtacagtgtggtcctatggagaaccttcactatcccttttctccaatagttttcaatcgatcatcatgcaataacttagcagctaataagatctattttgtgtcatgcaaaatgggaaccaacatcatgccaagataatgtatagttacttgccaagagctagagacatcaatgctctttttggtccaccagacaaatccatggcgtcaaatactccggtagattcatcgaccatatctccacttctaactgtgacaaatgcagcctcttcactagctttgtttggcctctgaaaccggagttcaagaggaaagtcactcttattatggatcctaaccaaaggttgaactgaaagagataagccttcctcagaactatgagacaccttgaccacaataaatggtccagaaaaggttgtcaggtctttgactggtgacacacgggttctccatgc

SEQ ID NO: 56173 - DNA, 114 bp, Zea mays
  unsure (1)..(114): unsure at all n locations
  Clone ID: MRT4577_151220C.1
cagctccngccangcaaagcagcngggngtccattgcantgcattgtattgnngnatttgctctgncttgcnctttcgcttgcttcanggaaagcttgagctagntcgangtag

SEQ ID NO: 56174 - DNA, 1974 bp, Zea mays
  Clone ID: MRT4577_151221C.1
gggggcattgcaaatgtaacataccaacaccacaaactttttggcaggtgcaactgtagccaacaattggagaaacaaccacgccgtggtaaaacgatgttagaatatggaataataaatacatttaattattatcatccacgactacgagtgtatgttctgaacatttccaccccgagatcacacaaataatcccctctattcacacgcagacgagggcattcagacaacattttcaatgcaagtttttttttcttcagcccaacatgtcttagcctcgtctaaaggatctgccactcttctgcttcaccagagccatcaaggtcgtcgtcattggccatgctactgccagaacaacccagtccatcatcctgtttatacatttgtttcgatggctcgattgactgcacaacagtaaagagtggcgcgccattggccttctccgccaactcagaggcccgagaacagaaatcatcaaagtcgtctttgtcacgacagtaaaaaccaatagccagggagggatctatttgttccagagccaaggctcggacaacgctgcagtggtatgaggaagtgtctgcctccaagttatccagtgcaatgtcaaccgtcatctgaacttcatggggatctaggtagagagccctatcatcctgtaccccagcaatgtatgttgatgtaccaggttttccacctaaaatgcccaagctttgtgggaacataaatgtctcctttagtaatgggatgtaccttgggttaattttgtcaaggccaagaaccagaggaaatcaacaaaagaataggtgaccatgtagatggtcctttgttgaaatcagagcaaagctgagcagcaacatcaatgcaaacaactggagctccacctctttcgccatcttcatcacccgaaaccacatacagcgccatagggaaattttccttcccatctacagcatcagcttgctctctatttgtgcgaataagggtctgccatgcccggcacatagcatatggacccaaccatgatccagcagccagaccataattccttccagcttgaagtaaattgtgaatagagaaagcacaagcttcagagtcaccaaataggtgtaagacccgtatataatctgggtcgtatggcttctctgatggctttctccaagatcttccaaggtggtgaaaaatcagcgcctgagcaaccagcatttgactgcttctaaccatgcatccccagttcacatcactagttagcttggaatcagatattgcatcaaagcctttccggtaagtgatccatatcctggaagagaaatcttccagaaacgcagcatgcccgctgtcggactccgagtcgccagactcctcttcttcaggcgacaccttatagcatttaccaaggaaccacacgtcactggaggtcaagaccctgccgcaccccagaagtcgccacatggagccgctgcccacgaacctcctcaggatcctggataaaccataggaccctgaggacgactttgtcgacctggcgtcgcacgccggcgacgaggagccctgctgctgcccctcgaatatggcaaaagggggagagaagacgccggacaggatggaggccttgggctgcctggagccgctgtcttccttgcgatcggagccagcggaggaagaggcaacggcggcagccgctaggacggtcacggcagagtcctggcgcagagaatcgagtggcggcacaggtgattctcccctctcaggcaagctcgtcatcacctaacgccgcatgtgtgtgaaggacacccaggatgtccccccggcgatccagtcctcggcgagatgaggccggcgtggggcggcgagggatcggggcgcacggcgggaggggaggggaggtggcgtggcggaggcggaggggaaggaaaagccggagaggaacaagagagagacgtacgggcggatcgactcgagctgggccatggcgtt

SEQ ID NO: 56175 - DNA, 817 bp, Zea mays
  Clone ID: MRT4577_151222C.1
acatttatgttcccacaaagcttgggcattttagggtggaaaacctggtacatcaacatacattgctggggtacaggatgatagggctctctacctagatccccatgaagttcagatgacggttgacattgcactggataacttggaggcagacacttcctcataccactgcaggtatgtgtgtcgttgtggaatgaaatctgatgaatggaactgcagattcgttgtcaatgcatgctcaaatgatgggctctgattcatgtgtctggacttgtacagcgttgtccgagccttggctctggaacaaatagatccctccctggctattggtttttactgtcgtgacaaagacgactttgatgatttctgttctcgggcctctgagttggcggagaaggccaatggcgcgccactctttactgttgtgcagtcaatcgagccatcgaaacaaatgtataaacaggatgatggactgggttgttctggcagtagcatggccaatgacgacgaccttgatggctctggtgaagcagaagagtggcagatcctttagacgaggctaagacatgttgggctgaagaaaaaaaaaacttgcattgaaaatgttgtctgaatgccctcgtctgcgtgtgaatagatgggattatttgtgtgatctcggggtgtccttgggttccaacgtcccaggtggaaatgttcagaacatacactcgtagtcgtggatgataataattaaatgtatttattattgcttattctagaaaaaaaaaaaaaaaaaaaaaaaaaaaaagcttgacctgcccgggcggccgctcga

SEQ ID NO: 56176 - DNA, 121 bp, Zea mays
  Clone ID: MRT4577_151223C.1
atgatttctttgaacatcagtcacttctcttttcaccttgtgttcaacatgaagggttcgtcttccatgtagatgaatgcaagcccttcatgtggcatacccggtggaaagataagtgact

SEQ ID NO: 56177 - DNA, 446 bp, Zea mays
  Clone ID: MRT4577_151224C.1
gttaaaatgtgttagaggttaagaagaatcctaactggatatgtccagtttgccgcggcatctgtaattgcagtctatgcagaactaagaaaggatggttccctactgggtctgcgtataggaaggcgatcggacttgggtacaaatctgtggcacactttctaattgcaacacatcgagcatcatcagtcaattcaagctcagtcgacaataacaagctgccgtctgctaaatctgaaacctcgtgcatttctgaccatgccaatgagagcccagaggatggagaaacgaccagcaaagctaagcagaacaaagcaactcgccgccgagtgaggaagagttctgatggcgacaacgatagcagaagtgggtccgtggtgacatctgactgccaggatgatcaagccaacaaggatgctgggtgtgtgactccgtcgactaagcca

SEQ ID NO: 56178 - DNA, 743 bp, Zea mays
  unsure (1)..(743): unsure at all n locations
  Clone ID: MRT4577_151225C.1
ggatctctctgcagcttcacaagcaaactaaaacacagcagctaaaggcacagctctccagcattcatccagaaagaagagaaggaaccaagccaacagccaaccatgatcagcgccaagagggtcgctcatctggctaagaagtggcacaggatggcggcacaacggaggcagcgcctcacctggggcggagcaggcgcggcagcaaagcaagccggcgagagctgcagctccgtggcgagcaagggccactgcgccgtgtacacggccgactgggcgcggttcgaggtgcccctggcgtgcctcagcactctggtcttcagggagctcctggaaatgtcgcaggaggagttcggcttctccggcggcgatggcagtggcaggatcacgctgccctgcgacacggcggtcatggagtacgccatgtgcttgctcaggaggagcgcctctgctgagctagagcaggcgttccttagcaccgtggcgggcaacgtcgtgcctgtacgccagccgcgtggcgccgtgcgtaggagcctgccagcgggttgctgtttagtgctgttcagtgtagtgtaggtagtagataaatattattcagaaccttctgatcctgcaaatgatcaaggaaggtgttagtgttctgtacgtatgtatgatgctggatataattggcttatgagaattgtgaggactacttacattacgtggcaacaaagtttcttctgcagaanaaaaaannaaaa

SEQ ID NO: 56179 - DNA, 1732 bp, Zea mays
  Clone ID: MRT4577_151227C.1
cattgggacccattgggtacctcgaggccggccgggctcttgttcgttcaaataaagaagaacaaaacacccggccagcacacagaatgacaggaagcagcaaacctttcggtttctcgagcgcaatgcctctcgctgcagtgctccttcccctcctcgtcctcggcgcgtcgtcggtgtgtcaaggtcaaggcgctgcgagccacaacatcacggccatcctggcggcgtacccggagttcaccgacttcagcgctgccctggtcagcaccggcgccgcggcggagatcgaccgccgcagcaccgtcaccgtcctcgccgtcgacaacgccgtcatggcgcggctaaaggcgcagaagctgcagctcgacgacctgcagcgcgtgatctacctccacgtcctcctggactacttcgacgccgccaagctaggcagcatccagggcggtttcgcccaggccgctagcctctaccaggcctccggcaaggcgcaggggagcgacgggatcgtcaacatcaccgtgttccccgacggccgcgtggcggcgttcacgccgtcgggcccctccaacaggttgccgaccgccttctaccaacgatccatcaaggaacaaccgtactacatcgccgtcctgcaggtgagggacctgatctggtctccggcgccggcggacggggtgcaggctccaccgcccgcgccgcagcccgacgcggcgccggggttgacggatctgctgtccaagaacggctgcgggggcttcgccagcctcctcgccgcgacggccgacgcagtcaccaagtacgacagcagcgccgccgggctcaccgtcttctgcccggccgacgaggcggtggaggccttcaactccaccttcaagaacctcaccgccgacgcccagctcgcgctcctgctgtaccacggcgtggcggaacactactccgcgcagtctctcaaggcgatcaatggggacgtaagcacgcttgcctccgacggatccaagaacaacaacgggtacaacctaacgatacgtgccgacggggacacagtgaaaatctcgtctgcatctgccagcgccgccacggtgaccaagacgctgctcgacaaggcgccgctctccgtctacctcatcgacgcggtgctcctgccaaggcagcagtctaacgacgaccagggacacactgcgcccgcccctgcgccggcctcctcgcctgcacatgcacctacacctgcccttgcgccggtctcgccgtcgcctgcccctgtaccggtctcgccgtcgccgtcgcctgcacatgcacccacacccccacttgcccctgctccggtgactgcacctgcgcccaggcgtcgcccagcgccatcgccagagcacactaccccagctccttcgccggacgcggacggccaaccgcctgcagatcagaagaacaacgcagcaagggacactgcatcttggactatcggcgcggcgctggcgatcgtgtgcctcttgtcgtgaagggtttaagcttagatagattgacgccgattgggatccgtcatctcgccgccaataccagtgtacactgaagacaatgtttatgggcatgcattggccaaaataatattattctgcttccgcctgctcaaaaagccgacgcgtccgcggacgcgtgggccgggtcttccccggaaaaaaaaaaaaaaaaaaaaaaaaaaaaaaaaaaaaaaaaaaaaaaaaaaaaaaaccaa

SEQ ID NO: 56180 - DNA, 1904 bp, Zea mays
  Clone ID: MRT4577_151228C.1
cattgggtacctcgaggccggccgggagcccatatcaattgttctcaccctcgccctcttcctcgtatccactcgcgaaaatagccaaagagcacattcccttacctgccatggcgatccatccccggaccaccggcggtcgcaggcagccgctgccgctacccctgaagggggccctcctagccgccatcgctgtcgcgacggctctctccgtcctgttcgtcctgtccttcacggacacgctgaccttcacggacacgctgccctacctggggttccggccccgggacgtcgacaagagggacggcaaccggaggtacctctactggggaagccgcgtagactgccccggcaagcactgcggctcctgcgcgggcctcgggcaccaggagtccagcctccgctgcgccctcgaggaggccctcttcctcgacagggtgcttgtcatgcctgcaaagatgtgtctcagttcagtgcacaatacaaagggggtccttcaatcaagcaatgcaacttcacaacaaaggtgggaaacaggttcttgtgcaatggaatccttatacgatattgacctcatatcaagaaccgtacctgttattttggataatccacggtcatggtacgagataatatcaagaagtacaaaactcggtgaggatggcttggtggtgcatgtgcaaggggttagcagagctgaactcaaacaaaattcaaattactctggtgctctcctcataaaccgcacagcaagtcctcttgcttggtttatggagtgcaaggaccggaccaagcggagttctgtgatgttgccatacacttttctgccaacaatggcaacaaggaaactgagggatgcagcaaacaagatgaaagagatacttggtgactatgatgctattcatgtgagacgaggtgacctactgaagaataggaaagatagatttggagttgagcgaagtcttcatcctcatcttgacagagatactcgccctgagtttatcaagaaaagaatcgcaaagtggattcgaccaggtcacactcttttcatttcctcaaatgaaaggaccccaggcttcttttcatctctatcagacaagtacaggctggcatattcatctaacttcagcagcatattgaatccgataatcaagaacaactatcagctgttcatggtggaaaggttgataatgcaaggtgcgaggacgtttgtgaagacaatgaaagagttcgatgaagatcttgctctctgcgacgatccaaaaaagaataccaaagactggcgggaaccagtttatacagatgactgacgtcagctgttttgtgttcctagatgcttaggtccaactatatcaacgacatcaacaacaaaactttttagccccaagcaagttgggtctaactgtatcactgatcttaaaggtttcacaaagatgaccaattacatgccatttatgagatgacataatagcttgagatggatgcatgaactatatatggcatgacaggagaggaacagagaaagcgaatgttgtctgaagtctaagcttgaacatcagatgtgactgctcttttgttcagctacagtgtccaattggattgttttactttatttgtttaaaaaaaagtttactaggtggtgggagactgtggtgtatgtatagcatgtaactgctgttggaggagctatcaaccggaatactggatgagatacattacttgctgcttctgttgctatttgtacttgtgttaacagcatcagttatactagctctgtcattcctagaaaaagagagaatgtggagcatcttgtcttatttctagtgatgtagaaattcgtgttagcgacacagtgatatatgtaatgtataatccataagctataggatatttagcagggagtgcct

SEQ ID NO: 56181 - DNA, 404 bp, Zea mays
  Clone ID: MRT4577_151229C.1
ataatgttacatttaatgaatcttatttttttttcatttttgtctttatataacttgttctttctttttatttgttgtttttattcttccattctttatggtgaaaaaaaaaagagggggttcagttaatacaacaaaaacacccaggggggtttgtttttatgacaaaaaaaaattttttagttccaagcaagaatggtatcacaacaacttatcggcgggggaggcgaacatttttttggcgacgctttggggggctttcaaaaattcgacaacccccttcacccttgacgtaagggggggggccccacccttgagggggggcacgctgcttataactttagcgagcatcggaacatttttttgagcctcaaacaaccgccatgggtttttgaagggggggc

SEQ ID NO: 56182 - DNA, 1399 bp, Zea mays
  Clone ID: MRT4577_15122C.1
ccggccgggacggcggcgcgtgcgactccccagcatgggaaataaatagatgtcccaattacccatcgagccgtcgtcgtggagcggcaggatttgaaaatctcgcgagaggccctgtccttgtccacttcctccgcttcgccgtcctcaaagcagcggaaggggagaggccagggtgcagcagcaggacccccaacggcaacctccgccacgcaccacggagcaaccaagcagcaggtaaggcaaggcaaggtaagtgacgagacaaagatggtgcaggaggagctgccgcaggcatggtggttcgacagccacaacctcgcgaggccgtcgccatggctgaacagcacgctctcagagctggatgacaagaccaagcaaatgctgaagctgatcgaccaagacgcggactcgttcgcccagcgcgccgaaatgtactacaagaagcggccggtgctggtggacatgctcggcgacctgtaccgcacgcaccgctcgctggcggagcagtacgacctgctgaagcacggcagcggcacacggcacacggtgttcggcctgtcttcctgcacacagagccggtcgtcgacgaacggcaggaccactcctcgctcctcctgctcggcctctacgtacgactcggagtccgaagtggacgaccccgggcaggaagaatacgaggcagagcagctggcgcgtgcggggatggccaagacggagtcgccgccgccgccgccggagcagcagcagcaagaacagcgtgagcaggcggagcagcagatgcgcgcggagatcgagaggctcaaggcgcagaacgcggcgctgcagaaggcggccgaggagagcgcggcggcgctcagggcggagctggccgggaaggacgaggagaagcgggaggtgatcaggcagctggcgtcgtccatggacgtgatgaggcaggagaacctcacgctgcgcgagcacatcagcaggggatcgtcgaagcgttcctctgcgccccgcgcgggagctgcgttcgatctcaggaaggtggccaggggcctcttctccgcgaggctgttcaccgcgcactgcaggcctacgggccccatcgtcgcgctctgagcaggatgccaggatcgtgaagagagacagcgtagatatgcatttgttgtaggcgagtgatgtgcatattataggatggcatcgatcgatattccctccgctgtctgtttctcaggttcaactaaactagagggagcactcgttttttactatgatggcgtagtagtagtagttaactgtagttaaatatttactagtcatatggatgcatgtttgtatgatggcgttaattattgttaagtattattttgtcagttcctcttctgctatgactatgatttttgggcctgggttg

SEQ ID NO: 56183 - DNA, 553 bp, Zea mays
  Clone ID: MRT4577_151230C.1
ccccctcgagttttttttttttttttttttttttttttttttttttttttttttttttttttttttttttttttttttttttttttaaaaaaaaaaacggtttgcaaaaagcaacaatgttaaaaaaaacttggggggccccggaacaaaaataaaaaaactgggccccactaagccatacttggaaacaactagcacccattttttgataaaacaattagacctatttaaacccccccccaattttgaaaacaaaaacgccctgcaaaaattcactggggggggcttaagaactttatggcccgggattgggctgaccctgatggaagcttaccacctagggaaggggggcatgtttttcttaggggggcttttttaaaccccctattcccccaaaagggttaaccaaaggttcggatcccctcttgatgttacccaacttttgggaaatttctgccgtttattgcttttcattttcaagggaatcaaaaaattttggccccgggaccatattgggcccttagaggaacctttgggggccgaacaaacccct

SEQ ID NO: 56184 - DNA, 243 bp, Zea mays
  Clone ID: MRT4577_151231C.1
ccggccgggatccgccggctcccccactcagagaacccagccgccgccgtatcgaactcccaggtaagcagtatagtccaccccagccgccggcatgaatcgcaacccccgcgtgacgatatcccgccggaagtggcgcaaggcgcacttcacggtcccgtcctccgaccgccgcatgctcatgtacacggcgctatcgacggagctccgccacaagcacaatgagtgctgcatcacgatccg

SEQ ID NO: 56185 - DNA, 407 bp, Zea mays
  Clone ID: MRT4577_151232C.1
attcggctcgagggcagattgctatcgaaaaattttacagaatctcgggcactgtgggctgcacggccatgcttctgtttgccttgcgagaagtgaattacgctaggctatgagccctgatgtgaacaaacatactcgaactttgaggccaagctgagttgactcggggcatgctgaaactctgctcgccttgtgttgcggcgtcaaaaacccacacaacatacaaaccagaatgcaacaagcgtaaagcctgggatgcataaagggggagccaactaatattaagtgcgatgccctgagaatcaattttgcaccgggacaagcgggagtaccagctgaactaataaagcggccaattcacgtagagagactcatggccattggtgctccaggggggaaattctttt

SEQ ID NO: 56186 - DNA, 284 bp, Zea mays
  Clone ID: MRT4577_151233C.1
tgttgttattgctgaggagagctaccttgacaaaggcggatttatatggtgtgtcggtggaaacaccagatactcactttgaggacgccgcgagggagatcacgctattggacacacgcttggctgaacaagccttgcagcaaggatccggctgacacaaccaaggattaccgtggcggttatggggaaagatgaagaggaaccacaggaaccagcagtaacacatgtgcagagcgaccacgtccagactgctgaatccagcatgttcaaatgctgatacggct

SEQ ID NO: 56187 - DNA, 231 bp, Zea mays
  Clone ID: MRT4577_151234C.1
cgggaattaacgggccgggcgacctatacgaacgaagctaacttacgcgcgcatgcaacctcatagctcttttatatatacacctacatacaattgggtgaccgtccttctacaaacacgcttactgagaaaaacctccctttacccaacctaatcaacttgcatcacatacatctttctacagctagcttactatcaaataagcccgcacccatcgctcttccttacaaa

SEQ ID NO: 56188 - DNA, 300 bp, Zea mays
  Clone ID: MRT4577_151235C.1
atggggccgaacgccagacgcacagacgtcgtttgtttttctattgctttgccgtcattttctttattagcagtacatggagtatttatagcttgaggacctgaagcaacggactgtacgcatccacttctcctgttcacgatccgtaccacttggccaacgcattggacgcggcaaacgcgcacgttctgaccaagccaacaacggatcacggcattttagtttgcagtttcacgcgttgcacgaaccaagctgttgactgggattaccggacaacgcacgcctttatacacttgcatg

SEQ ID NO: 56189 - DNA, 379 bp, Zea mays
  unsure (1)..(379): unsure at all n locations
  Clone ID: MRT4577_151236C.1
ancacccttttattatcaccccanccaannagcaccaaccggcggggactcatgtgagggaagcggcggggtttttttaaaaacgaaaaccgcccatgggtacaagaaaaagggccaaacacagggggcccgggccaccagggtggtccaggcccccaaattaagccccccccccccgtatttgggaagaggtcacacaattggaaaaaacagtccacttgggcggtgaaaggccatcgaaaggccaacccccccggggaaaaacgaggggctcttaaaagaatacggaaagggccccccaaaaggccccatccaggccccttgcggggggaaatggaaaaaaacaccaccggtcccgggggaaagataaaaaaagaaa

SEQ ID NO: 56190 - DNA, 273 bp, Zea mays
  Clone ID: MRT4577_151237C.1
cggaaaggtaaagatgatcatggcctccaatttacctgatgttcttgacccttcggggctgggttcttgacctttaggccggaacattgaaatttcccttcccaaccagccatcaagaatggaagtttttaaaattcattccacttgtattgcccagcattgggaaattgattattaaacaatcctgaaactatctgaagggttcaatggtgctgatctttcgaacctgttcactgaaactggtatggctgcaattcgtgcagagagagatta

SEQ ID NO: 56191 - DNA, 341 bp, Zea mays
  Clone ID: MRT4577_151238C.1
aaaccgaaccatattaccgttttactaaaaacgcgggccacaataatagggttaaccaacaaaaggatataacggggatacaccgggacaacaaccataaataaagctgggactgtcccattcggccgttgaaggcattacacgaaactgagactacctgatgagtcgccttccttgatctggtgacacgggccaccgttctcagccggataaaccgcactcaatgccgtcgaagcctggattgtcggcacccaagccgtggaacatcttgtgtaacatgggaggcgaaaggacttctaggtgcttaatcttgccatcaaactcggccccctcggatagct

SEQ ID NO: 56192 - DNA, 938 bp, Zea mays
  Clone ID: MRT4577_151239C.1
cttcttttttttttttagcgaggaaggagccagttcattgtattccttgatagtccatacctccagtcattacactccttataacccacaccagacagggctcagtcgaccccacacacatggtgccattacagaacccagttcccattgtggaaacgagagttcgaaatctttgtgcgcatgctccgtctggtcgtaacattccccccttattgcgccgaagcttgaccccaagccggcgccgaaggaaactggcgacgaaggaggtcttcatcttcccatgtagccagagattcaggccactgcgaccacttcaccaatacctgatggtgggggcgaagtccgtgagacaagagccgtcgacgaagaaaagactctggaacccgcaaatgagtgatgtcagatggaacagctgcaatgacctaaacatccctgggcgccgacttcttgagctgtgagacatgaaaaactgggtggaggaagaagacgctggcaagtcgaacttgtaggccacagaaccgattcgagcaatgactttgtagggaccaaagaacctgtgagcaagtttctggttggcccttggcgctagtgaagactgaatatacggctgcaatttgacccaaaccatatcaccctcctggaacctgcgttctgaatgatgcttatcagcttgacgtcgcatacgtgcacgagaacgagctaaatgttgtttgatcagtgctgtcatagcttcgcgatcgcgtagctaggtgtccagatccgaagacgccacaacagtgtctggctggataccgaaatgtcggggctcatagccatagagggcgacaaacgaagaccgtccaatagcagagtgaggcgaagaattataccagaactctgcgagatgtagccaagaaacccacttcgatggacaggcattcacgaagcagcgaagaaag

SEQ ID NO: 56193 - DNA, 229 bp, Zea mays
  Clone ID: MRT4577_15123C.1
agcagggcacattttttagccggaaaagaataactgttatatgaacacccgtgtgaggaaccaattaaccatgggaaataaaaggcactgtatcgagaaacataatggtccacatatacaacaaggcgatttttaaattgtggccgagcctgaaataacgtgtgaagatattatgcaccgaggcctggttgctacccacacaaggccattggtgcacaaaatactacaa

SEQ ID NO: 56194 - DNA, 399 bp, Zea mays
  Clone ID: MRT4577_151240C.1
gcggccgggccgacgggctcaagccacagggcttgctgatcgtgagggactccgcgagacgctataattgagctggagagcatgacccgatgcttgcagtgtgaggggtggatgacctacaccacaggcaacgagggcctgctctgcttctagaattctttgaggagaggccaaagaattatacgcttgctcgcgtacttgttttaaggaagaactagctccacgtctgagagaaatcagaggcagtatggcttctatatatgcttatgcctgttgttggcgctgaaaggaccataacctcttcggcgtatactgtatatcattgcatctgatgtttctgacgaatgatgcagcttatgttttttgacaatgttttcgtatgtgagcgctggaaagcac

SEQ ID NO: 56195 - DNA, 324 bp, Zea mays
  Clone ID: MRT4577_151241C.1
cctcccactcgtccgcccactcttattttttttcgttttcttactcgtgggcaagcccagaactattctcctggttgccttaccctcacttaaacaactaaatacaatccttccatctgaacggttttatctgttggcccatttcctctggactaagaatgcaatacacacccactgtcaatgtctgctgccatcacatttctgtactccaagtatgcaactaatgagttcattggctcttatatacactgcctacattatatttagagcttattatgtgatggctttcactgtctttaacatttcgattcctgctcattaatg

SEQ ID NO: 56196 - DNA, 2511 bp, Zea mays
  Clone ID: MRT4577_151242C.1
tacaaactatcagttgtctgaagcatgtatcggtgctctcataaagttgggcaaggatcgtccaaactgcaagcttgacatggttaaagctggtatcattgagcatgcacttgatatgattcttgatgttcctgtatctgttagttcatccattgctgaattgcttcgcattttgacaaacaacagtggcattgctaaaagttctgctgctgcaaaaatggtggagccacttttcttgcttttacgtcgccctgatgttactatgtgggatcagcacagtgccttgcaagcactcgtaaatattttggagaaacctcagagtctagcagcattgaagttgactcccagtcaaataattgagcctttaatatcatttcttgagtctccctctcaagcaattcagcaacttggcactgaggtgctctcacatcttctagaacaggaacattttcaacaggatatcactacaaaaaatgcagttgttcctctggtgcagcttgctggtattggaatcttgagcttacaacaaactgcagttaaagcacttgaaaacatctcacagagttggcccaaggcagtagccgatgcaggtggaatttttgaactttcaaaggtaattgtccaggatgatcctcagccaagtcaagcattatgggaatctgcagcacttgtgttatgcaatgttctgcgttataattctgacaactatgtcaaagtctcaatggctgtacttgtgagattgctgaactccaccatggagagtaccgtcacgatagctctcagtgctctacttgttcaagagaaaagtagctcacgctgtgctgtggccatggctgaggctggggcagtacgggcactcttggagctcctgaagagccatcgatgtgaggaatctgcagcaagattgcttgaagccctgataaacaattcaagggtccgtgaaacaaaagttgccaagtatgctattgctccactggcacagtacctgttagatcctcaatctaagaaccagtcagcaaagtttctggttactcttgcactaggtgacattttccagcatgaagcacttgcaagggcaagtgactctgtgtctgcctgccgtgctcttgtaagcctacttgaggaccagcctacggatgacatgacaacagttgctatttgtgcactgcaaagcttagtgatgcacagcaggacaaataggcgtgctgttgctgaagctgggggcattttggttgtgcaagaattgcttctttcaccaaatgtggatatttcaggacaggctgcccttctaatgaagtacctattttcaaatcatacgctgcaagaatacgtgtcgaatgagcttattcgatctcttactgctgccttagagagagagctgctctctacgtcaactatcaatgaagttattctgaagaccatatatgtgatattcagcaacttcaaaaaggttcggttttcagaggccgcaaccttgtgcataccacacctggtttgtgctttgaaggatggaaatgaggctgcccaagagagcgtgcttgacaccctttgcttgcttaaagaatcttggccgcaaatgaatgaagacatcgctaaagcccagtccctgatttcagctgaagccatacctgtactacaaatgcttatgaagacatgtcctcccagttttcacgagagagccgatagtttgcttcattgcttgcctggttgcttgacagtgaccatcattcgtgggaataatctgaaacagacaatggggggtacaaatgcattttgttgcctgcaaataggaaatggtcctccaaggcaaactaaggtggtaaaccacagcatgtgcccagcttggaacgagggtttcacttggttatttgacgtggcccctaaagggcagaagctctacatcatatgcaaaagcaaaaatacgtttggaaagtcaacccttggaagagtgaccatccagatcgacaaggttgtcaccgagggtgtatacagcgggttcttcagcctcagccacgacggaggtaaggacggctcaaggaccctagagatagagatcgtatggtccaataggccatccaacgactgtatgtagcgtacggatgatttacctgacgccaattcttgtactcttggcttccatgtaaatcagccccccccataatcatccgaattcatttatttgtacgtagaaagttaagacacttagataactcgcgccatcattcaattattgaggtcatttccgggattgtggccctgctgctgtaaactgattttgcacccgggtattttttttttgtacaggtgaatttatttcatgtagttatagcttagtgtagattggtggtgagtacggacaagccctagtgacagtaacattgggtgtgatgtgtggcgtgatatttgctcccgtgggtgtgtttccggcacttgtagcctcaggatacacatggctgagcttggcactgttctatttgtcaggcatgtttgtttacctgtttggttctggct

SEQ ID NO: 56197 - DNA, 507 bp, Zea mays
  Clone ID: MRT4577_151243C.1
gaaaaaaaagcaaacctaatgttaagcaataacaacccccgcggggaaaaattataaatgttgggaacaaagaggcggtacttttatgaagggggcctccgggccgcaaaatatatgcataaagactaaaaacaaagcccccaggtggaaaaattttggccgttttggttaaaagaaggttttaagataaaacacccttgcccctcttcgggggggggtttttaaggaagaaacccggctctttaccctcaaggagggagccataaattcggccactctgccaaggaggggcaaaaaggcaggccaacaatctcccctggccaaaaggttttttaataaaaggggcaggggcacgggcctgcgggcgcttataaatattcctctgcacagggtgaccattttttggttcctaaaaaataggcacccccttttgtccctcaatggccacctttttaggagcagggaccttttttttcccaccgatgtccacttcataatgagggggga

SEQ ID NO: 56198 - DNA, 340 bp, Zea mays
  Clone ID: MRT4577_151244C.1
aaacgaccgggggcttgatagattaaaacttgggccactcataagtcacccccctagagaagatgtttgcattcacaggactaggcggagggtccaattcctctagctttgcgaaaacctaatgtgctgaagggtgcaccctaccgcaattgatcgggtgatgcattgggggacactcctcgtcatctatggcgttagggacataccctgctggtgcattttcttccatcgtcatgtttggcatttgctgacactcgtagttgccggtctttgatgatggggatgatgttgttgtgttggccatcaactcgaggttcaacgctgaagatggtcttctttt

SEQ ID NO: 56199 - DNA, 557 bp, Zea mays
  unsure (1)..(557): unsure at all n locations
  Clone ID: MRT4577_151245C.1
atggaaagctgaggataaagtttcggtggagggatagactttggattggggaccctgctgatattgttcttgatgatgtccacttattgacggaggcttctaatggcttggctttttgttcataggcttgtggtattcttttgataccatatctgatatattgcacccatccattttgcagcatttcaaatttagcaaaatcttaacctgcagtggacttgcaagttgcacataactatcatcgcatcggcatgccagggtgtatttcatgttgataaccggggaatgagaagacaacgatagtgtagagctggtaaccatcacctagttttttcttctttggtttacatgtataattatgcctcctgacacctttttgggtttcagtgtatcatataccagtgtacaggttcggacctgaacattaatttaattgatagtggtcttgtatgtttaaaaaaaaaaaaannaannaaaaaaaaaaaaaaaaaaaaannnnttttnnnnannaaaaaaaaaaaaaaaaaaaaaaagtcctctgcgttgttcccactgct

SEQ ID NO: 56200 - DNA, 349 bp, Zea mays
  Clone ID: MRT4577_151246C.1
gcaccggaccggaaaaatccccggggcgacgagcctactaggcggcgggcgcccaaaaatagggggtggttgaagaacacaaccaccagggagccggagagccaccactgcagaacacacaggaacaacggcagggacaaaaaacccaaaggcactcaaaggcaccaaaaaggcgggggggccaaccaactaacgagatgacaaaagagaaagggcccccaagacggggccaacacccaaccaccgaagaacaaacggggggcgtaaaaacaccggcaaccgggaaattgccctgacacaaagggggaatgacattccccccccaaaccgcaaagagccaagccggaag

SEQ ID NO: 56201 - DNA, 360 bp, Zea mays
  Clone ID: MRT4577_151247C.1
aatataagccaaatgatataatctataggccgaggggaacacacccttaaagcggaagtggactcaaccacccggaggatggtactatggtttattcggcaaaatatgccttattagttgctaacaatagaaggcacacacactacacagaacttaggcttatataggtcggagagctaaatcgaagcggctgacgcagctagcatgcatgtctgctcagaactgaggagagaaggccaatcaagcgtaggacttgaccatgcaggcgtagctggagagtgggcggtataaggcgccccagaacaggaaccacggcgtacgtggtcgtcatgtgcgcagacggggcgagggccaaggaaa

SEQ ID NO: 56202 - DNA, 207 bp, Zea mays
  unsure (1)..(207): unsure at all n locations
  Clone ID: MRT4577_151248C.1
caaccacacccgtccgaaaccccngaccaaacgttaagtttcaattatgggaaaaacacaaaaccaagcgcgagattttaattaaaaattggctcgaaaaacaaaccaacctttaatttctcaatcccttcctattccttaaaacacttaactaccttttccttacctttctatatctttttttatttcataattctttcttctttc

SEQ ID NO: 56203 - DNA, 574 bp, Zea mays
  unsure (1)..(574): unsure at all n locations
  Clone ID: MRT4577_151249C.1
nanannncggccgctcgcggatctagnnaactaggttaatgnaaaataacaccagcaagaagcattcttgattctaaatgaactaatagttgcactgaagtctaagaaggaaagtagaaaattagcatatgatgtgctcctggcaactagtacaaacttgagaagcccagagtcaaatagtgcagattcagatcttcaacgattgtttacaatggtaatgggatatctttcaagtccatctcctcacatagtgagtggagcaattgctgcactgtcattgcttatatacagtgacgctaatttttgcatggaagtaccgaatctgatagagtcagtattagttttgctgcaacataaagccattgaagtaactaaagcagccttgggctttgtcaaggtattggtaacttctttgcaaccacaaaaactattgaacttgcaagcagatatcataagtgggatattaccatggtcattggttacaaagcatcatttcaaagggaaggtcgtactaatattagaaatattaattaggaaatgcggctttgatgctatcgacttaaatacacctgac

SEQ ID NO: 56204 - DNA, 329 bp, Zea mays
  Clone ID: MRT4577_15124C.1
tgttggacgccggaaccctctgcaacaaagggggctacacctgaccacctgccttgagcactaccccttccacgagggtagagcgagccctctaccggcgcgcagaacaggggctgatggggcgaccaaacccgcaagatgtgggcatgagacccaggagcaggaggcggaggcaatatggaatacaaggcgagatccactggaacttcaggaactacgcctaaaagataccgagatctgcacaacaagaagaactcgagctacgtaaacgacgaaccaatgccggaagctacaacggaaaaggagcagggaaaggaagaattgaaaca

SEQ ID NO: 56205 - DNA, 375 bp, Zea mays
  Clone ID: MRT4577_151250C.1
acagcggacccaaacctagactttttggctaactcgacagacagacgctttgctacgatggatccagtgctcaatgcctggcctccaccagcagcggtgatgacgacgcaatgcctgtacaccaactgagtcgcagacaagcgttctgatgccatcaatgtacaactgaacgtctgcttgccattgtagtatcgaccacattcccagcatgactgctgcatcctacgtggcactgataagtgcgttcatggccgtaagagctgacggactgtgccggccctcacctcatcgactacagatggttcatggtcaacaactgacagcacgacggacgagcttccccacaccagactaactcaagaatgtggtgaaagc

SEQ ID NO: 56206 - DNA, 276 bp, Zea mays
  unsure (1)..(276): unsure at all n locations
  Clone ID: MRT4577_151251C.1
agggaagggttaatcgccggccttaaagaaataatggccatcattcctgacctaaataaaattcctgtccccttacaacacaacacaccagaccagaagggaaaaatcaaacgcaaagcctgcggagcgaaataacctgaccaacttcaattgagttgcgctgacctccctgccccctttcggaaagggaaaccggccgggcagattaatttatcgaataggccaccgcgcggggagaggaggnattggatttgtgcgctcttccgttccttagtg

SEQ ID NO: 56207 - DNA, 432 bp, Zea mays
  Clone ID: MRT4577_151252C.1
gagcttactagtcggcggccgcccttttgggttttttttttttttttttgtgttttgtttttttttttttttttttttttttttttttttttttttttttttttttttttttaaaaaactaaaaaccggggggtttattttattcaccatttgggggaaaaacttataaaaccaaagctaaaatggtaaaataaaacggagccccagggggtaaaaaaaacccccaggtttttaagtcaagaggtaaaaaaaaaaaaaccttggcattttaaagcccaaaaaaccccgacgggccacgggttggtttttttaaagtgggacaagttttgggcccaaattttgcctttttgttaaaccaactttttgagggggggctggaaccccgggaatatcccctttaaaccaaaaaaaaaaaagggcccacccccactt

SEQ ID NO: 56208 - DNA, 364 bp, Zea mays
  Clone ID: MRT4577_151253C.1
agaaaaaaaaaacaaaaggggtcaaaaaatacccattaggggggatgggaacactttataaacatatcgaacaggttggtggggtttataacattcaaaatttggaccagccaagggccaaattaacctttgaccagaaaagaaacagaccccctttacacaatcaggcaatcatttttttgaacccctcctatagggaaacaaattttccacgacgggacgctccatttttcaacaggttatacttaaaaggcccccttgggtacaaccattcgcgagaatgcttgcatcgaattcctgcagtttgacaggaactggatccacaaacaggggattccacttattacaggagcaccgtttttca

SEQ ID NO: 56209 - DNA, 195 bp, Zea mays
  unsure (1)..(195): unsure at all n locations
  Clone ID: MRT4577_151254C.1
gcgccgctcaggcgccggttggatgatgcataatggaaatgaaaaggacgccggcgcaggagatccactccagcgggagaggggaccggtcatcacggttgatcgtggcaaatatcaaaatctctccattccactgcccctaccacagnnttccactggccccttcgccacgggttctcgcctccctcgcattct

SEQ ID NO: 56210 - DNA, 326 bp, Zea mays
  Clone ID: MRT4577_151255C.1
tcgaaaaaaaaaaatataaaaaaaaacaaacttacaaacacatacatacaaaaaaaataggtggaatataatataaaaaaaaaaaaaattaaataaacataaataaaaaaaaaaggggcctccgttataaagaatccaacttaacatacccttccttgcaacatattattttttttataggtgacctaaaattaaataaactggccccctttttacaacgcaacaattggaaaaaccttgtggttaccaaaataaatccttttgcagaacatcaccttttacccagttggtgtaataccaaaaaggcacgcactaattgtctttcc

SEQ ID NO: 56211 - DNA, 371 bp, Zea mays
  Clone ID: MRT4577_151256C.1
agcggggtgtaaaaacaaatatatagggtggcctacacccgggcctttaaaagagccgttttattccaagggcttaaaaaatttgcccccccccaagggggagcacccaaaagaagggcacccccttgggccccaataaagcggggtgggtccagtttattgactggcagacacacgcgaccaggattaaattacatatgttttagggcggacgattacgacgacgatcacaacgacctttcccaacttttttggggggcgggaaaaaaaaacaaaccaatccatgggcattttcttaagggattattttggaaagcgtgcggcaaatttcggacatttaaatgagcgacctgttggggtccccctggggg

SEQ ID NO: 56212 - DNA, 302 bp, Zea mays
  Clone ID: MRT4577_151257C.1
ttgactctacgcgcccttggttgctgacccgaaagttcaaaggatggccggggcttcattagcttggtggtgacgggcaacccctgtacaagagcggatcaataggtcagaaacagaacttcggctgtcgatagtgagaacctcttccaaaaaggcatgggaactggacaaaaggcactactaatgctgcatgcttagctattagtataccgatacaacaccatgtgatgctggagaaagctctcaaaactcatgtgtccaggatcgataacaagaagtgccctgctcctaccgatctgact

SEQ ID NO: 56213 - DNA, 144 bp, Zea mays
  Clone ID: MRT4577_151258C.1
attcggctcgagcgcaactgggctatagggtattttttccctaactggaacgaacacttctacaggggcatgacgtactatccgagggtggcgggcaaccgtagggaacatatacgcgctcaggcgacgtatgcagaaattctt

SEQ ID NO: 56214 - DNA, 204 bp, Zea mays
  Clone ID: MRT4577_151259C.1
gcatgtgactcacctgccagttctagctgttcgtataccgtgtgggcattctgcacaatttcgaggaagacgggacccttgaatactgtactagcgtacacattcttcggaaggctgacttcttctacgacggccgctacatcctgtacgcgggagatttgcatatgagcgggtccagatagaactcctacgtggagcagctat

SEQ ID NO: 56215 - DNA, 224 bp, Zea mays
  Clone ID: MRT4577_15125C.1
acgttgaactgctgtggtttggactagagtatggaccaatttatctcagacatctgccccaagaaggacgtactcgaaaccttcaccgtgaagtcctgtcctgatgccatcaaagaggtcttcgacaataaattccacatcatcggcgcacccggcatcggcattgccgtggtcatgatatttggcatgatcttcagtatgatcttgtgctgtgctatccgcag

SEQ ID NO: 56216 - DNA, 316 bp, Zea mays
  unsure (1)..(316): unsure at all n locations
  Clone ID: MRT4577_151260C.1
tgtgggtgggttgtggntggttggattaatggtagttttgnttggtgttgtatgtgtggggtatttgtgaaaaatgtgtggttggaagaaggatnntggtattggtaggagaggtaggaggtnatttaattttatgtggtggaggagtgagtgttttgggtatggttatggtggtagggggggttggtttgtatcgagttttgggggagtggatatttggtttattgttgnggtttgtgtgtggttttggttggatagatgtgggtgattgattattgtttaaggttggtggtgttttttgattggggttggtggg

SEQ ID NO: 56217 - DNA, 360 bp, Zea mays
  Clone ID: MRT4577_151261C.1
ccaaggatatgttcactatggactaccgctacccgctctcagccttccaggctttcgccatctgtttgagtagcttcgacactaaactggcctgtgagtaaatatagaccccgtggaagcaatggaacagcccggagctggcaatgcacaaggggagagatgcatttagccctaggattttagtttgatgcttttgcaatttgttgttttctctctgatggttgtattctgcttcctgttaacctggaaccggacctctaggctctaagcatgtatgttttcacctgctggcaccatttcgtgtaatgtgcatgagattcagcccttaacgtgaatgaattgttacggtgttgatttctc

SEQ ID NO: 56218 - DNA, 2103 bp, Zea mays
  Clone ID: MRT4577_151262C.1
gccggccgggttccgattctctccctcgtcgacggccgtgtcccgcttgatttcgatcggcagctggagagaatcggttcgattccccgtctgccgcagtgcctcctttcctttcctttggcttaggctcggctcgttccttcgctcgtcgtattttttctccaccacttccttcatttttttttctttctccctccctacacggccactaccagtccaccacaaaccacgtccccgccgtcgtcgtcgcgcttcccctacgcgcgccccgtcgcgtctcggtgctgctgttgggtgcgcccgcgcgttgccgtgaagggtgaagctgcttccgcgcgccgccgccggagccggagggggcgggcgaagcgggataagggcggccgcggcacgcgcgtgagcggcacaaccgaagcaggctgcgtttagttggactgcggccggggatcgctcgcgtcgcgtcggaggaggatgtctcagacaggggaggcgcaggtgccgctgttgcagactcaggaggcggacgccgagtggagctccaagccgcgccgcattgctctcttcgtcgagccgtcgccctttgcttacatttccggttacaagaaccggtttcagaacttcatcaagcatctacgagagatgggcgatgaggtactggtggtgactacacacaagggagctcctgaggagttccatggtgcaaaggtcattggctcttggagctttccatgtcctctgtaccaaaatgttccactctcgctggcattgagccccagaatattttctgaggtgaataaattcaagccggacataatccatgccacctcacctggaattatggttctcggcgctctggctatagctaagatgatatcagttccaatggtgatgtcttatcacacacatcttccagcgtacataccgagatacaatttaaattggttacttgagcccacgtggagttttataaggtgcctccacagatcagcagatcttactctagttccttcgttagctattgctgaagactttgaaaccgctaaagtagtgccagcaaacagaatacggctttggaataagggtgtagattctgaaagctttcatactaaatatcggaggcacgaaatgcgtgtcagattgagtggtggtgaaccagaaaaaccattggtaatacatgtgggccgttttggacgtgaaaaaaatttggattttctgaaaagggttatggagaggctcccaggagcaaggattgccttcgttggagacgggccatacagggctgagttggaaaaaatgttcatgggcatgcctgcagtttttaccggaatgctccaaggtgaggagctctcacaagcgtacgccagtgcggatgtatttgcaatgccttcagaatccgagaccctcgggcaagtagtgctggagtccatggcttctggagtcccagtcgtcgctgctcgtgctggagggatacctgatataatacccaaggacaaggagggtaaaacaagctttttgtttacaccgggagatctcgatgagtgcgtgaggaagatagagcaagtcctcagttcaaaggatctcagggaaaccgttggaaaggctgccagggaagagatggagaagtgtgactggagagcagcctcgaagaaaatccgcaatgagcactacagcactgcgatatcgtactggcggaagaagatggacaagagtaactaggcttccttgtttccggattcttctgtcgctgccctctccaactagttgctgttaataaccaaagaatttgtacattgtacccaaacagcttgcgagtttgtgtggctggctgcattcaaatgtccacagtttgactgactacggcttgtatgcgattcatgtacatttagacagcacttaagattgccgatctgctaactcaggaaggtttgacacaaatgctccgataattttgacgtacttgtcgcgtgctgatgtgcagtgtagaggcttgttgctgttgagtcccttgttgaaatgatattcttttgatgcaccatgagtttgtttgcatgtatgatctaactagatacggatgggatgtttcaaacgtttgaagtagtgatc

SEQ ID NO: 56219 - DNA, 1136 bp, Zea mays
  unsure (1)..(1136): unsure at all n locations
  Clone ID: MRT4577_151263C.1
tgaattcggcacgaggcaggatactggtcggcggccttgtgcctggacagttattctctccctcgtcgacggccgtgtcccgcttgatttcgatcggcagctggagagaatcggttcgattccccgtctgccgcagtgcctcctttcctttggcttcggctcggctcgttccttcgctcggcgtattttttctccaccacttccttcatttttttttctttctccctccctacacggccactgccagtccaccacaaaccacgtccccgccgtcgtcgtcgcgcttcccctggctacgcgcgccccgcgtctcggtgctgctgttgggtgcgcccgcgcgttgtcgtgaagggtgaagctgcttccgcgcgccgccgccgccacctgccccgcgtgggttgcaagtcaagcagcaggctgggacggggccggagccggagggagcggacgacgcgggataagggcgaccgcggcacgcgcgtgagcggcacaaccgaagcaggctgcgtttagttggactgcggccggggatcgctcgcgtcgcgtcggaggaggatgtctcagacaggggaggcgcaggtgcccgctgntgcagactcangaggcggacgccgagtggagctccaagccgcgccgcattgctctcttcgtcgagccgtccgaattcgcgtacgacccacgcgtgcggcggtttcagaacttcatcaagcatctacgagagatgggcgatgaggtatcaactcgttcttctttgtctaagaaagagtgctatactatatgtatgagtgtttcttcaagaccatattattattccagaattcgcgtttagtgcagtatatgtatgagattttgttcatgaccatatttccacccacaattcacttcatctgcactttatggtcgtcatctgcgcttcttggtttaagtattggtggtgactacacacaagggagctcctgaggagttccatggtgcaaaggtcattggctcttggagctttccatgtcctctgtaccaaaatgttccactctcgctggcattgagccccagaatattgtctgaggtcaataaattcaagccagacataatccatgcgacatcacctggaattatggttctcggtgctctggctataa

SEQ ID NO: 56220 - DNA, 329 bp, Zea mays
  Clone ID: MRT4577_151264C.1
atccctaccaaaccctaatgaaaaggggctgctaaaaaatacagagactctgcgctaaaaaagaaaaggcagggtgaaaaaaaaacataaagcacctggtggttggtcccacgttataacaattataacgaactgatccttatgcgaatggtctgaaactaataactcgagaagcactaatactttccacatttatttatgcctatacctatgctggcacaaccccagactgttacacatcatttgctggcacaccgccaggggaaggcctccgggaactttgacctacagcttaaccttgaccttggactccacgaggccaacacgtc

SEQ ID NO: 56221 - DNA, 2395 bp, Zea mays
  unsure (1)..(2395): unsure at all n locations
  Clone ID: MRT4577_151265C.1
ttcggnccggattaaacaaaaggtcaaacggctaatctgccgaaggaatctcccaatttcttaggacttcgatctcgtgcaactttttttacttcacgctgttcttgtttatagtccacttgtacctgatgtctgcagctaaccccattcatgtctcgatgcccagtgtttatcccaagttcagattgtaacaaaaggttcgagcaaacttttgatctgattgataccttcaggagcgtgcgtagaatccaagaaaccccaaatctgtgcctggagcatcgagcatccattatccggatcatggagaggttcggtaaagcccagtgaagaaatccgagctctgtcgcagtctcctagcgggctgcgggccataggagatctcgcgcgcgacagcacaagcgaccacggaaatgtcgccgcagccggcccccgacctcgccgaggacaaggagagggacaccaatgtcttcatcgaggcggccccggggtcgccagctaaggtggccgagggcgacggccatggccacggcagccccccaacgtcgccggtggcgtggttccggatgctggccagggagctgcactggagcttcgtcttcggcgtggtggccacgtacggcatcagtcagggcctcggtggcggcatctcgcgcgtcgcgtccgactactactggaaggacgtgcagcgggtgcagccgtcggtggcgcaggtgtaccagggcgtcacgtccatcccctggatggtcaagccgctctggggcctgctcaccgacgtgctccccgttgccggataccgccgccggccctactttattcttgcaggcttcatcggagtgattgcaatgcttatactcgctctctacagcaagcttcatgcattgttcgctttgttggcattgatgaccggaagcgctagcgtggcgatagctgatgttactatagatgcttgcgtggcagaaaacagtatagtgtaccctcatcttgctgctgatatgataagcttaaatggattctgttcatctgttggaggtcttatcggattctcaataagtggttttcttgttcatgcaataggggctcaaggtgcccttggcctgttaaccataccctctgccttggtaattttatccggaactctgctaaaggaggttcatatccccaactttccatacgagcaggcccataagaagttcgtagaagcaagtggaaaatgttaacagctttgaaatgtcctgaagtatggcgaccatgtgtttacatgtacatatcacttgcgttgagtgtcgacatccaagaaggaatgttcttctggtacacggaccaaagcgcagggttatcttttcatgagggatttattggcttcatgttcgctattggatcagttggttctcttgtgggtgttatactttatcagaatattcttaaggaccattcctttcgaagccttcttttttcaagccagctgttgctaagcttggcaggaatgcttgatctgatcttggtgcttcgactaaatcttaagatggggataccagattactactttgcggtgatcgatgagggggtctccaaaatgatcaaccgtatcaaatggatgcctcttctggtgcttagctcaaagctttgccccactggcattgaaggcacattctacgcattgctcatgtccatcgacaacattggctcgttaactggatcatgggttggtggattgctccttcatttgttgagaatcacaagaacagaattcaagaacctctgggccgcaatcttgattcggaatatgatgaggctgctaccactggcgctgctgttcttggtgccaagaagtgatccgaattccactcttcttccatccgatttgctgaatgagggagatgatgatgaagctcagcgagtagagaatgtcgagttaacttctctccctgcaaacagaaattcttgcgatggtaaatctctccatgacggagaacgggatgacgatgaagcttcacttcttgccaacaggagttgatactggattgaatatggagatttttcttttgtacacgagcaaatagataaaatttagaaaaatctttgacatttgtttactatagatactcatttagatgttcacgttgttaaattcattgaatttgcagcagggtagcgaaggcttgagagaagatactggggatgctttgagctggatttcccatataccaaaactataatggatcaaactttactaagtgtgaatcttgacttttcttatgaagttcacacatgctgctatgttacagttgtcagagtcgttgactaattgaaagattagtcaacgtccggtcaggcattgtaaaccctataaaagaaagtttcaaagtattgaagcccattgttttttctcgtttcc

SEQ ID NO: 56222 - DNA, 268 bp, Zea mays
  Clone ID: MRT4577_151266C.1
gcgcgccccggttgcgccaccagccagcttgcatccagccagagagagagaagggattcatggctgggggagcgagacacggtagcgaggacgatgccgagacgacgacgacgaacgagggacgccgcagcagcgaccacgcagccggggccacgaccaactattcggagcacaagcagctggtgccgttccttgacatgctccaagtatgccgaccgcacggacgccgcgcttatggcggtcggcacggtggccgcggtggccaacg

SEQ ID NO: 56223 - DNA, 1099 bp, Zea mays
  unsure (1)..(1099): unsure at all n locations
  Clone ID: MRT4577_151267C.1
ggggctaatctgccgaaggaatctcccaatttcttagtacttcgatctcgtgcaactttttttacttcacgctgttcttgtttatagtccacttgtacctgatgtctgcagctaaccccattcatgtctcgatgcccagtggtgtgttcttggaagccattgggcaccattcgcctgccaaaaatttttcttgacatttttctccatttcttttgccagtttatcccaagttcagattgtaacaaaaggttcgagcaaacttttgatctgattgataccttcaggagcggttagcttgacactctcttggttttttcaagactttctggatcgatacgatacagacgcacctacctcacccagctccgatcttgctgtcgcttcccacagtgcgtagaatccaagaaaccccaaatctgtgcctggagcatcgagcatccattatccggatcatggagaggttcggtaaagcccagtgaagaaatccgagctctgtcgcagtctcctagcgggctgcgggccataggagatctcgcgcgcgacagcacaagcgaccacggaaatgtcgccgcagccggcccccgacctcgccgaggacaaggagagggacaccaatgtcttcatcgaggcggccccggggtcgccagctaaggtggcccgagggcgacggccatggccacggcagccccccaacgtcgccggtggcgtggttccggatgctggccagggagctgcactggagcttcgtcttcggcgtggtggccacgtacggcatcagtcagggcctcggtggcggcatctcgcgcgtcgcgtccgactactactggaaggacgtgcagcgggtgcagcccgtcggtggcgcaggtgtaccagggcgtcacgtccatcccctggatggtcaagccgctctggggcctgctcaccgacgtgttccccgttgccggataccgccgccggccctactttattcttgcaggcttcatcggagtgattgcaatgcttatactcgctctccacagcaagcttcatgcattgttcgctttgntggcattgatgaccggaagcgctagcgtggcgatagctgatgttactatagatg

SEQ ID NO: 56224 - DNA, 173 bp, Zea mays
  Clone ID: MRT4577_151268C.1
gagccacgccccacgacgtgcgtggacgcgcggaacacagacagtcaaccaggcgcatgggcgccatatctgtagaggtcgagacccttgaagagagaggccgcgcagaccaagaaaatacatgctgactacatgacagcagatatggcggcaaaggaagataccgggatcgg

SEQ ID NO: 56225 - DNA, 249 bp, Zea mays
  unsure (1)..(249): unsure at all n locations
  Clone ID: MRT4577_151269C.1
ccgttactttagattagaagcaaagggaagcttagcaagaatcgttcgagtcgagaacatggtgcanntttacatgtgcctttggcacctttctctggcgcctccaccaccacaaccttcgtctcgtcttctataaatccctaccccttctagtcttcccttctccaccttcctccttgtttaaacccttatcctctcttcccgttaggtctcccccatctccccttctatttcttatgactctccttc

SEQ ID NO: 56226 - DNA, 339 bp, Zea mays
  unsure (1)..(339): unsure at all n locations
  Clone ID: MRT4577_15126C.1
gaatnccgggcctgaactccagggaaataagccatgatggcgtcgtcggcaaaccatatcatcttttgaaagacgccggggccgaagggggtcggctttaccgtcaaggaagccaaaaaggggattctggcggccaagccgaacgccgacttcggggggttgcccacaaccacccaggcggggccctccgactttgggttcaaccggttccgggttttcgtcggaaccgtcgcccaaacccccaaggttggctaggttaaagcctaagcctaaaggttgtgggacccgccggccattgacaacctgttttttgtaccttcctagttattaaggtttaaa

SEQ ID NO: 56227 - DNA, 767 bp, Zea mays
  unsure (1)..(767): unsure at all n locations
  Clone ID: MRT4577_151270C.1
ccggccgggataccaaccattcttgacctgacccgacctaacccacactcataccccatcactcttaccaattcttcctcaagcaccatcaaaatgtccgtttccaacaagactgtctttaccctcaacaatggtgtcaagatgcccggtgtgggctttggcacctttgctaacgagggcgccaagggcgagacctacaaggctgtcattgccgccctcaagaccggctaccgacacctcgactgcgcttggttctacctgaacgagggcgaggttggccaggccgtccgtgatttcctcgccgaggacaacggcgtcaagcgcgaggatctcttcatttgcacaaaggtctggaaccacctccacgagcctgaggaggtcaagtggtcattcgagaactctctcaagaacttcggccttgactacattgacctcttcctcgtccactggcctatcgctgccgagaagggcgacgactaccagcccaagatcggccctgatggcaagtacgtcatcaagaaggatctcactgagaaccccgagcccacatggcgcgccatggaggagatttatgctagtggcaaggcccgtgccattggtgtctccaactggactatcgacggcctgaagcagctcatggccttcgcaaaggtcaagcccgccgttaaccagatcgagattcatcctttcctgcncaacgagnatctcgtcaagttctgcctcgagaacgacattctccccgctgctaacctctcccctcggttccc

SEQ ID NO: 56228 - DNA, 680 bp, Zea mays
  Clone ID: MRT4577_151271C.1
ggttccctgtgggtaaagagagagaggaccctgtcttgatgtcgtcgacggcgctgtctacggcggcggtgaggacgttcggcatgggaccggcgacgtcgtggagtggacacgcacaggctgcgagaagcgccggctgtccaaccgggagtcggctcgtggggctgggctccggaagcagaagaacctggacgagctggagcaggaggtggcgcgcctgtaggctgacaacgcgcgcgtgggggcccgcgccgtcgacatcgcgtactatgacacccgcgtcgagcaggagaacaccgtgctccgggcccgcgccgacgagctcggcgatcgtcttcgattctgtaacgaggtgctccgcctaggcgaggagctgagcggcgacgacatggacatccatgaaggagatgcccgaggacgacccggtgttgcatacctggtacctggcctacccggatgccgtcatgcccataggagcacaggacatgctccactactgatgattgtctccagcagccacaccatcatacatctgaggctgctggctgcagctggttggcctcgagactataagaattgactggctctatcagcatgcacatttactacgctatctgcctggtttgagaattacagggactctactatttgctgctgtgataaatgtaccttctgggttc

SEQ ID NO: 56229 - DNA, 169 bp, Zea mays
  Clone ID: MRT4577_151272C.1
tctatgcgtaggtggacagacaaaagattgctaaagacggcgtttatatcctccgcgtaaggcttattttcttttatttatacgacgaacactatctctgattgtagcaccatgcaatgaaggacaggcaccgagttactgttcggaatattaaatcaaattccgcata

SEQ ID NO: 56230 - DNA, 630 bp, Zea mays
  unsure (1)..(630): unsure at all n locations
  Clone ID: MRT4577_151273C.1
ngtccagaagccaaccatctaccagcgactctgcgagcgagagcagcacacacgcagctagctaggagcagcagcagcagtgtcggtgatggtggcctccatgatctcctcgtcagctctgggggaggcgcctcatggtctgccgcccctcgttcgacgagcctcctccttcgccgtcgtctgttccaaaaaaaatatctagaccgacaagccctacgggattggaggtggcctgaccgtcgacgtctacctcaacgaaagaaaggccaagggcaaaggggcgtaccagttcgtcgacaagtacgtcgctaacgacgacggatacagaccaatctacaaagaggatgactggtctccctcctggagactactacgtagatggtaccactggtcttctgagctgagccgatacactcgctgggatactcgatgatgaacccctcactccctacaaatgcaacgcccactgcgtctaatgatattcgataggtgcgcttcttgcgatatctcatgcaaaatcagggtgaactgtctataatctactctccatggatggctcaaccttcgacgtgtaacaataatctgagctactcttcattacataatgttgatgcaatgaaaaaaaatgac

SEQ ID NO: 56231 - DNA, 384 bp, Zea mays
  Clone ID: MRT4577_151274C.1
tacaagtctctataatgagtcatattagccggttggcccagcggtccgggcaagtccatctgctcgctcgcgccgcaactcaagcaggcagatcagtgtgagctatccattcgcagacagggagtcatcatcatgaatggaatcggttgtaatatgagcggaatggcggtttcatgctcacgtaacccaggtgcgctgctcgtcaggcagggagcgctgctggatgtggaggagttcttacagcactggtgagatggcattactacgagggactgtttcggagagcaatgcttccgcgaacatggccacctggatgagatggacgatcagatcgaagcaggcgggctgcaccgcgacgagcaggatctcttctatcaagaccat

SEQ ID NO: 56232 - DNA, 338 bp, Zea mays
  Clone ID: MRT4577_151275C.1
gagcttatcttgtcggcggccgccctttctttttttttttttttttctcttaaacataaacggcaactaactcgagcactcatcttacaattgattacctgacacctcaagatggcaggccagaaacggttatggctccgcacatctcataaccccagccgcctgcaccatttttgttcatcaaaagccaacaggttcttggctaggcgtcagctcatgggactaccatagggcaacctgctacgcaactggggctctgaggatgtgtatgcatacagaacataactgacaggccagggtggacacacttgatatcacacaacggcccgagtgagctg

SEQ ID NO: 56233 - DNA, 483 bp, Zea mays
  Clone ID: MRT4577_151276C.1
ttatttctgggcagcgcccctcatcaccagaaaaaactttattattgagctatcacttatttaaacttaaggaggcaccaccaatgacgggttgcttgttaaacgcttcacggttggtcaaaccacgttggttgaatggctgacattgttgcccttgggagaaggtgccagcgctaagcacaacgggctggcaaaaccgacaccactggcgttgaatcacgaacggactacggttaacaccagctagctggctcatatggaacaagttgctgctgctgccaataagccggtatagttcaatgctgccacttggttgcatggaagaaactgctggggtttcgccacaagtttcttgcttgaaggcaattggtgctgttgaacactcctagtagtttacagcgccgacagcttctaccatggaacaaactggttggtgtgagacttgccaccgtgttttttcacacacagttgttgacgttgtgc

SEQ ID NO: 56234 - DNA, 307 bp, Zea mays
  Clone ID: MRT4577_151277C.1
cgccatgccatccagactgaggaagacccggaaactccggggccacgtgagccacggccacggtcgcatcggtaagcaccgcaagcacccaggaggccgcgggaatgctggaggcatgcatcaccacaggatcaactttgacaaatatcatccaggttacttcggcaaagttggcatgaggcattaccacttgaagaggaaccagagcttctgcccaactgtcaacctggataaattatggacgttggtcagcgagcagacacgggtcaatgcagcaaaaaacaagaatggagttgctcccatcatt

SEQ ID NO: 56235 - DNA, 394 bp, Zea mays
  Clone ID: MRT4577_151278C.1
aaacccccccaaaaaaaaaacccccccttttgtacaaaaattgttcatttttatgtaaaaccccaactaattatttcgacttgcctattcaatgcaacggaaaaaaaaaaaaacaaattctttttgcaaaataaaaaaaaccacttacctacacccttttcgaaccaaaaaaaaataaaatttcataacaaatcccttaaacttaatttcccgggaccaaattggtggcaaaacccccaccttattttttaaccgggtaaaaaaaagtttcaaaaaagtttttaaacgggcctcttcccgataaaatggcctggaccaaaaaacccaacatagaaaaaatggggggggggcccctttctaacctctttaccttaacccctggaaaagctctttg

SEQ ID NO: 56236 - DNA, 958 bp, Zea mays
  Clone ID: MRT4577_151279C.1
tctgttgtgccagaactaagtgcctttatttgcctcataaaggggctaatcaaagtaaataagtggaatgaagccctgcagttgtgttacagcatgtgtgatgagggtgtgaactggcagagcaacaactcttttgatggaggctagagctttgttttcttacatggttactccagatgaaagcattgtcccataagagcttattttgattggggtgatttggttcaaattcaaaccaaagttattttaatgattcctgttccgaacatcgctctagggagtcattcatttctgacatcttactggaagattacagtatgaagtggttaccaaggagatacggattaaaatgtgcttttgtgcaactcattgatggattgggaaaacagcactatgttttgattaaaactgtatatgttcatatataacctttctgggtgctgaaggataaagtgaagaccttcaaaaaactatgtgcagtcaagctcactcatgtaagcacggttctaattcataatggtggccaatctattatgatgttagctgattatcatcatatttgtgctcttatacagtatggattatcaaattctctctttcagtgctgcacgccattttacattgtcagtgggtgatgaccgaagtaatttctgacttaccttcagatggacaaaggatcatctcaatgtctatcaacttctgtatataagttgctgatggttagacacaagggtgaaatatgtggtgaaagagaacttctgaaatccataattctctattcatcagttcagtgattcatccttatagctccttccagtgtttttgctctcgtaatagagcaataaagatatgatgaaatcacaaaaatgtagtcaaatgtactgcagttcactacttcactgtacaaatgtaaaaattacttcaagttaaaatttatttatttaacctgttgatatca

SEQ ID NO: 56237 - DNA, 314 bp, Zea mays
  Clone ID: MRT4577_15127C.1
acactgtggaccaggtgctgagtgaggtgagccgggtgctggttcctggaggccgattcatctccatgacttctgcgggtccccacttcaggatcagacactatgctcaaccctgttacgactggtcactgaggcatacaacctatagcagcggttttcacttccacttttacgtcatgcataagggcagagagctcactgtgtcccagctggccctaggggcccagatcctctcaccccccagccctcctgccccaccctgcttcctccaagactcagataatgaggacttcctcagtgccattcagctgtga

SEQ ID NO: 56238 - DNA, 553 bp, Zea mays
  Clone ID: MRT4577_151280C.1
aatcccaaatacgctaacggaccgaacgaccaaactgcgcgccgctcgcgcacagacgacgacgacagcgcacagaagagcgagggcatgggctccaggtatgccacctccgcggcctcaccgggctcttgatctccggcgccctattggtctacgtcgccatcccaggacgacagaggccagaaagaaacggagagacgaggaggagggaactacattgaggcgacaccgaacggtccgaaaaactggggcagaatcaagccgaaacgggccaactgtagcgctgggcgcatgcagaaccacatcgacctcgcccgggagcgcgtatagctggtgcccgacctccacttactgaaccactcctaccgtccagcccaggccttcatcagaaaccgcggccacgacatcatggcgagggtcaacggcgacgccggccgactggcgatcaacggcacagagtacgacctcacgcagatgcactgggactcgcactacgagcacaccgtaagaagacgcaacaacgccgtgaagctgcacatgacgcacgagagcg

SEQ ID NO: 56239 - DNA, 652 bp, Zea mays
  Clone ID: MRT4577_151281C.1
ggggggtgaagagggaggttaccacgacttacaaaacgagagtcaaggagaatgaagggactacaggaatgagtactagggagaacactagttgttggggtcgcgccaactgggagtcgactggtcccgcgggtaggtactaccaaggaacaaggtggaaggggaaggcaaccgctacttgtcccataagaagtacgacttgggaggctactctcactcccgtgggggcttattcatgcaccggaacgggttgagaattcggtgccgtagatttaggtttcgttcgtcaagcttgtggaagagtgaacgaaaacagtagtactggtcacgatcgtttagtaacccgagagtacgtttgtaggtgtgtggagaacggttaagcaaccaaggtgacgggaaaggcgtacgctacggctacttcgggttcttaccgttctcttcttgaaaccaggagggaggataccacgagggtgggtgtggggactggagagggttccaaccgcgtagccgtggcagtcggatagtgaaccgaaaagaggggagtttgtaccaggactgcagttcgcccttaaggtactagggtccgggggaagaacggtccttgtagttgttccctaacaaacactggagggtctacccctgttgtcttagg

SEQ ID NO: 56240 - DNA, 375 bp, Zea mays
  Clone ID: MRT4577_151282C.1
atgcggtcatacaacacactgatgaaggagtcattaggattatgtccagagctccacttcttacacataaacctcataactgctgtcaaacgaacttggttttgactgatcaagaactgacacggcttgcaaacctacacagctaactgcctgcacacgccttcactgaccgtcacatgtcaatacatggtgttcgtcttcacaaaggaatctgtcaaaggtatgcgccttgtaaagtctattttgtgctgttttgtgatacctttgtgcgaaggataacacgaaagttgaatgtgatactgagctcaacttataggctattttcccctatttttttgctagctcatactaaatgagaagacgcaagtgatattg

SEQ ID NO: 56241 - DNA, 140 bp, Zea mays
  Clone ID: MRT4577_151283C.1
catcttctttgcgctctttctaaattgagccttcaccatctcatacctacctatcaccatcactgatttcccactcaataatgaacgtaaccctcttgaatatagtaccacatattatatcttgtcagacatcacaacat

SEQ ID NO: 56242 - DNA, 190 bp, Zea mays
  Clone ID: MRT4577_151284C.1
actttatcggattcgaaccgatgacttctgccttaccaaggcattattctaccactaagcgaaaagccctttatcggatttgaaccgatgacttatgccttaccatggcattactctaccactgagttaaaagggctttttattcaataattagccactttcatttaccattatgggtctactgcataat

SEQ ID NO: 56243 - DNA, 232 bp, Zea mays
  Clone ID: MRT4577_151285C.1
gtggacagcagactcgtttgttggtaccgctgtggtaacatttgacaatctgcgggctgatacctcgtgcaacatgcgtatacacaaccacgttacatgccacactgttttgggttaggagacactgcgaacgatacacaattttgttgactatcttaaccaacaaagttgtgtgggcgtacaagttgcaagtcaaggatccaacaaccgctgtctgttctattgaaccaaa

SEQ ID NO: 56244 - DNA, 192 bp, Zea mays
  Clone ID: MRT4577_151286C.1
tacgcactgtgacgcgccctgttaagcgccattaatgtcgtgggtactcgcagctacacccatacagtcggcagcactctacagcgcgctactttccgtttctttcgtttctttctcttcactttttggccactttccccggctagctctaaatagctgtctatctttaggtctcttaatgagtgctataca

SEQ ID NO: 56245 - DNA, 594 bp, Zea mays
  Clone ID: MRT4577_151287C.1
cagagatctggggggggggggggggggggggggacatgattatatacgtggggtgggggtggagtaagacttggtggtgggaaacagtaccgtcactagccccctgtttctcagccagttctcgcttccacaccacttgtactctctaacaatgtccctcctcctcccccacgcagcacgtttcactcactcacttactctctctctctctctctctcgcttgttaccctacttgttctcggccgctcatacgataccataattttcctcgagaggttctcgaattttcctcgggtacccatacagatctaagtaagtaaacgagaagcgttaggggagtttcacttgcacaccactctctaataatctatcttcctcctcatattctacattcaccctgaaccaattacgatttacttactgacaacaagaggaggagaatcatacgagagtacacaagtgatgagtttacgattaggtcatttttaattttctgcagtacgggtacgtgctaatagaccctactaaaatgggcctttctcaggtccgaaatgatgtttttctccttatgcatctcctgattattacggtaaa

SEQ ID NO: 56246 - DNA, 224 bp, Zea mays
  unsure (1)..(224): unsure at all n locations
  Clone ID: MRT4577_151288C.1
cnngnanaaaaacnagagaatatanaataagnagagatgtagttatttatgggaggcatggaggatttagagtggagagttatgaagggaagatgtaaatgagaggtattagaatagtgataatagaataaaatacaaagggggggggatatnaattaaagtaaatattaaaataattttaggtatacttgatgagagttaagtattggaaagattttgaggaa

SEQ ID NO: 56247 - DNA, 317 bp, Zea mays
  unsure (1)..(317): unsure at all n locations
  Clone ID: MRT4577_151289C.1
cggccggggccggaactaatagctgggccgacgagccctcaagtcggcggccgacccaaagagacanggcaaaggttgccttcaaaagcaggacagaaaaagacaaggcacaaaaacaaagggacacgcgacgaacaagccgaaagaccnaaaaacgcccggaagcaagggaaaccggcgggaaaccaaggaacggaggaggggcaggcaccaagaggggggcacacaaaaccgagccagaaacggacgacggggaaccagggggcaacaaaaaacggggggggaggcaccccaagacgggggccaggcccaaggcc

SEQ ID NO: 56248 - DNA, 416 bp, Zea mays
  Clone ID: MRT4577_15128C.1
cgcctctatggccccttccagcagcaccggtcgccctcaccctctcggctccacctcccagcgttctccctccccatcgctatcggtagagtctccctggtggatgaccttgccccgtgttccccttctacccaggtcgagctcgtcgtgccccccttaatggggtttgcctgtcgcccctctctacttggacgaccgccctgaagctcacccataccgcgacctcgccgaaccgtgcccctgctccagttctcgcctaggtccgcaccagcaggtcgtcagggtcgcccgaagatgttttccctattgctccttgtccatggccttgggaactctatattctcatctgtagccgccggttattaacctcggcgaggtcctctccatcgtttacaaccccggtgtcatcgtcgtgg

SEQ ID NO: 56249 - DNA, 267 bp, Zea mays
  Clone ID: MRT4577_151290C.1
aacaaatcacatttatctgatccttaggggcaagcaaggccatcttgaatttctatcgaaatatcatgcgtcaccactgagtggcccatgtcctgtttgtttgctcacggcttgaagactcatcggctggtccttctaaatcagttcagggtttatttgagagcgacggtattggacgggattgagacggctacaatcccctactataccaatttaaataacagcgatggaggaccatttaacccccttgcattgcaacaagcccta

SEQ ID NO: 56250 - DNA, 206 bp, Zea mays
  Clone ID: MRT4577_151291C.1
gtggaacaaacctgcggatttctttttagccgggccagaccattgatcctacactggcctaaaaagccccccggtagcgtttctcatccccattcacaacactgggaattccccctacacgcttgatcactctaataaaatcgaggaacctgcggggtttacctcacacctgccatggctttgggtgtacccacagaacacactgg

SEQ ID NO: 56251 - DNA, 2510 bp, Zea mays
  Clone ID: MRT4577_151292C.1
tttagttatcttccatgctttgtgccgccatcctattcctggccctcttgttggtggaagggccggctcaatgatttaccgaaacggctcgggctcacgatttcccctactccttgtccgccgcatcctggttcggattcgccgtcgcgctagggcaaacaggaaaggaagatggcggctgcggcggccgccagcatggtggtggtgcgggaggtcctgggcctcgacgtcgtcgacgaggtggaccagcccatcatcgactacatcgccaacgtcctcgccgacgaggacttcgacttcggggccccggaagggcacggcatcttcgaagcgctcggggagctcctcatcgactctgggtgcgtctctgaccaggagcactgccttcaggtctgcagtaagctttgtgaaaagtttggaaagcatggtctggtgaaaccgaaacaagctatgcgcagccttgtcacaccattacgaatgaatgcggggatggacgatgatgtcgctcccaaaaagccgcagcctgaagtattcgatggaccactgctgtcttcgcgcgataaagccaagattgaacggagaaaaagaaaagaggagaggcaaagagaggttcaatatcaaatgcatgttgcggagatggagacacttagggctggaatgcctcctgtttatgtaaaccacagtaatgatggtgggccagctgttagggatatacatatggagaacttcagtgtcactgttggtggtcgtgatctaattcaagaagccactataacacttgcttttgggaggcactatggacttgttggaagaaacgggactgggaagacatcttttctcagagcgatggcattgcatgcaattgatggtattcctaagaactgccagatattgcatgttgagcaagaggtcgtgggtgacgatacgacagctttgcagtgtgttctgaacgccgatgtcgaacgagttcaacttttgcaggaagaagctcgtcttgttcaacaacagaaagatttagagattgaggctgagtttgggcagagctctgacaagggcaaggatggttttgacaaagattctatcagcaagaggcttgaggagatatataaacggcttgagctcattgatgcggatgcagcagaggctcgcgcagcatcaattttggcgggtcttagttttactccagaaatgcaacgcaagcgtacaaaacaattttctggtggatggcgcatgagaatagctctagcacgtgctctgttcattgagcctgatttgctactacttgatgagccgacaaaccatcttgatcttcatgctgtgttatggctagaaacttatctcctgaagtggccaaagacattcattgttgtatcacacgcaagggagtttttgaatacggttgtcaccgatatccttcatctgcatggtagaaaactacatgcttacaaaggtgactatgacacatttgagaggacaagggaagagcaccttaagaatcagcagaaagcctttgaaacaaatgagaaggccagacagcacatgcagacattcattgacaagtttcggtacaatgcaaagagagcatcacttgttcaatcaagaatcaaggcattggagcgaatggaacatgttgatgcagttgtcagcgatccagactataaatttgaatttccaaccccagatgaccgccctgggccaccaatcatcagcttcagtgatgcctcatttggttaccctggagggcctaccttgtttaaaaatttgaattttggtatcgacctggacagccgcatagcaatggttggtcctaatggcattggcaagtccactatactgaaactaatttctgggggatctgcagccaacttctggaacagtatttcgctctcccaaggttcgcatggctgtattcaatcagcatcatgttgatggccttgatttgacggtgaatccccttttgtacatgatgaagtgctatccgggtgtgccggagcagaagttgagggcacatctgggttcgtttggtgtttcgggaagccttgccctccaatctatgtacactttatcaggtggtcagaagagtagggttgcattcgcgaaaataaccttcaagaagccgcacatcattctccttgacgagccttctaaccatcttgatctggacgctgttgaggcgctcatccagggtttactcatttttcagggaggggtgctgatggtgagtcacgatgagcatcttatcactggaagcgtggacgagctttgggtggtgtcggaaggcagggtgaccccgttctcgggcactttcaaggactacaagaagatgctcaagtaacaaaaacatgtattatcgaccatagcctatatatctatatgcttgctattatgttgtattaccgtataaattttgggagtaaagcatcgaaattattataacacatacctaatgccgaaaggagaagatttctcacatttttagttcgaaaaaaaaattccttagaaagtgaaat

SEQ ID NO: 56252 - DNA, 415 bp, Zea mays
  unsure (1)..(415): unsure at all n locations
  Clone ID: MRT4577_151293C.1
ccgcgcgctgcctctcccttccactccataccataccgccacgacaacgtcgacaagcgcaataccggagccctccgaaatggccgaggacaaggagaccgactcgccgcagccgccggccaagctgccccgcctctcccgcgccgacacgagcgccggtaagcacgcgcgggcaggcagtagtacgttctagccccggttggttagttgaagtactagctggtagctgatcgctctgtgtttggcgtttctgtcctggccgcangagaggtgaccatggcggcctcgtcgccgctggttcttgggctggggctgggcctcggcggggcgcggcggcggcggcgagcgagacgcggatgtgtcccccgcgacggtgactcccaagaggccgtcggcgctgacgttcatgcagcag

SEQ ID NO: 56253 - DNA, 674 bp, Zea mays
  Clone ID: MRT4577_151294C.1
ttgggaccctcgaggccggccgggagatgattatcgactcaggagagagaacgaaagtatccccaaatcctaaatcccgatatcgagggacagaccctcgcgccttcttcaacatgacctgccgttggggtcccggcggatcgcatccggatggagatgaacggcaacgaagcgcccatagaccgggagagaacttacgagcgttgagaacgacaaagaatggcgtggaggagcacgataagccgttccaataccaggcttctaccttccatcgcggaataccacagcgcatgtggcatggttggatgacttcacccggggaaaggtgatctgcggaagagaacactctaacgtgataagttccccgaagagaagagcgagagcaagcacaccagtgccccgcgagtgatctacaaggacaacagcgcatattgctatacgagctcatcccagatcattattgtgcacctgataagagcccttggcgtcatacggtacagacaagtccgcttcgtgctattctggagagcccatgcacggaccatacgtaatatacaacgtgcgaatccgcgactctctcgacctgcaatatgtgctatgtgcataactgcggacagctgatctagatctcacggatctgtgctgatcagtacccctccctgcatctattttga

SEQ ID NO: 56254 - DNA, 310 bp, Zea mays
  Clone ID: MRT4577_151295C.1
ttccagcttgtttcattattctgtggcgcctgcgatagactgggtggggggccaatcgcagcggaggaggacgccactcatctatgaccttcgaatctatcacacttaatagtcacatctgacccgctgcgcattgccaccttaaacatgtgtacctgaccctatgctccgcgctggccttctctgcactctgcgcgtaccttcacatccttctcaacgtccgaggcgccctaacgaccgtaggatgcgttgcctccattcactttctcattttcctgccccctttaccggaccaggataggaacctctt

SEQ ID NO: 56255 - DNA, 594 bp, Zea mays
  Clone ID: MRT4577_151296C.1
cactgttattgtaaatttacaacagtatgataggtatgacaaaaacttcctatccgcatgattgaattcgtctttgtataagaacgtacaagtttctgaatgtctgtatcacttgcagaacaatcagatacactcatctatacagtaaaaaaagtatgtatttaattgcaacatgaagacaacagtccgatctggataatctcgaaacaaaacccaacgtttcaggagttcaggttcgtgctccacaccctgcaactcctgtttgcttcatccagagagaccatttaacagcttctaggaaattttcgttcctttgcagggcagcaatgaggttagcatatgtcactcgatcagggctgatgcctttaaccctcatctcttgcatcagtttgacggcatcttcaggcattctcgctatcccatatgcttttatcaaggtattgtagctgtacagatctggctccacacctcggtcctttagctccgcaagaacattcgaaacatcttgtatccaacctcttctaccatagatattgatcattatattgcaagtgtagtgatcaaacttgcatttcgctctcttcatcttctgca

SEQ ID NO: 56256 - DNA, 1634 bp, Zea mays
  unsure (1)..(1634): unsure at all n locations
  Clone ID: MRT4577_151297C.1
ttcacgagaaatgtgtctagattattgcaattggggatgtgacaggttcaatttgaaacacagctggtatagacatacctgctttggtgaagcataggaatgaaggtcatgcgatgaaagacttcgatggtgcggaagttttggattcaaccgagttgttagtgcatgactgtgatgttcttgtcccctgcgccttaggtggagttcttaacaaggataatgcaccagacgtgaaggccaaatttgtaatcgaagctgctaaccatccaactgatccagatgcagatgagattcttgccatgttggttcatgggctattacctgatacctatgaaagtggtaagattattgcaattggggatgtgacaggttcaattagaaacacggctggtatgggcgtacctgctttggtgaagcataggaatgaaggtcatgcgatgaaagacttcgatggtgcggaagttttggattcaaccgagttgttagtgcatgactgtgatgttcttgtcccctgcgccttaggcccacgcgtccgcagggataatgcaccagacgtgaaggccaaatttgtaatcgaagctgctaaccatccaactgatccagaggcagacgagattctcgccaagaagggggtagtagtattacctgatatatatgctaattcaggtggcgtggtcgttagctactttgaatgggtgcagaacattcaaggtttcatgtgggatgaggagaaagttaacgatgaactagaaaagtacatgagcagtgcttttcaacacatgaaagccatgtgcaaatctctggattgcgaccttaggatgggggccttcaccttaggagttaacagggttgctcgtgccacccttttgagaggctgggaggcatgagaccattgaccgcgcattacagattcgacaggcgcattcaataattcgtgtccaacaacgttggaggatcagtgtatacggtaaaattcatcagaaacggccggcttggaatgagcccgttgaagggtgttgtgcttgttgatcctgagttaccaatggttggttcaccagtttttggtgatgattagtgaaaattttattcaaaaccattttattgtattttagaaagctaatttggcctcgacagaggttactgtaccttttcatttttaatgaaattctggtctgaggtttgaaaaaaaaaaaaaaaaaaaaaaaaaaaaaaaaaaaaaaaaaaaaaaaaattcattaattcgtgtccaacaacgttggaggatcagtgtatacggtaaaattcatcaaaaacggccggcttggaatgagcccgttgaagggggttgggcttgttgatcctgagttaccaatggttggttcaccagtttttggggatgattagtgaaaattttattcaaaaccattttattgtattttaaaaagctaatttggcctcgacagagttactgtaccttttcatttttaatgaaattctggtctgaggtttgaaaaaaaaaaaaaaaaaaaaaaaaaancggccttaaaaaaaaaaagattttttattatttcgttgtccaacaaccgttgggggatcagggtttacgcgaaaaattcatcaaaaacggccggtttgaaatgacccccctgaagggg

SEQ ID NO: 56257 - DNA, 247 bp, Zea mays
  Clone ID: MRT4577_151298C.1
cacattttgttactaatgattttcccgctaacataaggatgatgagcagggcactatcatacacactggctgagaactggaactgtttttgggaaggtggcatttgtctcattccctgaaataccttaaaatgtctctacaccaacccttccgtctaccctgctcacatgtacagtgacggggaactcaccaccttttgaagttgcagttcattttctttgcaaagctctctcctaacttcctccgt

SEQ ID NO: 56258 - DNA, 202 bp, Zea mays
  unsure (1)..(202): unsure at all n locations
  Clone ID: MRT4577_151299C.1
caggatcctggcagggctggggagaccanaacctctgagcgcaagccagcaataagctaagccttgtaagtcagcgcgacaggtgaatcgaacctggcaaatgacacaacggacttgactccgcacgatttggacataagagccaggtgacctgcctgacactctttttggaggggggggcagccacgcgccatacaggggc

SEQ ID NO: 56259 - DNA, 456 bp, Zea mays
  Clone ID: MRT4577_15129C.1
atggccgaccgggtgaccgttgtttcgccgcgcgacccgtggcctttctccactgtcacggtggacgatctggaggcccttgttgctgatggtttgcttcgtcctctctccggtgacccgcagccagagtggatggcccctccgagtagagccgcctcgtccccgccgccggggtatgtgctgagcttcgtctcttttcacgagcgagggttcggagtgccggcaagtcatttcatgcgggcgattctgcacgtctacgagccaagacttttcatccgtctccaggaggtggggtttcacaagccttccctgccaccggtcctggaggacacggtggaccgagccgcgcagagggtcgccgcggagaagaggaaggagaagaaggacgcgaagaaggctcgggcccgcgagcggatgcaggctcgggacgccttggagaggcttcgtcgtcggtag

SEQ ID NO: 56260 - DNA, 864 bp, Zea mays
  Clone ID: MRT4577_1512C.1
cagtattcttgcagctcgatcagcgcaaaattccgagtgcacaagccttgctgcgcatcgtctgtgtgcgaagaaaacaaaacacttgacacctccaacctctcatagtcgcaaccatgtctagatctgtggagtctctcgtagtcggccgggtcaagagagaagttctggactgcttcagcccatgtgtgaagatggtagtgacctacaactcaaacaggctcgtcttcaatggccacgagatctacccgtcagcagtcgtgtctaaaccaagagtagaggttcaagggggtgacttgcggtcgttcttcacattggttatgacagacccagacgtcccaggaccaagcgatccatatctaagggagcaccttcactggatcgtgactgatatacctgggacaactgatgcctcattcgggagagaagtcgtaagctatgagagcccgagaccaggcattggtatccacaggttcatctttgttctcttcaagcagaagcgcaggcagcagcagactgtagcggcggtgccatcctccagcagggaccatttcatcacgcgtcagttcgctgcggaaaacgatcttgcccaccctgtagccgctttctagctcttattgtccacctgatgtgctgaaaggccttctgatcttctttctaggaagccaatgaacttattctacattaaattctcctgagccctaccgtataaataaaccagatgcattttgctgattgtattagtattagagtgctttgtacgtggcaagaatgagaattacaaatggtcaaaaaaaaaaaaaaaaaaaaaaaaaaaaaaaaaaaaaaaaaaaaaaattaagaaaaatgcaaagagtgattcga

SEQ ID NO: 56261 - DNA, 575 bp, Zea mays
  Clone ID: MRT4577_151300C.1
ggttgagcaagtttgccttcttccacaatggatcttgattctgaagatgaagacgaggagctgaatgttccagtagtcaaggaaaatggcaaagctggtgggaagatacagaaaagtcaagaaaaggcagttccttgaatttttcaaaaagaaagatttttacagatatttttaataatgacctcggtggaccctatgcatttcttgagccaccttttgttcaaagaccccttctatataagatacaggcaaggagaaaaaagaggattcagataactgtatcactttatgcaagtacaaatacacaagcacagaatatctttcccctttatgtacttttagctagacctaccagtaatatttcgcttgagggcattctccgatatatcgagcgggatgatgcttggtggacgtgtacatactaatattaatcgtctcgaagcttccgatacactcagttctcacatgaacgagtgggatggacctccctagaaaccaaacacccctgaatcgcagtcatcatcagagaacgacaatccgtgtgctgttgcgatgtagtagtactactgaagcac

SEQ ID NO: 56262 - DNA, 485 bp, Zea mays
  Clone ID: MRT4577_151301C.1
tttttttttttttttttttttttttttttttttttttttttttttttttttttttttctttaaaagtttaagaaggttttggaaggggggggggggggaaggcggggcagggagggaacagagcgaacaaagccaaaaaaaaacaagggggaacaaggaaaggagaaaagggggcaatcggaaagacaacaaaaccaaagggggggaggggggcaaaaaccggggaaaccggcccacccaaaaaaaaatagacaaccctttacaaaagaggtctagaaaggacaaacaaggcaaacgggcccacacagcgaaaaaagtgacccaagaagtccgaggaggggcccaaaaaaaacagtattaaccgcatctactgggcgagcaaaaacccccacatggaaaaaaaacggcggcacagggggaacaccacgaaggcccaggaaaacaaatagaaagcttcgcccatcaaacccagaaaaggggggaac

SEQ ID NO: 56263 - DNA, 374 bp, Zea mays
  Clone ID: MRT4577_151302C.1
tcacgcctgcgtgtaccgggctggtatacaggggtcgaccccagcgtcctgtgctgcaagctccacgtccggctgagcatagacgaaggcgccatgtacgagaggctggacgtgcaccttcacgcttgccaccaagcggatgtggaggcccagaggtccttgctccggagcaccccagcaccatcagcttgggggccgtcgtggccgtgcgggccttcggcacgccgttcgtggcgatcgcggacagggacaagttccggctgggccgggtcagctccatggccgcggacatggtcttgctgaacccggcccacgccaaggtcatgtcgatctacgaggagatcgtccggccggtgctgtcctcctacatcgac

SEQ ID NO: 56264 - DNA, 372 bp, Zea mays
  Clone ID: MRT4577_151303C.1
ggcaacaaatggggattgggtgcagattaatcacacggaaagagtttaaaaaaacaacttgtgcagtgtatggaaatgtaccacacagacacatgcatgtccatctccaattttccatacaaaacaagggtggaaaacaaaccaatgaaatttggtgcaggggaacttttaaaaagctgaggccggcgggaaacacaaacgcacaaaagccttcctttctgtgaggtctgcccccaccggagcaaataaaaatttaatgaaacgccttggtggcgacgagggcggccaccatgagcaggttggcgaagcccctgtcgacggcctgccggttaaatccgcgccgcccccacgcgggggacgtcggcgcaaccg

SEQ ID NO: 56265 - DNA, 417 bp, Zea mays
  Clone ID: MRT4577_151304C.1
ggcaaccccaaaaaccccctttttttctttaggataaacttaaaaaaaacccgggcgggggaaaaagcttccatcgacccccaacccatgcggggggaggcaggggtctgggggacccggggataaacccagccctaacaacggacacaaagggcccttgcaataaaaaacccgggggggcccccccaaacgggacgaacgaaaataaccccttgggactagggaaaacatcccgggagcaaaaaggaaaactgggccgggggggcccccccgtttaattcctccagttcccgggggagttgccgaacccccccccccggttgccccccccgtaccccccccccccccccccggaacccccccccccaccgtagcccccccccccccccccgtaaccccccccgccttaagggggcc

SEQ ID NO: 56266 - DNA, 268 bp, Zea mays
  Clone ID: MRT4577_151305C.1
ggtggtcttccatgtttttttatcgtggggtttccttgaatttggcggggccttcgacaaaaaggattcttgggggacctggttatttcttcaaaattgaggccgtgattccatctgtcagaggtgccggtccaccctggttttcttatctagggggcgaaggcaggttcattgtgtttgggtcccaacccgttttttaattgggcaacgttagccgcccccccgtttttggtttccccaaagatttggaaaaagtgggatccctttt

SEQ ID NO: 56267 - DNA, 303 bp, Zea mays
  Clone ID: MRT4577_151306C.1
ttttacgttttactatacacgaaaaaccactatcggggagggaatcttattgaactaatttgcacacgatctgagctcgtgaacgtacaattgacaaattctatgaccggtgctcaatcatgcaactacagacattcattgcgaactcatgcaactaataacgcacctggttgcctgccgaatgactgttcacctaaccctggtctgagaatctcttccttcgctatcatgacctatgactgaccacgccatctatgtgctctatcatccatgatatgacccaccaccaatctcagacactac

SEQ ID NO: 56268 - DNA, 263 bp, Zea mays
  Clone ID: MRT4577_151307C.1
gttgtggttaataaaagtaaaaacggaaacacagacggtgtccatgttagggagtattacagggggaacccggtatctgggcacaatcacaaaaattaggtgaacacttagagggtactcacgaggaattacttttggatccagactgggaacatgggggagggggcccgaggaaggattccttaccgccccgattcttacgtaaatttaactgggtcaccatcgggtttaaggagtcgtaaagatggggcggagattttttt

SEQ ID NO: 56269 - DNA, 1995 bp, Zea mays
  unsure (1)..(1995): unsure at all n locations
  Clone ID: MRT4577_151309C.1
taccctcgcgggcctgccggggnnacagccttagaattagaaccatgtgagctcaaagactagagactgcaatggcgatacggtagccttgcgcccccagcccgggacaaagccagattcccatccgcgccggagcggccccttgcagaaaggccacgcacctttcctaaacgttgccccaccccacgcgctccgctccccgacccaaaagtcgcttttcgggtggctcgctagggttctttctttcttttttatcgcgtcgcgcgcgcgattttctggccatgtcgtaccagcctgcccccgtctgactccattcactccccttctggctggctgcttgctgctctgcggcgggcggcctgcgatagccagcttccgcaacagttccacccgacccgatggacgaggacgagcaggcgtcgcaggccgagggggacacggacaagacgccggagccgcctcggtgtgggaggcacccgtcccagctcctcacgggcatctgctcctcctgcctcatggagcgcctctcctccgtgcgggacccgcccgaggccgagatcgtcgaggtcgccgccgagggctcctccggcgccgcggaccggggcaggctgcgcaagacgctcatgctgctcttccagctcgacgactcgaccggcggaggcgccgcgcgtccgtccgaggggggcacccagtcggcggagtctcagtccgtttccgcaggaggaggtcctggtcgaggtggcaagcgcagggggcccgggtcgtggctccagtcgattcgtcgtctgccgaggggagcgctgcggtgggggaggaacgcggcggcctctgccagggagccctcgatcccgccgcgcggggtggcggtggatctctcgccccacggttccggcggcgcgcatgcggagcggaagcccagcttccgccgctcgtgcgagtggacggcgtcccggggcccgagcagaggctccctgcccctgcagccgccccgccactcgtgggacgggtccatggtgggcagggcgttcgcgtgctccttcgcctgcttagaggagcgggagcccccggatggggcgacgaggagcaacgcggaggaggcggtcggggagacccgcgccgcggctgctgagagcacgaatggcgggcactcgactgatgcagggggcgatgccgatgagcgccgtctcagcggaaggaggtcttgtgacactgggacggagatggccgtctctggtgctgggagacggaggtccaacaggtggagcagggtgtgggatcggagcataaccagtcctctcaaggagttcgttaggaagggggagcatgtcctcgagcgctccctctcggaatcgaggagggaagtccggaggggtaaaaatgcggaggcagcagacatgggcggcgaaactcaacccggccgcaacggacatgtgccgggcagagcaagccaaggctcaatccgaagctcacaggctgcaagcaatgtggatgtgcacagtttccggaccgattggctcaagaacagcaagattggcagaagcaggagcgtgcattacacatctcctgggaacctggacaacgggatgcttcggttctatctgacaccaatgagaagctccagaactgcgaacagggggaggaggagaagttcgcgcttgtttgcgcgaggacttttcggtttcatataagtggctcaagtagagcgttagcccatgccatgcgtttttttaaagatggcagcagcagaagcaacttttctttggaatctacttggtttctaaggattggcatcctcgtaagttgtccgtcatatcctttcttgtaggtgactgtttgatcccaacttagactcaaagaagcttcattgttagttgcagatttgctgctcatttctttttaaaatgtttcttatagatggaatctggacacacctgtgcagatcagtatcacaatgtaattatttttgttgataataatatttgcaccatttgttcc

SEQ ID NO: 56270 - DNA, 864 bp, Zea mays
  Clone ID: MRT4577_15130C.1
gctctataaagaaagaccagtccgacgctctttatatctctttcgctctctctctctctctctctctctctctgcacatcctcctctcacacatccccctctgttctgtttactctccattgctcaagacaaggcccggccggcagaacatggggacgcaggcagcggagaacttcgaaccgccggccaaggatgtcaggacggatgagcagaagaagattgacgactggctcccgatcacgtcgtcgaggaacgccaagtggtggtactcggccttccacaatgtcaccgccatggtcggcgcgggggtgctcagcctcccctacgccatgtccgagctcggctggggccctggcatcgcggtgctggtcatctcgtgggtgatcacgctctacacgctgtggcagatggtggagatgcacgagatggtgcccgggaagcggttcgacaggtaccacgagctcgggcagcacgccttcggcgacaagctggggctgtggatcgtggtgccgcagcagctgatcgtggaggttggcgtgaacatcgtgtacatggtgaccggcgggaggtcgctcaagaagttccacgacgtgatctgcgacggcaagtgcaaggacatcaagctcaccttcttcatcatgatcttcgcgtccgtgcacttcgtgctctcgcagctcccaaacttgaactccatctccggcgtgtccctggccgccgccgtcatgtcgctgtcctactcgaccatcgcgtggggcgcgtcggtggacaaggggaagatggtggacgtggactacaacctccgcgccacacgacgccggggaaggtgttcggcttcttcggggcgctgggcgaggtggcgttcgc

SEQ ID NO: 56271 - DNA, 338 bp, Zea mays
  unsure (1)..(338): unsure at all n locations
  Clone ID: MRT4577_151310C.1
cccacgcgtacgtccacgcgtccgcacagtgatgcctttcgtggtggaagttgtccttgagattgcaaaattgtgtgatgtgtattcgatggagcgtcttcttgatgatgagagtgagggacaggttttatcggtcctgagtgaagctgggctttttggttgtggtggattgctaaaagatatggttttcttctgtagcaccgtgaatggtcgtacatatcatgatcggcaactcgagcctgattggcatatttacacgagtccttgagatgntcaccaatgagctaggtttatcaaatttcaactgcacatcttcccgcagcgacctgaaagaatag

SEQ ID NO: 56272 - DNA, 137 bp, Zea mays
  unsure (1)..(137): unsure at all n locations
  Clone ID: MRT4577_151311C.1
ccggggcaacccgtttgctgctttgnactgcatgggcgcgctttcaggacaaaggttcttgtgattggtggnaggagggagcgggttggnattagcctgctgtttcaacttgcgggtggctgctgggggtgtgggtt

SEQ ID NO: 56273 - DNA, 510 bp, Zea mays
  Clone ID: MRT4577_151312C.1
ttgggtacctcgaggccggccgggatgataaaaaaacgcaccctggtaccgtgagctctctagccccctgcccccctactcatctgccccgacctcctacatgcaacgtacgtcccgcctgcggccgcccgagcgatgatgcatcatgccgagcctctcctgaccactgcgtgatcgcgcggctgcccgaccaggatcatggacatggcctaccgcgccacaccagccactacgagtagctatccaagacggtgctcatcgtgcactcccgcgtggaggacgccaacctgctgctcggcgcgttcaaccgcaacgagatgagcctggactccgagtcgaccatcacggtggagctcaccaccatgaacatcaacaactccgactacgtgggctacggctcgatccgccacaacgacggtgagggaaggtaccgctgtatcacgagagctcacgaccacgcagatctgcatcagatccgcccgctacgacgagtattatcacggcaccttc

SEQ ID NO: 56274 - DNA, 350 bp, Zea mays
  Clone ID: MRT4577_151313C.1
gatcgatctagcagacgttgtaatgagccaacaaacaaaccggtcgtaacggcgttcgggatgagtacaaagcgtgtgcggtcatggtggttacgcaatgcatctacgccgctctagcgctcttgtccaatgcggcgtttaccggcggtatgagccctctggtgttcgacgtctacaggcaggccgttggcaccattgtacttgtccccgtcgtcatcgctgtcaacatgaagaagattaatgagatgacgacaggccttggactgaccggcttgtcgctggtcttactcgtcttccttgtcggggcaactgtgaaccagtgcatgtactaccaaggggtgaatctgggc

SEQ ID NO: 56275 - DNA, 395 bp, Zea mays
  Clone ID: MRT4577_151314C.1
cgaaggcagccgcgcatgcacggaagttcaaaatttacaatctgctcggaggccaccgatatgtacaggcaactcccgtggcagggcttgttccgccaggagtggaaacgcacctggcccttcctcaccgaaactccacctcaccggattcatcatcaccaatatgacggtcaacttcaccgaagacgatctcaagaactctaagttcgtccaggaacacaataagaagctactgaccaaccaagcgcaggagttgttataaacgcatgtttggccatccaattctggaatgcttctgaatcacaaatctagacccttctttgacgtttacttaatcgaaatgcttgcactctatgttccattagtgatgtaataataggcagatggattgaacc

SEQ ID NO: 56276 - DNA, 467 bp, Zea mays
  Clone ID: MRT4577_151315C.1
ggccgcttttttttttttttttttctttttttttttttttttttttttttttatttttgatttctttggattttttttttaggtacaaggcccacgtgctccgcgagcggagcgcaattgacgatccaagaaccaataacgaatcacaaaagcgaaagactaatgcgaaaccaaacaccaacaacatacaaaagcaataaggccagaagacaatattgagccaaccttgaaactagatccacctactaccgactacgacttcccacggcacatcggaatttgattgatggttgactactagcagcaaacacgacacacataacacaaaaacgaaactcggtacatgcggcaaatggtggacgagcattctgttaaaattctacacacctttcctagccaccagaaatcaacctcctaaggccctcaacgatgaacgttgcatacaggaccaaagaacgctgaatggc

SEQ ID NO: 56277 - DNA, 823 bp, Zea mays
  unsure (1)..(823): unsure at all n locations
  Clone ID: MRT4577_151316C.1
cggccgcccagtgttctgaagcccgatgcgtccgatcaatcagagaaaatcatccctccctatctctccagctcttcttcctcctcctcctcctcgtcagctcccgagttcttcctgagcgaagcaagccaaggcaagctaggtagcagatccaagaaggagaagcgatgtcggacgtgacggcggtgatggatctggaggaggaggagccgcggctgtcgctcccgccgggcttccgcttccacccgacggacgaggaggtggtcacccactacctcacccccaaggccgtcaacaacgccttctcctgcctcgtgatcgccgacgtcgacctcaacaagacagagccgtgggatctccccgggaaggcgaagatgggggagaaggagtggtacttcttcgtgcacaaggatcgcaagtacccgacagggacgcgcaccaaccgcgccacggagaaggggtactggaaggcgacggggaaggacaaggagatcttccgcggcaagggccgggacgccgtgctcgtcggcatgaagaagacgctcgtcttctacaccggccgcgcgccccgcggcgataagacgccctacgtcatgcacgagtaccgcctcgagggccagctgccccaccgcctcccccgctccgccaagaacgattgggctgtttgccgggtgttcgacaaggacttggcggcgaagaatgcgccgccccagacggcgccggcgggccgtcgnnggtcatggaggacccgtacgcccttcttcgacgtcgacgacttcctcacaaccccgacctgctcaacacgccgacctgccgatgctct

SEQ ID NO: 56278 - DNA, 485 bp, Zea mays
  Clone ID: MRT4577_151317C.1
acatataaaaatatctaattaataattattaccagaaattacataaatattaataacctatttttaaataaaaatagcatataatgactatcattacaaccagtaatttaatccaatgcatcccatcattcctcatactaacgggaaacaaatgggtcagcttaccatgtccgaatcgactcggagccgtgatttaaacaaggctatccggtttgaaccattcacgaaacaccatgtaacaccatgtgttcgtcgttctccccaaaatcaagcaataacaccccggcaagaacatcagtgtcgatcttcccaacaagtgacgagcatcggtccactcattttgccgaacacgaggcgggcgccgttctaggacttcactgtcttcagcgagcagggagggtgcgacgaccatgctaaaggcgagatggaggccaggcgtgctctaggaaccgagcagggtgggacactcgggacccaaatgtgga

SEQ ID NO: 56279 - DNA, 456 bp, Zea mays
  unsure (1)..(456): unsure at all n locations
  Clone ID: MRT4577_151318C.1
ccgccctgtttttttttttttttttttgcaccacatatgctttatattccattgcctaaattaccngggccaggggtcgaatcaccaccatataactaaacatccatgccaacacttgaaaattttaatgtgcaatgccaaataagttcctattccattgggcctactatggataataaaggcctaaacccctaaaatcatatcttacaaacacgtatagaaagattgtctttacaccctatgaattcaactcgacacatattatttataaaaaaaaagattccatggacataacgttggctggtggaggtcctcatttcttttaacaagcatcatttttttttaacggggacgattttaaacaactctcatataaccaattttactgttgcgtttccatgagatccatgtctttacctacacttgacacgttcatactatcttattttacaccca

SEQ ID NO: 56280 - DNA, 1728 bp, Zea mays
  Clone ID: MRT4577_151319C.1
ccggccgggttccgatccagcagaacgacaagttggcaaccacgcgcgtctctcgtgcttctgcttgcatcacggcgctgtaacctgcctgggcgatccatccatggcgtcgttagccaccagcacggccgccgccgccgccgggccacgcccacgcccagaccggccgcacgtcgtgcttgtgcccagccccggcgtaggccacctcatgccgatggccgagctggcgcgacgcctcgtgtcgcaccacgccctcgcggccacgcttgtcaccttcaacctctccggggaccctgacgcgaagtccgctgccgttctgtcctccctccgtgcagcaaacgtttccaccgccacgctccctgcagtcctcctcgacgacctccccgacgatgccagcatcgagaccgtgctattcgaggtgatcggccgctccatcccacaccttcgcgcttttctccgcgacgttggcagcaccgccggcgccccgctagccgcgctggtgcctgacttcttcgccaccgcggcgctgcccctcgcctccgagctcggcgtcccggcgtacatcttcttcccctccaacctcagcgcgctctccgtcatgcgaagcgccgtggagctccacgacggcgccggcgccggcgagtatcgcgacctcccagaccctctcccgcttcccgggggcgtgtcgctacgccgcgaggacttgccgagtgggttccgagacagcaaggaatcgacctacgcgcaactcatcgacgcgggccgtcagtaccgaaccgctgccggcatcttggcgaacgctttctacgagatggatccggcgaccgtggaggagtttaagaaggcggctgagcaaggtaggttcccgccggcttatccggtgggcccgttcgtccggtcaagctccgatgaaggctccgtatcgtcgccgtgtatagagtggctggatctgcagccgacgggatccgtggtgtacgtttccttcgggagcgcaggcacgctgtccgtggagcagacggccgagctcgccgccgggctggagaacagcgggcacaggtttctctggatcgtgcgcatgtcaagcctgaacggcgagcactccgacgacatgggccgggattactgtgacggtggcgacgagaacgatcccttggcatggcttccggaggggttcttggagaggacccgcgggcgtggcctcgccgtgtcgtcgtgggcgccgcaggtacgcgtgctgtcccacccggcgacggccgcctttgtgtcccactgcggctggaactcgacgctggagagcatctcgtccggcgtgccgatggtggcgtggccgctgttcgcggagcagcgggtaaacgccgtggacctgtcggagaaagtgggtgtggcgctgcggctgcgcgtccgcccggacgacgggctggtcgggcgcgaggagatcgcggcggtggtaagggagctgatggagggggaggacgggcgcgccgtgcggcgccggacgggggacctgcagcaggcggctgacctggcgtgggctcccgatggctcgtcgcgccgggcgttggaggaggtcgtcagcagatggaaagcgggggctattcgcagagcggcggtataacctggtggatttggttgcttttctcttggattttgttaagaaaataataacacttctgctatatttcagctgatgatatcaggcagcacacttgtctaataattatatgattt

SEQ ID NO: 56281 - DNA, 228 bp, Zea mays
  Clone ID: MRT4577_15131C.1
gttggaaagtaaatgaggggtaaaaacagaggaccatgtatatttaacacgcaattttgaataaaatgcctccaacaatggcttgtttacttatccacttggttgtttaataggcatttgtatacaatcatttttacataaaaaaatagggcatgggccaacatttattagtggaaccattttttgaagttaatgtcccgggtagggatcaccacctaatttatgctg

SEQ ID NO: 56282 - DNA, 446 bp, Zea mays
  Clone ID: MRT4577_151320C.1
gctggtctaaagggccatccaacgttgaaaaaatcaaagatgggatctgaccaccaaaaccgacgtggggggtggggactgggcagggggactcaaatcaaaattcaaatgcagcgggaaaaaacaaagcgaggtttaagttcttgggcgcatccgcaaatggaccactacggaaaattcaaatgcgtaaaacaatgcccaaaaaggcgtggggacccctaaaaattgcaattttatcaaattaagcaaagcaaattggcaaaaaaatttttttactcgaaaatctatttgttgttgttgttcttcttggtggtggtaaactcgctaaactaaaatcaactgaaaattaaaaataaggcaaactaaaattcaaagagtccaaaaagcaaaaaaaaccgggacaaaagggccaaaaactattgcccttgccctcccaaaaaccgcgg

SEQ ID NO: 56283 - DNA, 237 bp, Zea mays
  Clone ID: MRT4577_151321C.1
tcgtgtgctttggactggacgacttcttccccatgtaccactacctggctacctacccagcccatcgactggcccttggaacgcaatggcgcttggcaccaacttcggcggtggcgcagcagctggcgtattcggcggggcgggattccaggcggaccgggcggtcacgtttcttccgttgaagaggggcaccattttcggcattcacgccggcgacccgtttaagaacaacgggcc

SEQ ID NO: 56284 - DNA, 258 bp, Zea mays
  Clone ID: MRT4577_151322C.1
gacccacacgtccgaatactcaactatgcaatactacataatacattaggccattcaaccaaacatcttacattggtaaccaggaaccattcaacaaccatatcctctatctctacacacatccttataacaccacaatattcaatcaatactcacacaacaccttcaacaacataatctaccaacaatcaatcaaatagttacagctaacctttctaaatacctccatcaacaacacatattttccattcaatcaac

SEQ ID NO: 56285 - DNA, 327 bp, Zea mays
  Clone ID: MRT4577_151323C.1
acattccaacatgaattgtattatgaaaagaaaggcttaagtcccaagcaaacatgaaccaagcctgcccaaaaaagacccggcaagaatatgagaacagaagaaaaagaacaaaaccggaaacaactcccaacaaataggcccccaaaagaagacaaacagtcccacattgaccaggctgtcaagaggcaccactgagaagacgatcgcatgaaaggacatcccacgaatgaacgaaggctagtaagccacggcgaatatatgcacgactgcagaataccggcacgggccaaccagagtcctcgcggggacgtgaaccagaacggg

SEQ ID NO: 56286 - DNA, 1528 bp, Zea mays
  unsure (1)..(1528): unsure at all n locations
  Clone ID: MRT4577_151324C.1
ccgcggagggggcagacagagagtaaaggaggcaagtaggcgactccggcgagagaagtgcgggtgcggccatggcggacaagccgagccgcgcgctggtcgtctacgccgccggccacgccgcggcgctcatccccccgccgggctccgcagccgcggggagccacctcgacgcgttcgcctcccgcgcctgctgcggccttctcaccctacgctccccgccgacttcccatcctacgaccggcaccgaggataatagcagcacgattttggaactggcgcagctgctcgacgtttacgatcatctctaccccggaaagaatgcggaaagtggtcaagaagttgcccaagtggatccacaggagctcgtggttcccaagctgtttgagaggtttatgggcctgagagctgccttggtcaccagttgcccccatgtcagctccttcgcagcgaatcttggtttccatgtttttaaaaccaatgattttgccccacaatctggctcgtccagcattactaaagaggatggattaatcaaaagagcatttgatcttctaggattctcggatggggatgtgcaggaaacatctgaattcgatctagtcttcatgcatgttgccatggagaacacaagcagcaagttaggaaagttaggaatgaagacagatatcaatcggctcgacaaattagttggtgcagtcttggaatctgcgcctgttggttcagctattgcttcgcgtattcatgtatctgtgattttgagctatgggtctgcttctggaaataaggatgagttttcccttttaacctcttcaaccgaaacagattcagacttgaatctactgcgtccacgccagagctacacaatgaaaacagggcgtacattagatgatgtcagacttcatcatccaattttgctggcacagtggcaggacggagtaacacgtgttgatttggctaaagggttctcttttgaggagtttatgaagcgtggtggaaaccttgccatgcttgctgagcgcttcctgcacgaggtggcatttaagctctggaaagcgcctaaatatggggcttgaggagggtatccagcgttgactgacttggcgtcgcggataaataatcgaagcaccagatgagttgtcgctttgtaacggaaatgacttgagtgatgccggacactgtggcgtgtgagctttttatgtgaagtgtaacgtggacaggccctgatgcgataaactgtttggacatcgttactggttcagccaatgagaacctgtagcaaaacaatatgatgttttcttatggtagtttggaatggatggagttacatgcattgagcactgtaattttgataatataagattatctctggcagcctctctattctactcactatttcgaaaaaggaagtnnnnnnnnnnnnnnnnnnnnnnnnnnnnnnnnnnccatccttggtgaggatggcgagctagcgaaagataaggtcatgaaccatggctatatgaagaattgagaacctggacagcgc

SEQ ID NO: 56287 - DNA, 647 bp, Zea mays
  Clone ID: MRT4577_151325C.1
ttgggtacctcgaggccggccggggataggatcaaagcatcctcttaattcttcataagcacgataagcggttctaaaatagcatgaaggaaaaaactcaatctgccgggcctcatttaattgcttatgcgcaaaggaaaaggagaaaattcaatgttttagccggcctgtctcctcttactcttcctttcgcagctgtggacgaggcgtcgaggcagattaaggaagagcgtctacctcgtcagatagtgagagctgtacctaatatcactgaccgataacattgcgcatggtagtggtaaagctcctctacttcgcgcggcgctgccgtgcggcagatacatgtggagagcggcgaatatgtttggctgtgattgctctcaataatcatacaaggcactgccgacatctggaacacattaagtgaaaatgtcaaaggagtgattgatattttttcggagtgatgatattggagaacatttatcctaatatgtgatgaagttgctattatccagagctatgatgatgcaggagacttcactgataaagaaaggctgaaaactaggattcatatgaacctacttttttatacaattgagagagcaattgtccttattggtactatactactcttaatcatgcataaa

SEQ ID NO: 56288 - DNA, 571 bp, Zea mays
  unsure (1)..(571): unsure at all n locations
  Clone ID: MRT4577_151326C.1
gtggnttgatcggcccccccttattatattcctggctccgcccctgtttctaaccccgtaccctctgcagcaaactaacatgtatggtgtgtcacatggtgactttggttccggttcgtaccttttgtgaatatctttttccctgtttgccatacaagtctgctgttttcacgttgctttacctacttttggctctgtttagcagcaaggtctgcttgattcgtgccagcacctgctgaacctacagctggatcattttcaagatcttatgccgaggtaaggggcttggctggtttatattggcatgccctgcaaatcacaagaccttcttagtttggtacccagtgggcacagaccagatggggaaaataaaacaacatagttaaaaggaggggaactaactgacgtcaatacacatttgtcaagttagttggattcacttggtgctgtctgagattgcagtgttgcacattcatgttaagtaacttttgagacagctagtatttgttgggagccagncttttcatgcttatgaacagttcacatctgagttgatcagntatggaaaata

SEQ ID NO: 56289 - DNA, 146 bp, Zea mays
  Clone ID: MRT4577_151327C.1
acggacatacccacccatgactctccttcttttttccacccattcctttctcatctccccccgcgctctataccctctagctctctccgcttccaccaatttattctacccctcctcaaagcttcaattcaccaacctttcctccc

SEQ ID NO: 56290 - DNA, 2397 bp, Zea mays
  Clone ID: MRT4577_151328C.1
atgtctgaggagaagaaggttgctgccgaaatgaagttgagtctttctgaagagatgcatctgggttttcttcgatctatgtcgaagaccaatacagaaaagatcactaaagaaattttggaaggtttatctgaagacactggtgatagcgacagttatgatgcggacagtggtggtgaagactccgaagaccgcccctggcgaccaagccatgcggttttcggcaaatcaagtattaaagaaaatcatcttgtcaacatgaggggaagatatttcagggatttgtctgttgtaagggccgacgaaggagagaagacttacccaactcctgaggaagatgaagtcgtaatatttcgaagcttcttgaaagctggactacgatttcccctgagccattttgttgtggaggtgctgaagatatttgaaatctaccttcaccagcttatccccgaagcgatcataaggatgaatatttttgtgtgggctatgaggagccaaggcttggaacctgatgcaaaaagcttctgcaacatgcacgaattgttatacgagacaaaaccctggggtaaggaacaatatcacaacaactttggctgctacagcttcggctctcggtctgggtcaagctgcccagtgccgacctttcgaaagagatggccaggcgactggacgacggaatggttttacgtgaaaaatgacttgaaatctcgagaggatataaagaagatcattatgtatcccatctggcaacgcttcggcctgcgaaggccgaaggtggaaatgaatgaagcagccgaagaatgccagagagccttcggagttgtctgctcttttattgggacgagggatttaacacaagaacatattgccttcagagtatggcctcttgcggataattgggaaatgccgaaagaaactattaaagaaactgacgaaggtgggctagtccggctgaagtacacattcaagtatggagacaaatttgttgaaccagatgacgattggttaaagagcattgagactgtaagtgatgaattgcttggggcatattcgaaggccgaagatactgctttgtcagcggccttcggaggccgaaagaggaaaagacttaaccgggtatttgatgcaatcgggttcgtctaccccgactaccgttatcccattcgagggcagaaaagaaaaggcacagcttctgcgaaagaaaaagctgcagctgctcctagtgagccagcaccgaaaagaaaaaggataaaggttctcacacatcggccacgctatattgaaccagcctcggtgcctgagttcaccggagatacctcttcggccaccgaggctgaagagccaaccctgctgccagaagtcgcagaaatggccgaagcgccaacaacaaaagaattggaggaaccaaaggttttattaccagaaaccaaagagatggtcgaagcgccatcgacagaaaagatggaagaagcaaacggatcaattgaaggagcaaaaatatcagaaattttaagtccttcagtagaaattgaagtagcaagaattaaaaaggggccaacagtgaccccaaaaagaaaaagaatggtcaatgtgttggatgttttggaaacaattaaacttccaagcacaactcccaagaagactgctgaaatttctgaggcacttgctgaagtgtctgttgctgaagctccaaagcaacaaactggagttgaatctgggccttcagaaccaaccaaggcaataccttcggaagcagaagaaataaaaattgcaaaggcaaccgaagaactgaaaatgtcggagccagcttcggttgaagaaattgataccgccgtccccgaagcttcttccaaaacatacgattatattatgcgtcatgcttcagggaaaaagttatcggaagaagaagtttttgaagccaatcactatgccaaggaattgaaatatccgaagggggcattaatattcaatgggacggatgaagaggatttcctatactgcctcccagacaataaagaattatccgtctgccgggagatgtctagaagcatggggtttctgaagctcgaagctggcttaagcgctatgacgaaagaagatctcgcggatagtcttgcgtacaatagcctgaagggtttaattctaagcaacgcattgagagcacaaaagagtgccgaggacgagagctatgaaattgcgttcaacgatcttcgatcagaagttattaaactgagaaacaaagctctagaaaaagataaaattctgcttacattgatagacaaggtaaaaaaggacgaagctgcttcaaaggttcaggccgaagctcacaaacgtgaaattaaagatcttcagaaacagctagctagagctagagaagaacgtatatgtaatacctaa

SEQ ID NO: 56291 - DNA, 217 bp, Zea mays
  unsure (1)..(217): unsure at all n locations
  Clone ID: MRT4577_151329C.1
taantctgngcatcgnanngaagcanagcagctccctcgctncgatctattgaaagtcagncctcgacacaagggtttntctacgaatggtttagncttatgtaatactatatatctgtaaaatgcaacaaatgaaatccacntgtattaacagaaagatcccagaattgttgaggggggatcaagttgcngnatgatacagatagtacaatgactt

SEQ ID NO: 56292 - DNA, 603 bp, Zea mays
  unsure (1)..(603): unsure at all n locations
  Clone ID: MRT4577_15132C.1
tacctcgnagccggccgggnaagcaattctcgagccctccatctctctttgctctcccctgccgtatcctccctctcccataagggacagggacctaaaggagtatggtcagtggacaagtatactagaggagtccaagttcacctagacaggaagcgcagaaggagaggtctgcctatgacccaacaaagctcgataccaaccactaggaaggagtaggtcgccacaaaccactagcttccaaggattgaggcaggactcaggactctagctactttgttcgtagctccctcccgcgtcacaaggagaactagcctaccctaagccgaaagacgaaaggactcgcggcttgcgtgtggatttgtgtgacttcgacaccgttctctgtcctcgggagcgaccccgggccacgcgtctccttcaggtggaaggggtagatgcgacgtctctgtggtggcgtcgtactaccacacaaggacgcggttcggtgactcgacgttgaccaaggagttcgttggcgagatggcgagggagactccgaccgaggggctgcgccatgactatctacgtctaccaagagatactcgaggcggtcgttgttac

SEQ ID NO: 56293 - DNA, 551 bp, Zea mays
  Clone ID: MRT4577_151330C.1
gaaaatttaagtgatgaactactcagggtttattcaaaggccgaagatactgcattgtcagcagccttcggaggccggaaaaagaaaagactgaaccgagtgttcgacgcaatcgggttcgtctaccctgaatatcgttatcccattcgagggcagaaaagaaagggcacgacttctgcgaaagaagaagctacagctgttcctagtgagccagcaccgaaaagaaaaaggataaaggtcctcacacatcggccacgctatattgaaccagcctcggtgcctgagttcaccggagagacctcttcgggcaccgaggctgaaaagccaaccttgctgccagaagtcgcagaaatggccgaagcgccaacaacgatagaattggaggaaccaaagattttattaccagaaaccgaagagatggccgaagagccatcgacagaaaagatggaagaagcaaaaggatcaactgagggatcaaaaatatcagaaattttaagtccttcagcagaaattgaagtagcaggaactaagaaggggccaacagtgacccg

SEQ ID NO: 56294 - DNA, 431 bp, Zea mays
  Clone ID: MRT4577_151331C.1
attcggctcgaggcagaaccgaccaggctggaagatattgatgtgttagaggaagaacgactgaacacagtaattcagtcagctagataccagcagaccttgaagcgctaccatgataaagccgtgcgacaccgatcctttgcagtgggagacttggtccttcgccgaattctaacgaaggagggacgacacaagctgtcaccactatgggaaggaccattcatcgtatcagaggtcacacggccgggatcacatcgacttactcagatggacggcacagaagtggggaactcgtggaacatagaacacctcagaaaattctatccttagcgaggcctcaaaattcttgaaggaacattgtactctgtaatctgaggacttcatcatcaataaagtttttgtcttccaaaaagaaaaaaaaaaaaaaagga

SEQ ID NO: 56295 - DNA, 524 bp, Zea mays
  Clone ID: MRT4577_151332C.1
tgcacgacttcgccgtcaccgagaaccacgccatcatcccggaccagcagatcgtgttcaagctccaggagatggtgctgggcggctcccccgtggtgtacgacaggaacaagaccgcgcggttcggggtgctgccgaagcgcgccaccgacgcgtcgcggctgcggtgggtggacgtccccgactgcttctgcttccacctctggaacgcgtgggaggacgaggccacgggcgaggtcgtggtgatcgggtcctgcatgacccccgcggacgccgtgttcaacgagtccgccgccggcgaggagagcttccgcagcgtgctgtcggagatccggctggacccgcgcaccggcacgttctcgcggcgcgcggtcctgagcgacgccgaccaggtgaacctggaggccggcatggtgaaccggcagctgcttggcaggatgacgcgctacgcctacctcgccatcgccgagccgtggcccaaagtgtcgggcttcgccaaggtggacctcgaggccggcaccgtc

SEQ ID NO: 56296 - DNA, 364 bp, Zea mays
  Clone ID: MRT4577_151333C.1
gttggttgttaccataaagaaggggaggccacttgagccatccaggggaaggggtttaagagttttggttgaagttgtccgaaggaaggagggaaaagccggaaggaaaaaatagaaggggttttttggccttttcctaacttaatttaaattttccaactgtaatggttttggtttgttaaggttgaacttaaaaaaattttggttttgtgctgaacggggcttttggtttgtaaaattaaaaaaattaattaaatataaaaaataataaatttatattaatatatataaattatatataatatataaaaaaaaaaataattaaattggggggggcctttttaagggtccaagttttctttcc

SEQ ID NO: 56297 - DNA, 365 bp, Zea mays
  Clone ID: MRT4577_151334C.1
gtctagcattcgttcaacggcttagcccatcacgactggttattcatttccaagctagcgtttcatcaccccagatagcacgacctgatcttgcccgacaaggagtatagactgatgttatttgttcacttgactactgcgcatgttggtgataagaaaaaggtacatgtcacccatgtctacaccatgtcacggtatctgacactctacgactagacgtgatttaatgatcgaatggtgggaaactacaaaatactactttcttggaactgtacaatgttaacggcaggacacgaacttttgttgtagaggatgaacatttcactttccgtgctgcgccattatgaagtactactacaagatct

SEQ ID NO: 56298 - DNA, 220 bp, Zea mays
  Clone ID: MRT4577_151335C.1
ccttgcatatttgcccacatttagtgatggtttacacccaatatagttgaaataccattacatacccgaccaaaaaacctggtgctggttaacatgataggacgaacaccctagtaaattaaacggccgggacggcagaaaacaggccgggagcaaaaacctttgggttattgtctcttgaatcggtaaaggggaacgggggggggaaaaaaaagaggag

SEQ ID NO: 56299 - DNA, 221 bp, Zea mays
  Clone ID: MRT4577_151336C.1
ccacacgcgtccgttggttggttcggggtcctgatttactgttggtggacctactctagtagaggtggatgtggaacaggcgcactggttccatgtgtcccaaggggccattttgttttgccacgtaggcccatactacaattggcggttttgtgttgcatatggggttggagagggcctactccaaattcaggcatgtgggaaatgggacctttggattt

SEQ ID NO: 56300 - DNA, 2425 bp, Zea mays
  Clone ID: MRT4577_151337C.1
cattgggtacctcgaggccggccgggattccgagtgccgccccgccacccgccaccgcctcgagtctctcccgcgggcgcgaggtgcacgctcgagtcaccaccagaagggcgcggaggaggccggctgacaagaggcggccctgtgcgccaagagccccggcgcggggaccagaccagaggcggcggcgtacgtgcgcgcgtgtgtacgtggtgcgtatggggtcgaggcggcggagacaccaccaccacggccggtgggttgtgccctccgtggcgccggcggcggcggctttcgcagcggcggggttgctcctcctcgtcgtcgcgttccattgcttcctgtcgctgccgctaagcgacgccagtggcggctcccgtgtcttccggcgccccaacccgccgttcctgttgaacaagccagcggatgtgcgcagaaatgtaatcggtgccgtggatttcgctgttccaagcggtgggagcaagctcggggaggagctctgggagtcgaaggcggcgggcaacttcttcggctgcagcaacgccaccaaacagttcgccgatgccgaggctgtgaccaagtcggaccgttacttgatgatcgcgacgagcggcggactgaatcagcagcgaacagggatcatagatgctgttgttgcagcccgcatactgaatgcaacacttgtcattccaaagctggacgaagaatccttctggaaagatgcgagtgactttgcggagatatttgatgtcgattcattcatatcctcactttcgaatgatgtaaagatcatacgccaagtacctgacaggaatggcaaaccgccttcgccgcataagatgcgtattcctagaaagtgtacttctaaatgctacgagagccgagtgttgcctgctcttctaaagaagcatgttgttcagttaaccaaatttgactaccgattgtcaaataagctagagactgatcttcaaaagcttaggtgtagagtcaattatcatgcactaaggtttacagacccaatcctccaaatgggtgaaacgcttgtccaaagaatgagggggaaaagtggacgtttcattgctcttcacctaagatttgagcctgacatgcttgctttctctggttgctactacggcggtggagacattgagagaagagaacttggtgagattcgtaagaggtggaagaccctgcatgcaagcaaccctgacagagaacgacggcacggaaagtgccctctaacaccagaggaagtagggctcatgctcagggcattgggatttgggaaggacgtgcacctttatgttgcatcaggagatgtatatggaggcgaggagacactggcacctctgaaggcactcttcccaaactttcactcgaaggaaactctagccaacaaggagttagctccttttttaccatattcatctcgcatggctgctctcgattttatcgtatgtgataggagcgatgtcttcgtgacaaacaacaatggcaacatggccagaatgttggctggtcgaaggagatattttgggcacaggaggaccataaggcccaacactaagaaactttactcattatttctgaatcggaccagcatgagttgggacacatttgcatctaaagtccagacctttcaaaagggattcatgggggagcccaatgagattaaactaggaagaggcgaattccatgagcatcctgtagattgcatttgtgcaaaatcgaagggaaaaagcgtacagagcaggcctcacctagttaaaggcgctggagaagctgtggagaaccattctattgatggggaacttgactggaaggatttggactacggagagcatacacccttgggcaggggggattcatcgaatgaaaccgaatcagacgatgtccgtattggtggatcagacattcctgaattggaggatatgatgtcagactagacacaaatagatagttcattatagttttttcttttatttacaaatggtttggtgataagttattttgaggacagaagatgctacatggtttatttttctcctgtttattcttggagattgcagacacatagaaacaagtttttgccagctcgacaaacaagaaaggcctggaagagctagagcttcctacagaaaagacaggaagcctatagttcggtatgaggtaacaactgtacagtgtatgatggaccctcaaacagtgctgactggggaaatggtttctttttcatatagcttgtaccgtagatagaaacaaaagaaacccttcttatgttttactgtgtagcgttataatgagattttgatgggtctatcatcgttcttgattttgttttttttttctttcataaacctgttcccaaaaaaaaaaaaaaaaaaaaaaaaaaaaaaaaaaaaaaaaaaaaaaagggggggcgccc

SEQ ID NO: 56301 - DNA, 774 bp, Zea mays
  unsure (1)..(774): unsure at all n locations
  Clone ID: MRT4577_151338C.1
gcagtacagttgatcatattatctgagaagtactatactagtagaagcttgtagcagctagctacagccaatagtgtaagctccaacacagacaaatatacttgcgccagtagtgagtgattctagtacatcctcggatcgagcttggcagcatggcttcttccccgtccgacctaaccctagactacaagcccaacggcaacggcaacggcgccgcgtacgcagtgacgatccccaagccgccgcaggagacgctcgtggtggacggacaccaccaccaccaccagcaccaccatctgacggcgggggagcagacgacgcagaagctccgggagttcctcgcgcgcctggaggaggagcggctcaagatcgacgccttcaagcgcgagctccccctctgcatgcagctcctcaaccacgccatggagtcgtaccggcagcagctggaggcgtaccagatggggagcctgcagggcgcgccggcgaggccgctggtgctcgaggagttcatgccgctcaagaacatcgggatcgacgccgccgccgacaagatggggaacccgacgtcggagaaggcgagctggatggagtcggcgcagctctggaacgggcccgctgcaacggcggacgtggccgccaggggcccgcagacgcccaaggagagcgcggagtgcgcgcacggcgccgcaggcgccggccacgggcagcgcaacggcggcggcggcggcgcgttcctcctgttcgccaaggacaagaccgcgtncgtggcggaag

SEQ ID NO: 56302 - DNA, 300 bp, Zea mays
  unsure (1)..(300): unsure at all n locations
  Clone ID: MRT4577_151339C.1
aaaagacagaacaaannaagaaaaaagacaaacgctttttcagcattttcgaaccaaacgnnaaaccaagancaattgaaaagattttccatatggaccaccacaataaatagtacagctacctaactactcctttgagcaaaatcgtcgtaccaagccaatatattgccccaaaaatatattcttcttacaacaaaatctgacactttttaacttccttataactaactatccaaacgtaaaagtaccttcaacactatcaaattcaatcacatttcacaaactaaagcataaaacttt

SEQ ID NO: 56303 - DNA, 296 bp, Zea mays
  unsure (1)..(296): unsure at all n locations
  Clone ID: MRT4577_15133C.1
tangcggctccggctggactgaaaccggcaacgtgtccgcaataaccatacgatccgccggcaccgccgcctgcacatgatgaatgaagccaagctcaagaagatggccggcgctggacgcaccggacggaagggcagcttgcaccggaagaacaaggccgttaacaagaccacgcccaccgatgacaagctgctacagagcaccctgaaaaggatcggggggaacaccatgcccggcatggaggaggtccacatcttcaaggacgatgcagctagacgagcacagaacgccaaag

SEQ ID NO: 56304 - DNA, 313 bp, Zea mays
  Clone ID: MRT4577_151340C.1
tttttgttctctcttaatctcttttttcagaaaccccaattcctgcctttaaatattaaatccggccccagaaggacatgacccacagcaccttacaaatgaacctgaaccccaagagccaccatgggtccattaaggggggggccggtgacaggatcttttttaagcgccggttttttatttatacgactcgtaggcgacctcttgaattttgtgcgccattccctgaccggattagttgcaactgcaacaagagcaaccgcagttggggccccatttgcaggtgtttcaaacccagccccccccctcgggg

SEQ ID NO: 56305 - DNA, 266 bp, Zea mays
  Clone ID: MRT4577_151341C.1
ggatgaaagaagttaaaataaagtcgaaatttttgaaatgaagctctctaaataagcccttaattgcaaagtttattgtcgtgttggctttggagagcttcttaatttcaaagagttggatttaaaaaatcatttatacgttacgtctgattatttaacatatttgaatctggttgttttgattcacatgaaatctctcttcgcaagcaaacagaactaacatgagactgtattttcttttttctttcttacatgaaagtgtattg

SEQ ID NO: 56306 - DNA, 260 bp, Zea mays
  Clone ID: MRT4577_151342C.1
ggggaccaaaaaaatcatttacttgtccataaccttccttttttccccttcatataaagagggaaacaggccaaatctccaatgggatgctggaccctacaagcttttgtgggggaggacagtaactttcttatcaggggcattgaggtcgttataactggtggaagcctggcttgtaggtgagtttaactccaagcttggtgagggaggcgtagatcctggggtggttgtcttagaggtgggggtaccttaggacgcag

SEQ ID NO: 56307 - DNA, 175 bp, Zea mays
  Clone ID: MRT4577_151343C.1
gggattacctcgcatctattctcttcattggtcacacaggaggctgtcgacttgttcgtggtacatatcttttagaagccttaccaattccatgccccattttttagggatgctggttaaataatgtttttgggcttgttatccagttttagactgatgacttttgactacatgg

SEQ ID NO: 56308 - DNA, 472 bp, Zea mays
  unsure (1)..(472): unsure at all n locations
  Clone ID: MRT4577_151344C.1
gtaaaattgaggagcattactgtattaccgatctngtgatttacgtatngaaacgggggggacaattcccaagaaggaagaggaggagaaagattacaggggcaagaaagagccaaaaaaaaaccggtggtttggggggggggggggtcgtctattatgattggaatgaggatgcggncgggggtgccgttggtggcggtggtggggtaggccaggccaggtnatgtttttatttgangtggggggagagggtgatgttgttggctgaggggagttgggagattttgacgtggtggttggtggtgagtgccttgttgaggtagagcacgaagttgtggtagaaggggatgtatttgggcatgggggggtggtgggggagtatgatggagttgttttatagggtgttgttgtagtcgatgaggggggttaggtttaccaggtttaggagggggttgtggtagttgaggtagtt

SEQ ID NO: 56309 - DNA, 370 bp, Zea mays
  Clone ID: MRT4577_151345C.1
ctgagcctgctgctcgcttttcgattttccctgactgacatatactttggacaattggaattatgggtaatgcctaatggctacgaactggttcttaatcctgaaacccgtactgctttttttcttgccaactttctcatcgtcttcttgtggctgttaatcttcatccaccttattcatgtatgtcttcacatgatacaattcataatctaattatatatatataaatagtactattacctttttgtttgtatatactatttatctttaactgatgtaacataatgtgtatacatctaaaatttatcttaaaataaatttaatataatgcttcccctcttaattatccaatcttacctactctttcctt

SEQ ID NO: 56310 - DNA, 272 bp, Zea mays
  Clone ID: MRT4577_151346C.1
gactcctatagggcgattgggttcttcgaggccggccgggatctcatcttggactaccaaatagcaatggagccgacggaagccgatgcgtcggcggctgcgtgaccggcaaccgccgccgctatccttgggagggacggctcgtccgagatcgccgcggtcgttcgactccacaaccggcagcgctgtcacactgggcacctacctataggagctgatgctgtcggccccggcaccgcccgcgtttcagcgcctcagcttctcctatgcat

SEQ ID NO: 56311 - DNA, 428 bp, Zea mays
  Clone ID: MRT4577_151347C.1
gatgaatcaaacaaaggagctgcgaatttatatttataattttttttctctttctttttttttctctttttggccccaaaaaatttaaaatttaaccccccccaaaaccaatcgtaaatggtcccgcgaaagcttttgaaaccacaaactttttccacaaatttgcaagagggtacccttccctgcaataaaaccgcacgagggggcacaccagggaccccaaccttagttggggcaagggaagttttttgggcaaattttgccccaattgttggggataagggtgaaactaaggggccccttgggggggatccccaggacattggccttgatgggggtgcaaaggcccaatgcgggttttaggtccaccaccccctccagcggggggcaacattgctcgtgctggggtaggcctaccttgacgaggc

SEQ ID NO: 56312 - DNA, 641 bp, Zea mays
  Clone ID: MRT4577_151348C.1
ccctcttgggggtttttcactatcatatggtcggggtaacatcactattgcctgttttcttttcgcttactcatcttctctatttttgccccctcttgtcccctgcgcccccccgggggccgccacaggggaggggggtcacccccccccgaggaaaggcgctcccccccggggggggggggcccccccggggccccgcccgggtcaacccggcaacaggggggtccccccccccccccgggggggggggcccctccctttggggcaccgggggggcccctccgggggggggccggagatccccccccggggcatcctgcccccctcgggggggggcccccccgggccacaaaaaatcggcgccggaatcccccaccagagcccggggcccccccccgtgggggggccccccgaataaacagggggggcctcagggaggaacaaccgggcccgcccccgggggaagacaagggcccaaacccaccccggtcaaaaaaccccccccccccgcccttggctcccgccgggcccaaccgggaaaacccccccccccccgggggggggtccaaacactggggggggaggagcgcccctcccccggggaaccccacccccaaaaaacggggggggtccgcgccccc

SEQ ID NO: 56313 - DNA, 232 bp, Zea mays
  Clone ID: MRT4577_151349C.1
tcgggtggctaaccccgcaaccctgttacagactgctacagttgctgggctgccgccaacttgatccgacaaacccagttgtcttataccaactacacatcattggaggagccatctccgacattgcttattagttggaataaagtagtgaagtttgtcgaatgatgtatgtcgactggctagaaacaggaggagacattagcaggttgtggggttagccacccggacgcgt

SEQ ID NO: 56314 - DNA, 368 bp, Zea mays
  Clone ID: MRT4577_15134C.1
gatgtgcggcaaacggatggtataagttatggtgtaccatcctgtgataacatgggttctgcattaagacatgggtgaagggaagatgctagcttcttaaattaggacggactactaactttgagcacgcagggaaaggtaccgaagctaagtgtattgttataacagggtgttgataaaactggtggatccgtgagatttggagggacgggtagtaaacaacttgattgagctaacggggacaaaatttgtagggggcaattaatctatctggcaaagtcataaactacgtgctacatgaatttgaacgagttttcgactttcatgggagagacgatcttgcatttggtataacaagtcctctccac

SEQ ID NO: 56315 - DNA, 458 bp, Zea mays
  Clone ID: MRT4577_151350C.1
gcaatggataacattcaagccaaagcccgctactacaatgcgcaactggacaaggagctgagcaaatacccgcaactgaatcagttccaggccgcgacgggtgttcccaaaacctacttggccttaggcgccggaacgttcatgactgcaatgatatttttcaactttgcgggaaagcttctctccaacgtcctcggttgggtctaccctgcctatcgctccttcaaggccctggaaacacctagcaaggatgatgataagcaatggctgacgtactgggccgtatatggattcgtctccattctcgagtcattcacggacgtccttctatactggttcccattctacttctttctcaagtctgtcttcttgctttggctcatggtaccctcatttaacggtgccgccacgatttaccttagaatccttcgtccgttcttggttcaacatcgtggcga

SEQ ID NO: 56316 - DNA, 333 bp, Zea mays
  unsure (1)..(333): unsure at all n locations
  Clone ID: MRT4577_151351C.1
ctctcactgactgactactgtaataccagagggcgaacaacttggggcggcgggtgaagaagagagttatgtgcattcgtgggccgggggcancagacagagatagagagccatatcaacggaccagcagccgcagctctaagacgagatgaacgactctgcctgcagcggagctaggctgactccagaggttcgtttccaaccaaccgacttctagatatgcactttatacctcaccaacaaggtgctgaacacgcgcttaacctggaccgacatcaccgaggccgacctaaacaagattgcgccatggaacctccctagcaatgccaaaat

SEQ ID NO: 56317 - DNA, 271 bp, Zea mays
  unsure (1)..(271): unsure at all n locations
  Clone ID: MRT4577_151352C.1
cgtctaatggaggcatagaatgcaaatgttttatttgccaaacgtgaactaagtgattanaacactttctcatatgagaaactcacgaagtctttttatcagttactactttttgtatactcgtttgcttaatctctcgatattcattctccaatgattccatatcatttaattactacttgagttacttcattatacttttcctttccttttattggtaattattcatctttattttaacttattttgtattatttatcttctaattctt

SEQ ID NO: 56318 - DNA, 409 bp, Zea mays
  Clone ID: MRT4577_151353C.1
ccggtctgaggctgaggctgccgcaccaatctctgggtctctacgctcttcggctgcacggagtcgtccgcagcgaaggaggttgaggacatgctgtgcggcgcacatcgccccgagtcagagcatctacgtcaacaacctcaacgagaaggtgaagaaacgatgacttgaaaagatcgctttatgccttgtgtgcacagaataggaaggatactggatgtggaggacctgatactgaccaaagctgagagggcaagcatgaatgaaggtgagacaaattacaggtggtagtgatgctttccgcgcggtcgcagaacttcgattatcctgaccctctttgtgcggacagtacgctacgactctgtcacactgcattgcaagcccagacggaacttatgcagctaacgta

SEQ ID NO: 56319 - DNA, 328 bp, Zea mays
  unsure (1)..(328): unsure at all n locations
  Clone ID: MRT4577_151354C.1
aattcggcacgaggacgagacctcgacgtcgaccacacacacagacccaaccgagagaatggcagcagcagcgatgaacgggcactatttgcatgcatttggcagggagaggacgccgctccacgccgccctcggtgggcgcagaggtgggtgactactactgactagctactgtttctcgcgagcgctgaaagcctgagactgtgcatgcggacatgcggatgctgctgcgatcgacgagctggatcgatcgacgaccgggcaggtgagctgagctgtgggtgacgggaggcgggggactggggatatatgangcgtgggggggggg

SEQ ID NO: 56320 - DNA, 566 bp, Zea mays
  Clone ID: MRT4577_151355C.1
cattgggtacctcgaagccggccgggaattctaatgcaaatctactaccaggctcccatcagctccagcctctgcgtgcagcgccgctggcgattccatagcattcgaccctgtacccctgcgcccaccctacctccagccaccatgaacgttcaggttgacacctccaaaaaagaggaggattcgttaccggaatgctaacgcctgctctcagatacacaaaccctgcatacgagtgaatacacagacagccgcgacctcaacctgtctgaggtccatgacttgattctctgaggacaatactgcgatgtactctggtaactacacggactggaccagagatgaaggaaagcatcggatcatgggtgcgctaggatagagaagagaactcccatatatgggcacttgtggtatccagagacacgactatactgactatgtatacgactctttcttcaaggcatacattggctcacatgaaactgagactgatcaagatcaggtttagaagacgaagagggacgacgacgagggaagtcttgattaccagagcgatgacaactatg

SEQ ID NO: 56321 - DNA, 471 bp, Zea mays
  unsure (1)..(471): unsure at all n locations
  Clone ID: MRT4577_151356C.1
actctttgcaacgatttattaagtgcaatttatcggacattcggcaaaacacacantgtcgagtgccattcttgatgaataatgacgggaacatttctcacacctgagaataagcaatatatcgacgaaaattagtaattctcgtcggttcttgagaaccgatgggactttgtggacaaggtttaattaatttctgttgaccaccgacgagaatcaattaattccgtcggcttttagtggcccacgagagttatgcaagctgcagcggacacggccgacgtgtgcggcacaaagccacagggtacaacaacatgagcctgtctgtctgtgatcatatgatgttgcggcatgttccgtcgcaggggtaggggcagtcgatcgccttgacttgagctcgaccgaagtaccagtcgcccactgacttggcaatccccctgctttggatggcgggggaggcacctgccgcgtggc

SEQ ID NO: 56322 - DNA, 189 bp, Zea mays
  Clone ID: MRT4577_151357C.1
cgggacgtcaccctaacaggtcacagcacggcccaccttcggctcccccaccgctgcccttctccggaccacctccccctacacggatactcatccccctctcccttcggcgggcacctgcgcccgctctccatgtgccgaacccccgacggccgggtcggcagggacctcagccacgccagagcgaac

SEQ ID NO: 56323 - DNA, 549 bp, Zea mays
  unsure (1)..(549): unsure at all n locations
  Clone ID: MRT4577_151358C.1
cnncgtgntctggggcagtgtcgctcnnncccancgtggcgtgggccantgttcttctgtctttaccgctcnnnttggcgccggtcttttcntccctcncttccttttctctttttnnttgggccccgttttccggcggcgcgcggccttgttctttgnncctttnngaggggtggncttggtggcgggcttggtgccctcggggacggcgtgcttggcnngctcgccggggggggcgnggcgccccgcggtctggttctcgcggggggtggcggtgggcttcttgtttttgcgcgcccgcttggcgggctcggccgcgngcttctcgnngntgtcgttggtggnggggttcttgttgggcctggccttgggcgggntgccgntgtcggggtgcgcctgcttctgcnccttggnggtgttggtcttgttggtcttcccgggcttcttcgctttctttttcccctttttgccctcgccggcctcctttccggcgggcttgcccgccggggggggctttttgggcttgggcttttttcccgtcggggcctt

SEQ ID NO: 56324 - DNA, 1027 bp, Zea mays
  Clone ID: MRT4577_151359C.1
gcagaaacgttcatgatccagctagtgatgttccagcaccctggagttctcgtcttccacagctgtccccttacatgaatgataatacagatggtgacacattcgctgattcaccgtgtggaagtccaccatggaattctcattcacttgatgaaataacagatgctgatgtatctcggatgcggaaaaagtggggcagtgcacagatgccttttgctggtgtcagtgcatctcaacagccacgcaaagatgtttccaaaggattgaagaaactgtggaaatttggtaggaagactagagggggtgatggtttagtaaatgattgagtatctgcttccactgcctcagaatacgatgaagacatggaagatgggcgggatctggtagtaggatcttctgatgatttcaaaaagtctcgaatgggttatcttgcttcatatgatgattttgttgaggatgaggtttttgctgaacaagaacaatcactacgcagctcaattccaaacccacctgcaaatttcagaccgagagaagatcaactgactggaagagcgccacgttctttcttctccctgtcaacattccgaagcaagggaggtgatgccaggctcaggtgatcctcagaaagtcagaagacaccagaggtggagtgtataaaatatcttccgaggttaggtatgagtatcaaattttcagggcggtacgcggacgctgctagcttgtgattataaatatataaatatatatgttgtgtatctatggcaattcatataagctaccagttgagccccccattgttactgtttgattattctttttccgtaatattctttgacctcctgtgtagagttggacttagagatctttttgcagtctgttcttccaactggcccaaaactactgtatttttcgttgtttttgtgaaaaaaatgtatctccctcttgtttcttcattcccaaaaatcccaaattcaaaaaaaatggtaattttggcaattgtagcaaggaaactggggtttttcaaggc

SEQ ID NO: 56325 - DNA, 354 bp, Zea mays
  Clone ID: MRT4577_15135C.1
cccacgcgtccgcccacgcgtccgactcgaacccctggccggagcgtgcggcccgcgcccgcctatggacgagtaccagacgcgccggtcgccggcgggcgagcggttcatcggcatgttctcgtcgccgtcgacgccctcgtcgtccccgaccgagccttcgttcgtcgctggggacgaactccacgaggacgacttcctcttctcgtcgccggacgccgcggcgccacagcccgacgggcccaggagcccgggccggggagcgccgcaggggcatctcggtcttcttgccgccctggcgctacacgagggggacaagaggctcctggttcgcggtggccacggcgggggagt

SEQ ID NO: 56326 - DNA, 2971 bp, Zea mays
  Clone ID: MRT4577_151360C.1
gtctaaaatcttctgcaaagccagttgaagaagccttgctgaaaaataaagttattgtaactagtgcattgtcagaggagcatgtctgcatgatagacaaggaaatcacagctgttgctcttccagcaccctgtagcaagtgaacagattccccagaatgatactagagcgctccatacaaaagatattcacactcaagcacaagtgactggaatgaacgatcagccttcacgatcatttggaagggtatctggtggtgttaatcctaaaccaaaaacctcatccaattcccaaggttatgctaaaggctcatctgttaatctcgagagtgcctctacgaaatctccgatccgtggagttagtttggaaaggtatcgtctaccacggaagtcggtagttgtatggtaaaagattacagctggttctgattcagattcctctggtcgtcagggaaaaaatttgagcaggcaatcatccattaccgatcatggaactaaacttgcaggctagagtgacaagacccggaaaagggaaccatgatctgcatggtaaattgcaaatgaaggccaacgatctgtagacattacgagctgaacgcaagttgccaacctccaggcgagccaaagttagttaggtgaacgccagaaaggtcctctatactatgtgtgataaggccgagaataggtatgtaatgcacagttcagtcaaaacaaagtgtgaaagaaaatataacaggtaaagattttgatgcccgttcgcaggttaggtatgagaataatcaagtatttaacattagcacaccacaaaaacttggcattctaagtttagaagagtctatagggaagttttatgagcattatatgcagaagagggatgcaaccctcaaggaaggctggaagctgcagagagaggagaaggaagcaatgttaaaggctatgcatgacagcctagaacggagcaaggctgaattgctaacaaaattctctcggtctgcagatgtcccggactcaacttatgtttcccattgttctcagaagattcctccttcgcgatcagcaagaaaaaataaagatcagggggttggctcattcttggtggaagaggaaatgaatagtgactacctatctggtgacggttcttccaggagtgctgattccaggaagcatttttcaaataaagttgcttctacccaaaaggcatctgctggtcctatccataagcgttcatcaagaactgcaagctctggttatgctaatcgcaggaatccaccagaaaatcctctcgcacagtctgtccccagtttctctgacttgagaaaagaaaatacaaagccttcacctggagtcagtagagcgagtgcaagagttcagcaaaagtcttttgcccgtagcaagagtattattgaagagtcaaagagcatattgaaagaagatcaatcgaggaggtcacaatctatgaggaagaaccaaattcctgatgagctaaaggacatttcgtcagggaatgatgatatttacaattgggctccctcaagaatttccaagaatcaatcagagggaccttttgcttacagtacccgtagatcgggtccaccaaagccttttcttaggaaaggcaatgggactcaccctgttattggtatagctggatttcaggctgcagctgccatgatggcgaatgccctccatcatggtgacagtggtgattttgaagatcagcaagaggattcccctgatgatgccaaagaagaggaagaatatgaaagcatggaagaaaatcttagagaaagtgactttcctgctgattctgacagtgagaacccaagagtgagtcatgaatttggaaattcagatgacccagggtcagaaaacggtgatgctgattttccaagcaaagcacctgccattggtggtactaagttcactgcttttacaggaaatgttcacaatccagctggtgatgttccagcaccctggagttctcgtcttccacagctgttcccttacacgaatgataattcagatgctgacacattcgctgattcaccgtctggaagtccaccatggaattctcattcacttgatgaaataacagatgctgatgtatctcggatgcggaaaaagtggggcagtgcacagatgccttttgctggtgtcagtgcatctcaacagccacgcaaagatgtttccaaaggattgaagaaactgtggaaatttggtaggaagactagagggggtgatggtttagtaaatgattgggtatctgcttccactgcctcagaatgcgatgatgacatggaagatgggcgggatctggtagtaggatcttctgatgatttcaaaaagtctcgaatgggttatcttgcttcatatgacggttttgttgagaacgaggttttttctgaacaagaacaatcactacgcagctccattccaaacccacctgcaaatttcagattgagggaggatcagctgactggaagttctcttaaagcgccgcgttctttcttctccctgtcaacattccgaagcaagggaggtgatgccaggctcaggtgatcctcagaagacaccagaggtgtggtgtgtataaaatatcttgtcaagttaggtatggttatcaaattttcagggtggtacgtggatgctgctagcttgtgattatatatatattgtgtatctatggcggttcatataagctaccagttgagccccctccattgttgccgtttgattattcttttttcccctgtgtagagttggacttttgcaatctgttctttcaactggcccaggactcctgtatttttttcattgtttttgtgatatatctgtatctccctctcaaaaagaaaaaaaaaaaaaaaaaaaaaaagctacaaaatatatggtcaaaaaaaaaaaaaaaaaaaaaaaaaaaaaaaaaaaaaaaaaaaaaaaaaaaaaaaaaaaaaaagaggaggaaaataaag

SEQ ID NO: 56327 - DNA, 429 bp, Zea mays
  Clone ID: MRT4577_151361C.1
aaaattggggaaatttttgggtggggttggaaaaaaaaaaagggggggggggctggatgggtccccaaaaactttaccccccccctgggggggagtttgccaaatgacattcccccgccaatggggaaaatgttgtttttgggcccccattaatttttaccaccggccgacttaattgggtcaggtgacccttttggaggggggggggactttttctttggacgggtcccggagcgggttgatgttccccatgttgaacatggactgggcaaaacttgcaaaaaaatttttttgggtggccccaaactggtcaacaaaggggcccggggggcccttcccttgggggaaaaacttgagctcctggtcggagatgaggaagcctcggttcaccccaatgttgggggaaaaattgttgtcaaaggggtccgg

SEQ ID NO: 56328 - DNA, 643 bp, Zea mays
  Clone ID: MRT4577_151362C.1
agatccgccgccccgaatgagacccggctcactcggtcggaaatcgccaccgcccgcccctatttgaccagccgcttgttccttccgaatactcggtgctccccccttctattggctccgtgctgagctcctcgtggagaacgatacgcatctcgagctcgccatactgcattggatccatacgtgcctttctgtctcacgttcctcttgctgctcgccgcgcactgtgtacctgctgctcatgccaaccatgctgtcgagctcccgcatcatggctcagacattgaaagaacagatttcttcgaccacgatgtcctgtccatcctctggagtggccgcggactatgctcaggctgtgtaaaacattcacgagcgaaggcagtctacttatctccttacaggaacatacacaggacaggtactcatgagagatcacttcatgatgcttgctccacaatcattctcctttagaacacaagagttgtctagctgatgagactcttatgctagtctcctgcatggcaagatcacggagatcagatcgcaagcggtctgctcacggtatggactgtgcagggatacggctcttctctcccgcgtgcgaagtgaacagcacgtgtgtgatctgccaccatctgctcga

SEQ ID NO: 56329 - DNA, 208 bp, Zea mays
  Clone ID: MRT4577_151363C.1
cacgggcgtcagatcgagagcggggggagcagctcaaaaaagaagaacgaagaagctaatcctaggctctagactagacatgcccgttgttgccggcgggcaccggggacgcggccgccagggggctgggcgcgggcgcgggcgcggccggcgtgtggcggtgctcgccctcgtacgtcaccaccagcatggccgggtcctcgtgccg

SEQ ID NO: 56330 - DNA, 341 bp, Zea mays
  unsure (1)..(341): unsure at all n locations
  Clone ID: MRT4577_151364C.1
aagtggttcgagtgtgtgagtcatcgcctgtcgtggactccgaaatgaatggtgatatctatgctctgagcggggtcgaagcccagagtgaaacctttctggtggatggctttctgaagcgatacctgatcgtgcaatatcnngttcgtctgactttgggtatagtgggcgaaaggaactaatcgaatccatctagtatgctggttcccttccgaagttttctcctcagggatagtctggagctcctacactgagttctattcgggtataagcccaatgatttagaggcattcggggtgcgcaaacgctccttcgaccttatttcttcaaactttaaaata

SEQ ID NO: 56331 - DNA, 496 bp, Zea mays
  Clone ID: MRT4577_151365C.1
ttccgaaacggcactttcacttctcttgccatccttgccagctcgcacatccaagtagacgatgggcccgcggctctgctttccttccttgcctcctcctcagagaacttttcggagcgtcccactccagcagtcatccgatgcggctgcgatgtatgatcctgcgccaccgtggtggcgatggaacctcgccgtggatggcttgaacacgctcccgcagaaccgcgatacggagggccataacaacaagctcaagttgttgtagccgctcaagctgggcagagagatacacttcatggtgttccacatgctccaactctactgtgaagaacgaccacgaactggtgtgtgcctcccagatatgcattgaccaacagcgaattcgcctccatgaaatccatgctaagagatcagagaaacggccttcttcgtgtccgacatcgagtacttcatgggcgcgttcatcgtacaggacatctggaccatcatgatcaag

SEQ ID NO: 56332 - DNA, 456 bp, Zea mays
  Clone ID: MRT4577_151366C.1
agttgagaaaaagtggtaatgaataatgaataggtatgaaaaataatatttatagttgtagtggggtatagggggagtatttagggggaatcgctgcgggagatgaaaaaatagggggaaaatagggggaaaagtgatataggggggaaaattaggggtaacggttgcggatagcctgagccgcccagcaattcctcctaccttcttcgtgtttctctcgtcgccggcatcaaccctccctatcaggcccgacacaggctcctacacggctggaaccgccccatcgcattctccttcttgatcgccaccacaactagatctgtcgctgtcgtggctttcccggtcggatccaccgctgtcgcgacctcccctgttagatctgtcgtccctttagtcagatcgcctgcttcataggttctctaagtctatatacttgtttccatcctctatgaaaaa

SEQ ID NO: 56333 - DNA, 184 bp, Zea mays
  Clone ID: MRT4577_151367C.1
gagattctggaaacctcaagtcaatctctgaggaccataagagaagaaagcagaataccagcagcagggattattggtggacttcataaaggaatgaacggcaaggctgaagaaaatgcaaaaatgagagatcgtttgacattgcgagactccaacgaacagttggagtcaattttctacgaaa

SEQ ID NO: 56334 - DNA, 634 bp, Zea mays
  unsure (1)..(634): unsure at all n locations
  Clone ID: MRT4577_151368C.1
ccggggtaaaaccccacgcagaggttagttttgttctcagcattggggcggggggggcgaatctcttaagaaactggagtgcataaaactgattattctcgaagctcttcgatagaatcctgcagccaccattggtaatgaggcgttctctgccaccagacaagttgccaggcaaggtgcaatcgtttttactgagggatggggaggtggcatcctgcgaccgatgtattggctaatgtatacaacactatgacagatgcaatgctttctagcgaccgggcaaggagcctaacccaacaggggatgcgtgcctaacaacgacatgagcatggatgcgctccactagcttggaccgtatcccaactactaatagcagtgggcctgaccccgattatagggtgctccggtttgatgccttgaaatgctcgaaacttccagactggcccgaactatggaaacgctcctggaaatgcccagaactttcaacctggtcctggtcctaactatggaaacactccttagcaaggtgctacaaccaatgctcaatatcaccacaataactatcatncaaatgtgggtggaggaaacatgcctggtaggaactaccaatcttaaatttttgttctaagatgaa

SEQ ID NO: 56335 - DNA, 2605 bp, Zea mays
  Clone ID: MRT4577_151369C.1
cccaaggttcgtggcatatctgtaggcatctaccccgtcttcgtcgtccgctcctcactagctaccaagaggtcgccattattgccaacatagagtgtacgtggatgtctatatatatgcctacttgcacccatatggcataggcgttcgatccccttagcgcggaggagagctcctccggttcttctctacccttcgcatggaagttcttgcattgcttcgttgcttctctagtttcttccttctacgtctttccagcatacgcatgcccctcgtccgccggttcacgaggcatcgtctgatgatcagtagataataagcaatataatactgatctagaatcgagttgttgtactcttcgcagataggcgcgtgatggcgctttcagcttcccgagttcagcaggcggaagaactgctgcaacgacctgctgagaggcagctgatgaggagccagcttgctgcagccgccaggagcatcaactggagctacgccctcttctggtccatttcagacactcaaccaggggtgctgacgtggacggacgggttctacaacggcgaggtgaagacgcggaagatctccaactccgtggagctgacatccgaccagctcgtcatgcagaggagcgaccagctccgggagctctacgaggccctcctgtcgggcgagggcgaccgccgcgctgcgcctgcgcggccggccggctctctgtcgccggaggacctcggcgacaccgagtggtactacgtggtctccatgacctacgccttccggccaggccaagggttgcccggcaggagtttcgcgagcgacgagcatgtctggctgtgcaacgcgcacctcgccggcagcaaagccttcccccgcgcgctcctggccaagagcgcgtccattcagtcaatcctctgcatcccggttatgggcggcgtgcttgagcttggtacaactgacacggtgccggaggccccggacttggtcagccgagcaaccgcggctttctgggagccgcagtgcccgagctccagcccgtcaggacgagcaaacgagaccggcgaggccgcagcagacgacggcacgtttgcgttcgaggaactcgaccacaataatggcatggacgacatagaggcgatgaccgccgccgggggacacgggcaggaggaggagctaagactaagagaagccgaggccctgtcagacgacgcaagcctggagcacatcaccaaggagatcgaggagttctacagcctctgcgacgaaatggacctgcaggcgctaccactaccgctagaggacggctggaccgtggacgcgtccaatttcgaggtcccctgctcttccccgaacccagcgccgcctccggtggacagggctaccgctaacgtcgccgccgacgcctcaagggcacccgtctacggctctcgcgcgacgagtttcatggcttggacgaggtcctcgcggcagtcgtcgtgctccgacgacgcggcgcccgcagcagtagtgccggccatcgaggagccgcagagattgctgaagaaagtggtggccggcggcggtgcttgggagagctgtggcggcgcgacgggagcagcacaggaaatgagtggcactggcaccaagaaccacgtcatgtcggagcgaaagcgacgagagaagctcaacgagatgttcctcgtcctcaagtcactgcttccgtccattcacagggtgaacaaagcgtcgatcctcgccgaaacgatagcctacctcaaggagcttcagagaagggtgcaagagctggagtccagtagggaacctgcgtcgcgcccatccgaaacgacgacaaggctaataacaaggccctcccgtggcaataatgagagtgtgaggaaggaggtctgcgcgggctccaagaggaagagcccagagctcggcagagacgacgtggagcgccccccggtcctcaccatggacgccggcaccagcaacgtcaccgtcaccgtctcggacaaggacgtgctcctggaggtgcagtgccggtgggaggagctcctgatgacgcgagtgttcgacgccatcaagagcctccatttggacgtcctctcggttcaggcttcagcgccagatggcttcatggggcttaagatacgagctcagtttgctggctccggtgccgtcgtgccctggatgatcagcgaggctcttcgcaaagctatagggaagcggtgaaggggcagctggaaatttggacatcgacgggcatggaaggcttcatgggatcgaagcaaagatgtatttcttgtttctttagataacagacatgaatcggacctctatatcaacaattatatgggcatgaatacttaagactccagcccttaacacgtagaaactcaaaaaagaagagaggaagctaaagactaagcgtaaggtatatttggaagtaaattatttttatagtttctaagcaatcccatggtttataggaatactagagtgtttatggcataaggtgtttggttgcattcataaaacctatattttcaaagtcatagcattctagataccatgatatttttgtaatattggaaactacactccaacgcaaagtttttatgacatggct

SEQ ID NO: 56336 - DNA, 646 bp, Zea mays
  unsure (1)..(646): unsure at all n locations
  Clone ID: MRT4577_15136C.1
gttaaaaattcttttttttttttttaggagaaattttcgcatcattattacataggggaggggtctgaggganaaaaacgataacaataaaaagagctaataattattccttggggccatcaagctgactaggagacgccacctaaatagctcgtactcctcattgggaacctcctcctgggctacctgctcttcacctgtggggggatatggggggcgggggggggctcacaaaagagcatagctcaacaaggtgtggggaataatgtgcatgaactcaccaaaggggggaggtgatgtgtantgtaaggcggaacaacaaataatggggaaaggtgagcatctcttttaataaggtgggcaaaaattattagcacttactaaatgtgagtgtgtgccaacccaaaggaataggaaatcaaaattaataataaaccataatgtgaggcgaatgacaaattaaggttacttccacaaattaattatgggagggtgcgagccgctcatgaccatgagcacgactgagataccaggtttacactctatagaggtggcgcatctttacccacaagccatgccacccttttaccaaggggtgtagaagtcccattcatctctaccatggagacgagggaggggancacta

SEQ ID NO: 56337 - DNA, 2563 bp, Zea mays
  Clone ID: MRT4577_151370C.1
taggcgttcgatccccttagcgcggaggggagctcctccggttcttctctacccttcgcatggaagttcttattgcattgcttcgttgcttctctagtttcttccttctacgtctttccagcatacgcatgcccctcgtccgccggttcacgaggcatcgtctgatgatcagtagataataagcaatataatactgatctagaatcgagttgttgtactcttcgcagataggttcgttccttcacatagaagcgagtacagactacagaccacacagtatcagctggcacgaaacgaaaatggttacttgcaaattgcatgcacgagctagaattatattcttctaatcttcttcgttgactttctggcttcagcaggcgcgtgatggcgctttcagcttcccgagttcagcaggcggaagaactgctgcaacgacctgctgagaggcagctgatgaggagccagcttgctgcagccgccaggagcatcaactggagctacgccctcttctggtccatttcagacactcaaccaggggtgctgacgtggacggacgggttctacaacggcgaggtgaagacgcggaagatctccaactccgtggagctgacatccgaccagctcgtcatgcagaggagcgaccagctccgggagctctacgaggccctcctgtcgggcgagggcgaccgccgcgctgcgcctgcgcggccggccggctctctgtcgccggaggacctcggcgacaccgagtggtactacgtggtctccatgacctacgccttccggccaggccaagggttgcccggcaggagtttcgcgagcgacgagcatgtctggctgtgcaacgcgcacctcgccggcagcaaagccttcccccgcgcgctcctggccaagagcgcgtccattcagtcaatcctctgcatcccggttatgggcggcgtgcttgagcttggtacaactgacacggtgccggaggccccggacttggtcagccgagcaaccgcggctttctgggagccgcagtgcccgacgtactcggaagagccgagctccagcccgtcaggacgagcaaacgagaccggcgaggccgcagcagacgacggcacgtttgcgttcgaggaactcgaccacaataatggcatggacatagaggcgatgaccgccgccgggggacacgggcaggaggaggagctaagactaagagaagccgaggccctgtcagacgacgcaagcctggagcacatcaccaaggagatcgaggagttctacagcctctgcgacgaaatggacctgcaggcgctaccgctaccgctagaggacggctggaccgtggacgcgtccaatttcgaggtcccctgctcttccccgcagccagcgccgcccccggtggacagggctaccgctaacgtcgccgccgacgcctcaagggcgcccgtctacggctctcgcgcgaccagtttcatggcttggacgaggtcctcgcagcagtcgtcgtgctccgacgacgcggcgccggcagtagtgccggccatcgaggagccgcagagattgctgaagaaagtggtggccggcggcggtgcttgggagagctgtggcggcgcgacgggagcagcacaggaaatgagtgccaccaagaaccacgtcatgtcggagcgaaagcgacgagagaagctcaacgagatgttcctcgtcctcaagtcactgcttccgtccattcacagggtgaacaaagcgtcgatcctcgccgaaaccatagcctacctcaaggagcttcagcgaagggtgcaagagctggagtccagtagggaacctgcgtcgcgcccatccgaaacgacgacaaggctaataacaaggccctcccgtggcaataatgagagtgtgaggaaggaagtctgcgcgggctccaagaggaagagcccagagctcggcagagacgacgtggagcgccccccggtcctcaccatggacgccggcaccagcaacgtcaccgtcaccgtctcggacaaggacgtgctcctggaggtgcagtgccggtgggaggagctcctgatgacgcgagtgttcgacgccatcaagggcctccatttggacgtcctctcggttcaggcttcagcgccagatggcttcatggggcttaagatacgagctcagtttgctggctccggtgccgtcgtgccctggatgatcagcgaggctcttcgcaaagctatagggaagcggtgaaggggcagctggaaatttggacatcgacgggcatggaaggcttcatgggatcgaagcaaagatgtatttcttgtttctttagataacagacatgaatcggacctctatatcaacaattatattggcatgaatacttaagactccagcccttaacacgtagaaactcaaaaaagaagaaaggaagctaaagactaagcgtaaggtatatttggaagtaaattatttttatagtttctaagcaatcccatggtttataggaatactagagtgtttatggcataaggtgtttggttgcattcataaaacctatattttcaaagtcatagcattctagatacca

SEQ ID NO: 56338 - DNA, 462 bp, Zea mays
  Clone ID: MRT4577_151371C.1
aaagggaaccgcctttttttttgacggccagcattattaaacttagggcccccttaaacacaaaaaacgggccccccccaggccaaaaaaaacccctttgaattttaaaaaaacagcccgtatatgtaggggttgggcgggacaaaaaacaaaaacaaaaactggggggggggggtttgaaaaatttctccaatggggctaacaaggaggggggggggggagctcaagagaaaaacgggggggttttcgggcccttttttattggccggacccctccggggggggacagaatcttcgggggccccccaagaagggggcccacccggggggccaaccaggaaagggggaccctttggggcttggaaatggggagcccaatgacccggggaaggaaatagggggccggggcaaaggcaaaccccccaaaaaaaccgggcccccccccaaaaaaggggagggggg

SEQ ID NO: 56339 - DNA, 304 bp, Zea mays
  Clone ID: MRT4577_151372C.1
gaaacaaaggctaaatatatacaggatcttctctttcactagatctacaatattccagctgaatagcaagctttacataatcatacgtgcatataaccagaccgatgcgataaccgagcgtgcgctcctctactacccacacatagatatcttgctatatccaaccgagacgaaactactggcacgacaggcagagacgggcttgccatgacacacacaccacacatcgctcagctaccacgcggacgcatacaaccatgcacaacaccatgaatccgtggctactcttcgatatcacatagca

SEQ ID NO: 56340 - DNA, 567 bp, Zea mays
  Clone ID: MRT4577_151373C.1
ccgtgctgtcgcttcctttcccttccctctttacaaatgtcgctagaaatttttctatccttctttgtacatctgacacctgtcacgtaagtatggtatactttatatatttgcaattggcaatgagagatgataacttatttacaagaagcaattgaattcgatcgaagctgcgagatggctggcttcacaatggccggaagatgaccggcgcgccgtgctgtgggttgagaatcataagcaccctcggcgcgtgcacgtacgccggcgacaggcggaacttgcagcgctgcagcaccgtagccaaggcgatcttggcctccatgagcgccaggtactggccgatgcacacccgcgcgccgccgccgaacgggaagaacgccatctgctgccgcggccggcggccaccgtcgtccgcgaagcgcgcggggtcgaactccgtggcgtcgtcgccccacacgccggcgtcgtggtgcaccgccatgatggggatcatgatctccgtgcccgccggcaccacgcagccgccgagctccacgtcccgcttcgccttccggatcatggcca

SEQ ID NO: 56341 - DNA, 775 bp, Zea mays
  Clone ID: MRT4577_151374C.1
cggacgcgtgggtgccgcaggtgtgggacgaggagggcgcggccaagggcggcgcggtgaccccggcgccggccgcggccatgctgggctcgcctactgcgagagcggcgtgccccgggaccaggccaggttcgccgtcgtcttctcccacggattcaccggcttccgcgaggacagcgtccgcgcctcccaggaagttgcggaggagctgggcgtgtacatggtgggtttcgaccgcgccgggtacgggcagagcgaccctaacccgactagtagtagcaccattgcaggagcagtcgcggcggggccatggggccacagcgggatccagcaccaagagcctaggaaggccaggggcaggggtcctcgccctcgccgcaatggagctgctggccaaggcgcccgtgctgggctgcgccgggaagatgcagaggcagcggcaacgggggtccgcgctgggcaggtggatttgccgtgccgtggcgccgccgagggtgcggctcagggacggccgccacctggcgtacgccgagtccggggccagcaaggaggacgcgaggttcaaggtcgtcttctcccacggcttcaccggctcccgcctcgacaccgtccgcccggcgccggtcagtgtcccgccccggcctctggatctggctctgcacggaaaagattcgagcttttgtggatccgcttgtgttctcccccccagttcctgtacacatggctatacggtgccattcgtgcgaccacacgaacatccttactgtgggcgagt

SEQ ID NO: 56342 - DNA, 786 bp, Zea mays
  unsure (1)..(786): unsure at all n locations
  Clone ID: MRT4577_151375C.1
aggaaaccgcattccaaacntcatttggggcattatgagttccgcgtcatggcctttggccttacgggtgctcccgggacatttcaatgtgccatgaatcacaccctttctccattattgcagaagtgtgtcctggttttcttcgatgacatattggtctatagttcttcctaggaggatcacctttgccatttagaacaagtcttcactctcttggaccaaaactaatggaaggtgaaaatgtctaaatgccattttgctcaacgtcaggtttcatacttgggtcacattgtcagcgctgccggtgtcgccacagatcccactaaaatttgtgctattgaggattggccaactccttcctgtgtaaaggatctccgcagttttctatggctggccgggcattacaggaaattcattcgccacttcggtattatttgccaacccctccatgctctgctgaagaagggtgccgtttttatctggacttctaaccattccactgccttccaagctttgaaacaagctctgataacggctcctgttctgtctctgccagattttttcttcccagtttacaattgaaacggatgccagttccttgggcgttggagcagtgcttatgcagaagggtcatcccctgggcttccttagcatttagcaaagcccttgggacaaaatctagggggctctcagcctatgaaaaggnatacatggcttggctggtagcagtaccacagtggcgtccttacctgcaatctggaaagtcatcatacttactgatgacca

SEQ ID NO: 56343 - DNA, 469 bp, Zea mays
  Clone ID: MRT4577_151376C.1
attctcgtccaaccaaggaacccaagccaaactagctagcctgcacttgcacccttaagaaatacagcgagagagatgatgagagtggccgtggtcggtggtggcctaagcgggctagtggcggcgcatgagctggcgaggagcggcggcgcacgcgtcaccgtgtacgagaaggaggaccatctcggcggcgccaagaccgtcgccgtcaatggtggatcaggccctgttctggtcgacctcgacttcatggtcttcaaccgggtgcggaacatcaagcagctgcatttccatttgctcctagaaattagtctgctatctatatatataatatgcgcgaaatgacatgaatgatcaataccgttgaagagcagtcccgctgaactgaagagcagtcccgctgaagagtggaacacgcaaccattggctgtaaaatggtggaaaaataaaaaaaaaatcgaagttgagc

SEQ ID NO: 56344 - DNA, 1662 bp, Zea mays
  Clone ID: MRT4577_151377C.1
atgcacccggctttgttccttaaatccgggtgcgacagagtgcgaccctctcctgaggacattgaggccttgaatgctccacttcggagtcttctcgaggctgagagacaaactcactttgagatgccagccagcactgatgatgttgagatggatgtcgtgcttagcttgctggctggggaatcgtccgactctacccgcaccgagccgatggccatcacgattgggcaagaatttggcgaagaggtggagattcggaaacctgaaggtgcccgcccaaagcgttcacgccgagtgaaccacccgactgcacctgtcgaggagaaaaagaaaaagaggcgactttggcgactgttgtgcttggatcaggatgctggtccttctgtaccgatccctaacgatgtcccggcagacgccattcccaaggctaatggcggtatgtttgacgaggatgaagaggaagaagaagaagaaatcccactaatccgcaagaacagtcgttactatagaggtagcgaggggggtaacgatattccctccccagctctatcggcacttgtcagtcttcaggggctttcgatatcggattttgatcaagcactagaggaggtcattcctgaagacatactatcggagcctcctgaagctgatatcccagccatctgttcagaggtcccagatggtgggctttcattgcttgattctaccgggcaagaggtaacccgagtggtgtcccgcgcatcatcgaccttagagggtggtcctccatgcaagtacactgatccaagctacccaactcccatggtggtggttgaggggccttcagccttagaagtggctgctgaagaagacccagcccccgagggtggcactggcagctacccagcccccgagggtgttgctggtagcgacccagcccctgtgggtagtgcaagctataatccagcctccgaggatgttcaggcatgctctctctctaatgcttccatggatgtccacgtcgggtcatccccaatccagtccgaaggggtgacggtagcacatgcttctacgaccttaattggccaagtcgccttagaggtcaccccaggtagttctctcgagattgttcctactgatcttccctcgtcaagccatgcaccagctcctcctgccttgggtcttccaatattcctttccaatctccaggattttgttgatggagtatctgcccaattgaggtcttgcggtgctgctattcccgaacaagctttatctctgatgaagtggaatcctctgctgctccagaaacagatggatgatttaaaggcgttgaatgctgctgcattatcagatattgctcaacgatgctttgaccttgaggagaatgcatgctctctgaactcttctctgaatgcccagcttgattctgaaaggatggcacatgaggaggagaaacgagcacttgttgcctctcgtgacaatctagataggttgtaccgtggtgccagtaactccttgaccatcctggagaggagtcaccgcttcaccatgtctgacttagaccatcatcgccataagctgcaggcatctcaagaccaagttctgcgacttggacgactgctgtggaccaaagactccaccatcaaagatttgcgtgcctccaagaaacttgttgcgtag

SEQ ID NO: 56345 - DNA, 276 bp, Zea mays
  Clone ID: MRT4577_151378C.1
cattggcttagaggtgaagagcaagactgccaagctccaggatttcaaatccttcctgcttaaggactcagaaacaagtcagcgtctggccaacctcaggcaacgggtggagcagtttgccagggccttccccatgcctggttttgatgagcattgaaggcacctgggaaatgaggcccacagactcaaagttactctccttccccctacctgggccagtgaaatagaaagcctttctattttttggtgcgggaaggaagacctctcacttagggc

SEQ ID NO: 56346 - DNA, 491 bp, Zea mays
  Clone ID: MRT4577_151379C.1
tccatatgaagcaattcgccaggatgcaggtcatcaccttggtgaccggggaatgggtagcggcaatcatttttccatgacgacaagggtgacagacaagacctttctcaaattataatttgggcaatccttggatgaggtcaagtgatctcaaacgacacaaaagatcaaagctcaagtgacctagcctcctatgccacttccaaagagaagaggaagatcctgctagcaaacatcgagaagagccagaagaatgtgaaaaatcagcattaaaactcgaccaaaaggggaaatctggcaaataagatccccacgagcatccaaaactcgagacaagccctttttaaagcgcacttcatagtcatccttaaggagttgcgaaactgaaagcagattgaaatgcagattcgaaaccaaagcaacatccttgagaataaagctctcattcacccgaatggtgccacgagaaacaaccttacatcttgacttat

SEQ ID NO: 56347 - DNA, 554 bp, Zea mays
  Clone ID: MRT4577_15137C.1
gtggttattgtgtttttcacgcacagggctgcgcctctttatatggcacgaccattcgtcgccaaacgtggtgtgcattatgattaggactagtgggcatcaaacgttgcttgcatgtgacaccctatagtacgccggcacacacactaggcgtccattaggcatgtgcccatctaacaacaatcgataacctccgctagtgcttctggagtataccattgccatatgatgaattgctcacacattgatttttggcacacatcgtaaaagaataatgcgaacgtgcatatcactttcggactgtgagtagggattacttgggattcccggtgctagccgtgctctaaagttcttcctaaaaatcttggctgatggattctttgggatacaattcgtgaataaaactcttgcgatcctcttgaaaaacacgacctgctttggatcaaactggttcacctcgttatcactgatctcatagccttcactgtctataatgaatgccaccgggacttcggcgtggacttcatctttcatcgatacaacagcgggatcct

SEQ ID NO: 56348 - DNA, 293 bp, Zea mays
  unsure (1)..(293): unsure at all n locations
  Clone ID: MRT4577_151380C.1
naaaaggccacacacagtccgcactcgcacagccgccaccaccacctggtccacgtcgccggcggcaatgtgggcccacctggccgtggcgctgttcgtggcgttagccgtggctcccccggcccgcggctccgacgtgccttcgttcccgctgtcgcaggcgcagtccccgtccaactcctcgtccccgtccaacgccgcctcgcggccgtgccacctggacctctcggccgagctcttcggcggggtagccgcggcgtgcggcgccggcgggggcccgggctcgctggacc

SEQ ID NO: 56349 - DNA, 385 bp, Zea mays
  unsure (1)..(385): unsure at all n locations
  Clone ID: MRT4577_151381C.1
gcgtccggccttgcgcgtccgtgcaggcatgagctgcgcaacctggnccccttcctcctgctcgacgagttcacagtctccaagcccgccgggtttcccgaccacccccaagaggattcgagaccgtcacctacatgctcgaggttcgttgcgtctgctcaactcaatgcttcgctcccctggggtgggggggcaacgcacgcgagctgttcgctcaaacgtcaccatccttgtggttccggttactggctgctgcagggggcattcacccaccaggacttcgctgggcacaagggcaccatcaggacaggggacgtgcagtggatgacgggggggcgaggcatngtgcactcggagatgccggngggggacggngtgcacaagg

SEQ ID NO: 56350 - DNA, 280 bp, Zea mays
  Clone ID: MRT4577_151382C.1
ggtttgactattacatggtgatacgataagtaacatggtaaggaatgtggcaaatctagaacaaaacaggtatatttttttctccatcgccccaaaaaactcaaaccctatgattgatatcgttgcactaaccaacttattgatttatagccttcattgaagatgaaactggtgttgcaagtgctggagtaccccaacctgacgtagctgtaaacgacgctcaagacgaacgagaccttgctgccgatcggaaatgcttaggagacaccacacttgaatg

SEQ ID NO: 56351 - DNA, 555 bp, Zea mays
  Clone ID: MRT4577_151383C.1
gcatagcaagtctaggcatagctatcaaatttctgcaaatagtacccattcttcacatgttctgttgaatacatgtattgtcttctaatgcggtcgcaatggtcccattagggcttggggtaaaaattcagcaaacacaacatatgcatactttggccatcagtccaaagcacacaggttaaatcgttccagactcgggagatttgacttacaaattttcaaaacatcaaacagtggtaccataatgctacagtagcacctcttattctactttttgcccatggacaactcagttttgtgggatacacaaggcaattacatggcactataagataaactggttcaggtataatctcttcacatgtttgtgtgaatcacaagcttaacacaatcagaagcacgtacttgaggttggtgcaagagaacctctagcaatttagcctgttgtcttcgttgaagagggtcccatgccttgccttcagtgttgctgcaatgcccattcttgtttggataaatagcagtatttgttgaagaatcatcagtaccctttgtact

SEQ ID NO: 56352 - DNA, 398 bp, Zea mays
  Clone ID: MRT4577_151384C.1
ttttatatttcttttttttttttttttttttttttttttttttttttttttttttttttttcttgggggaaaaacgtttgcatcgcatgggggggaataatattacaaattacggaagctccggcccctactacggttactttacatcccggaaggaatttacagaaaatctatggttaaaaaactttacccgccggccccctaccctacgcgggtgggggggttttttggggctgggggggaccccctttccttcgcgggggggggctgttttagatgaaggacttcaccctgaagttggaaggcccgggggggttttcttgcaaaaactccgggggcggagggcagtttctttgggtgttcgcccgtgaggggcttcgggagggccaccttgggct

SEQ ID NO: 56353 - DNA, 307 bp, Zea mays
  Clone ID: MRT4577_151385C.1
atttcggcccgtggtgtcgttccggtcctgttcccctgccctcctgcttgcggccggctgggattccgccgtgtcggcgcccgtgctctccccgcttcgattggggtgcacgcttggccgctcctgatcagcttctggtcggggctgggtttgcttgggtcggctccccttttggttgtgcgggtccgcgcgttcgggcgggcgggcgtgcgggcggggggtttgcttttggtgttctcctgttgctgtcgctgcgtgggcgtcttgggtttgccatggcggtcgttggctgcctgttgcggcttct

SEQ ID NO: 56354 - DNA, 498 bp, Zea mays
  unsure (1)..(498): unsure at all n locations
  Clone ID: MRT4577_151386C.1
aacaaaacncgcannncannggcaaaagaaacgggaaaagaaaagcggacaaggacccnaaannaggccgacaaggaggcgggacccancagggcancaaancagncagcgancgggcagcngagggccaggggggacaaggaggcnaggcagcncnncggggccaaccaagcgacgggggcccaccgccggcccaccggcacgcnccnccacgcccccgggccggacagggcggagcagcagcccnggcaaccgcaccaanaagcnnngaccggccggcggcgaccncacgnancncggcgcggcagnggccgnggggacanngcnggcgcnggcggacgganggnccggcncgcngggcgaccgaaganggggcaacgcacncaggnccaggngggggaagacggagcaccggcnccgggggcacnggacanncagccgaagccccggggcgaggcacnccacaggaaaanggggcgcgcnggggagcccacggac

SEQ ID NO: 56355 - DNA, 407 bp, Zea mays
  Clone ID: MRT4577_151387C.1
ctgacgcgttgggtacctccctccatctgatcgcgtccgtcagctctcgccgcgcaatcagcttaatctattccggcagaaggggacgaccacaggtccagcacaatcgagcacaaacttcagaaccaatccttttaccatatttacggatcacttttgctaacttttcattactacatcgatacaaacgccatactctgaccactttggagacctgatcctgctacgagctccacactctgtataaccgcataccatcataccaaacatcactgacctacaacagcacaccacatactgttcaatgctcgtatctgttacactctcttaatacgatatgttacataacacattataggttttgacaaaaattctgcattcaagatcaatattactttaaaaatata

SEQ ID NO: 56356 - DNA, 152 bp, Zea mays
  unsure (1)..(152): unsure at all n locations
  Clone ID: MRT4577_151388C.1
gtcccgtgctccctccgctagttcntccaattcgttcgccagctcctcggtcgtcgcttcacccagagagcaggagccgactcgtccctggcggtcccgagcccgagccgcatcccgtccgcgtccaacggttgaatcacgagtaggactac

SEQ ID NO: 56357 - DNA, 516 bp, Zea mays
  Clone ID: MRT4577_151389C.1
ccacgcatacgtgaaaaccctaaaccctatctacccggcggaggatacaagctctccgacggtgcaacaccatgaggcccccgcctaaaggaggacactgagggaggggtggcagattcgatgagcgggagccgagagggcggcggcggcggccgtaggtttggcggcggtacaagcggtagaggcgacaagggagggagaggtggcatgactcccaaaggcggccgcggcgaccgtggcaggcttggccacagcggaggcatgaagggcaggagcaaggacggacgagtgagcacaagccaccgaggatgctatttcctaatgcaaggaagatgctctctgcagcactaacatagacccggtagagtcctagtacagagagaagcctgactccgctcagaatgaggatggaacaaatgtaccatacagggtgtggaaccccttgcggtccaagctgggtgctgcagagctaggtggcgctgacaacatctggatcgctcctggatcccgggagct

SEQ ID NO: 56358 - DNA, 336 bp, Zea mays
  Clone ID: MRT4577_151390C.1
acctggcatgaccctaccactacctttatagctcgattaataagattacagccatacgtgagcatcaaacatcaacatcactactgtgaagaggacatggcagcattgaacgctgtgtcatcagcctgaccgcagagccttcgagacctcctagcggtcgagatatctactattttcgtcacactggagcatcgctgaggacagtatctacaggaccgatgtgctgctagcatagctcctactaggagaaccttgacggtgctcatacgtcacaccacagagctagaaccatctgttgctactttccactgtaccttggagcagcaccaccctatc

SEQ ID NO: 56359 - DNA, 465 bp, Zea mays
  Clone ID: MRT4577_151391C.1
atacattcttgttttttttttttttgtttttttttctttgtttggttttagaccaaaataccgtgttaaagcttgggcttacatccaggggaggtttttgagaaaaataccctgtattattaaaggggataaagatttgaacataaacaggagaattccttgcctttttactgggcctaaagtttacgaaaaaaccgtgaaaattgcttacctgtatcctgggaccccttgtgagggcatgcctagatgataactgccgcattggcaccattgaccttttaaggaactggccaaaaggttgtttgagggtaagccacagtgcgcttaacaagtcgttcaaaacaggctagttgatgcgcgccaacagaacggttaacatcatccaaacgaactgctagatcctgcgcctcccctgaacgggctagatgatccctaaggattggatctgcaagggcctaccctggc

SEQ ID NO: 56360 - DNA, 878 bp, Zea mays
  Clone ID: MRT4577_151392C.1
ccggccgggaccttactagtcgtgcaacccagcagcacaccaatctttctcatggacatagacgtgcctgctttctcgggcgtgctaggcgctatccctcctgagccgccacaaccgccgcctgctagcgcagccagcaagccgctcgccatgccgcgaccccgtgtttggcccccaccgccgttcggccgccttcctcgctgccggtccaccgtactcttcttcgctagactgctccccttctccattgatcacttgctccactacgcgcaagacgcaaccgtgcctgcggcctgctagtgcctagcttcctccccctctctatgcgcgccattccaggcgtcgagctcgcctctgcgggaccgtagcctccacccctcattggctctctgcgcgagcgtgatcgcgcctccgcatcccatgttcaatggagccctagaggttgtgcttctacgaagatccaaaattccttggaccaaaagcttcagcttccaatagtcgttaagggccttgtactgcgaactctggacaaagtttcatgctgctacaaagtttatagcgcacttgggcatggcttatgccatcacatttttgcctatctactattgaaggagtatgaaagtatttttaacatgacgcactttctagcttcagagaaacaccaactagacactcttttgctactatctaatagcactctgcatacctgcttatacgaagatccaaaattccttggaccaaaagcttcagcttccaatagtcgaagaggaaaaaatggtcagtgagcatccatatctactatattaaaatgtgacacagccattaccattccactatatttaaatttctaagcttctatttgatcatgctctgcatac

SEQ ID NO: 56361 - DNA, 1790 bp, Zea mays
  Clone ID: MRT4577_151393C.1
ttcccctatattcaaattcttaagctccttttgatcagtgagcacccatatcttctatgtcgccatattcttcgatttaagcctttttttactgacctgctcccgtttgtttcatgtagtgctctgcatacctggtgagtgtttaatcaatctcggtgctgatttgttagttttctttaagaggtatatatggttggatctgtgttttttgtgttagaatagataaaagtgctggtatatcatggccataagaacgattgttttatttagtggaattagaacaaattggttggatcttttactgcttgatcagatgcagatgaatatgtggggtttttaattaatagcaaaaactttcttactgtttgatcagatgaatatgtgggtattaccactaaaaggagaaaaagctcactcgagttgttacttggctacctttttaaattaatgtggagaactaaacaatgatattgatgacatgttggcactgaaatcttacctatgttctatccctcgtcagccacaaccgccgcctgctagcacagccaacaagccgctcgccacgcgtgcgacgctgtgtttggcccccaccgccgttcggccgtcttccccgccgccggtccaccgtactcttcttcgctagactgctccccttctgcatcgctcacttgctccactacgcgcaagacgcaatcatgcccgtggcctactagtgcctagcttcctgcccctctctatgcgtgccactccaggcgtcgagcttgcctctgtgggaccatagcccctgcccctcatcgactctctgcgtgagcgtgatcatgcctccgcatcccatgttcaatgcagccctaaaggttatgcttatacgaagatccaaaattccttggaccaaaagcttcagcttccaatagtcgataagggccttgtactgcgaactctagacaaagtttcatgcttctacaaaggcgtggttcactaacttcaaagagaataagctaactgtttccaactttgttgtcacacattttactttctaggctttacacctagcctcaaaggcagagctatggccacatatttaatactgtccatgttttgttcaggtttatagcgcacatgggcatggcttatgccatcacattttttgcctgttatctactattgaaggagtatgaaagtatttctaacatgaggctgcactttctagcttcagagaaacaccaactagaccagttcgcctttgttcttttgctactctgttcctatttattatagcagaagaggaaaaaatggtcagtgagcatccatatctactatattaaaatgtgacacagccattaccattccactatattcaaatttctaagcttctatttgatcatgctctgcatacctgttgagtgtttaatcaatcccggtgctgatttgttagttgtctttgagagggagttgccgagctttctcaacaatagcgaccgtggaaggcgtcaaccagattgtggatgttgaaactattctatctgcttttggatttaagttataggatatttaaacatgtttaatgtttgatacctggatgctttatgctttagttatatgtggatgctagaaaaagttgtgtatttgtttttgataaaaattgtacgcacgatttggattgcattcaattgaatgatcattttattaattgatggtgaaaaaaaaaaaaaaaaaaaaaaaaaaaaaaaaagggcggccgccgactagtgagctcgtcgacccgggaattaattccggaccggtacctgcag

SEQ ID NO: 56362 - DNA, 1021 bp, Zea mays
  Clone ID: MRT4577_151394C.1
tcgaggccggccgggccgggttaaacccacaccgccacacggccacgcccaattctcccctctctcgctgcgcatcgacgacggcgagggcgccatgatcgtgcgcacgtacaggcgtagatcccgttccatctccgtgtgggactcgacgaggacccgcctccgtccccgccgcggtcccggaaggaggggaggcgaagcgggcggggcggggccagaagaggaggagggttggagctcgcggaagctcccgcgatggcgccgacggtgacgctgatggaggcggaggaatacggagagatgatggagagcgtggacgacgtcacgttcgcgctcgacgggctccgccccgccgcgcagaagcggacgcggcgggccagcctgctcgcgctgctcgggatctgcgactccgccgagcgccgccgcgtgcttcggtcccaaggcaaattatcgatgctattttggttctggacattgatgatcctccctgcgctattgctgcaggagctcttttatttgttttggcaagtgatgtccaagacaataatttgctgtcttcagaaacttgtgtccatttcctccttaaattattaaaccctccggtgaatgttgttgatgccaaagcaccatcaataggttccaaacttcttggaatcagtaaatttcagatgcttaacagttccaataaggatgcagattctagttcagaggacatacttttaaaagttgaagaaatcctcttaagctgcaaagagatcaagccactagacagtgatgataagaaaacaacaaggccggaactatgttcaaagtggcttgctttgttgacaatggaaaaggcgtgcttgtctgctgttgcattagaggatacatctgacatggtgttaagaactcggaggaaatttcaaagaaacattaaggcagttgggtggccttgatgatatttttaatgtcatggtgaattgccattcagaattggagaaacttgtaaaggatgcccgacagcaacggaattcgagct

SEQ ID NO: 56363 - DNA, 330 bp, Zea mays
  Clone ID: MRT4577_151395C.1
tttttggttgtttttttggcccgacccccgatttgattgaaggatgaccagaggcgacagtgacactcactgccaattaacacctggcactgaagaacattactattacatacatcgtttttttttcagggacatgcgcgtgcattcatgcacatgcaacatgctttgacgatcagtttaattagctcgctcctcctcctgcgtttcctccgtattttgcaaattcttatcaccaaaattatgccgtcgttttccgtttttgccgtccgttcgaagaataatgccgtcctcaaatggggcggcgaggttccgattctcggcgtcaggctc

SEQ ID NO: 56364 - DNA, 574 bp, Zea mays
  unsure (1)..(574): unsure at all n locations
  Clone ID: MRT4577_151396C.1
cgcgaacggtcccaaaaccaattcggcacgagggccacgcccaattctcccctctctcgctgcgcatcgacgacggcgagggcgccatgatcgtgcgcacgtacaggcgtagatcccgttccatctccgaaggcgggggcggggtctcgtcctcgcaggaggcgttcgacttcgatgccgacgtcgacgtgctgggatcgtcggcctcgcagccgctcccgccatcgcaggaatcctcctcgatgtgggacttcgacgaggacccgcctccgtcgccgccgcggtcccggaaggaggggaggcgaagcgggcggggcggggccagaagaggaggagggttggagctcgcggaagctcccgcgatggcgccgacggtgacgctgatggaggcggaggagtacggagagatgatggagagcgtggacgacgtcacgttcgcgctcgacgggctccgccccgccgcgcagaagcggnacgcggcggccagcctgctcgcgctgctcgggatctgcgactccgncgagcgccgncgcgtgcttcggtccccaggattgggacagcaaattatcgatgc

SEQ ID NO: 56365 - DNA, 230 bp, Zea mays
  Clone ID: MRT4577_151397C.1
gtcgtaaccgaactaaagccacaggctgcagctgcaatacacaaagataaaatatcttagaagccacagtcgtaaccgaactaaagccacaacgaacatgctgacgccctcccgttaccaagttaaatgcaattagcactttgcttgtttgctctcactctgagttgatctttaatgccatctatattgtctgagattagtcttcttgttatcgttatctcccttgtgct

SEQ ID NO: 56366 - DNA, 837 bp, Zea mays
  unsure (1)..(837): unsure at all n locations
  Clone ID: MRT4577_151398C.1
gattttgttcggtgacgtctgtgctgcgcatattccaccagaccaccgcttacttctttaatctactgcacatgcattgttttgatggcctttaacacagctgcacactcacggcgcggcggatattttagaagctcgtgttctcaacataggagtttgtgatggctgtgatgttccctatgttcagccgttggattcatggtgctatgtcgtgtccagccagctttgtgcttgaataaataaatgctcatacgctcatgtagccagtatttgccgttctcatgtttagtaaattaaggcatgttccttctttttgtgtagcatttgtttcggcaaaactcaatgatgcctctgtctacaatgcactaggtttcagtgttttttaacctctggttgagttagtgctgcaaaagtgatctcctgactcttgactttggaatgatcagcactgtttcagagtacagttcattgtatctgtcacatgttgtagctttccagtttacttctagtttaatttatgccttgttatgatgtgtattggtgcatgtctgatttcttatttgctccctgatactgtctgcagtttggctcgaagtcagtcctgagcatgtcaaggctgaagtgcgcgctgcggggatttgatctgagggttctcttgatcctactgattggtgtgccaattttgatctttgccatatatgtgcatggccagaaggtgacttacttcctcccgaccatctgngagaagcccccaaagcccttcacaatactccctcactattaccatganaatgtctcgatgngtaacctatgncagttgcatggatggaaagtcag

SEQ ID NO: 56367 - DNA, 598 bp, Zea mays
  Clone ID: MRT4577_151399C.1
gaattgcgacggagtcatcctaaccggagcttcagtcgccagcccccgtgccgcgatgacgaccactcgccggtgacgcccgccaagctcccgagtcgcctctcgcctctccccccggctcgcgcccgcaggccgcagcatgcttcccctcgcgcaccccacccgccatccccacccccgccctgcatctcgggcctcacctccggagcgctctcctgcccgagcccgagctggacctcgcctaccccgccgctcgtctaatgcgctcaccctcacacgagcgcggtctccgaccgcggaaccgggcgagaatactgaaaccacctccgcccccgccagcagcagcgtcctgtcgtttttgtgcccgcttctcaagttcttcgggggcggggatccttctcaagagcggaatgacatcgtggaggtggccacatcttccctttcaagtttagctagactgccgtggggatcaaatgttgcagctagtagcacagaaagcgttagtacaccaacgagtgctccgaatctttcactgtatgattttgaagtatgttcctttctgtatgaaagtcagggagggcatgactgattttgatct

SEQ ID NO: 56368 - DNA, 185 bp, Zea mays
  Clone ID: MRT4577_15139C.1
gaacatacaggcatggctcgcatgggactggaagcattttctgtgaaaaaatatgctacactctctgatgaagtcaatattgctgatgttggtaatgctacagacacttacataggaggtgcttgaacccaagctacaataatgccaagtcccagactatacaaatgggaagtgaagatcattac

SEQ ID NO: 56369 - DNA, 344 bp, Zea mays
  unsure (1)..(344): unsure at all n locations
  Clone ID: MRT4577_1513C.1
cggcggcctcgcggcagaaacaccccgggcagnacggctctgccatgacgaggctccgagtgcnncgacggcgccaaggcgnacaagcacagcaagaacngcaacaggcnaacaaggcaggagcngcaccggcggnaccacgaggagacggncancacttttttttttttttttgtgttggtgtttttttttttttttttttttttttttttttttttggtggttgtttttattttttttttttttttttttttttttttttttgtctttttttcttttattgttttttntttttttttttttttttttttttttttttttttttttttttttttttttttttt

SEQ ID NO: 56370 - DNA, 585 bp, Zea mays
  Clone ID: MRT4577_151400C.1
caggcatcccaaatatatggcaggcgcagacacgtataatcacaatttacctgcagctcattagcattagagtagatcatgaccgctattcaccatacaacctatcaccaccaatgctctcccagatggtgcgatcttccttgctcagatcctcatgtttgttggcaacatgtatgtctggcaacccaagtgtattgggccagactccctacaagacagcagacgtgatgactgcgttctgccacatctacgacggctaccagatcgacgccgtcaagatgaaggtgtgccatcaacgtgctaggactcatcaaggccggccaaccccagcactagaaatactgcccgctgctggaggatctggtgtacctctactccgcattgaggctctgcacagccatcaaggtcaacggcctagggatccacctcgaattgctacttaaactaaacttcattctaaacaactgacggaatattaggccataagacttcacttgcacgaactaagcttgtcatcccttgtgagcataatctcgacgattctatttaccaggatgtatggctcttgcgatattaacgaataac

SEQ ID NO: 56371 - DNA, 366 bp, Zea mays
  Clone ID: MRT4577_151401C.1
ccggccgggactacggaccgagcgccagacataaaagtcacctgacgaaatcatagtcgtatcccgacggcggcggacgatgaggcaagagccacaccaagataaacaatgagtaggcatgcctgcatgattgcacgcttttcaggtggagcatcctctcgtccgagtgactggacgtcaggttgtggaggtacaagctgtgttcccaaaaataaccccgctcgaggtatacccgaagaagatggcgatgtacatcatcaaggatacttccatagactgtaaatcgctccgattttcctgtgaactaacagcgtacaaaagattgaggaaggtcattattgacacatatgcatataggctttcaat

SEQ ID NO: 56372 - DNA, 1083 bp, Zea mays
  Clone ID: MRT4577_151402C.1
gccggccggtccgggcttctgacactctgccatctaacagcgaacgctttgcaacaaattctgttgaaatggctgatggaactagaaagacgctaatactgcgagagatacctgaaggtgacgtgagatcgttactttctgacagggaatcgttggcgccatgtgatgtagcagtatttgtttacgatagctgcgatgaatattcatggcaaagagctagagacttgcttgtgcaagtggctacacatggagaaaatactggctacgaagttccttgcttgatagttgctgcaaaagatgatcttgaccaatcttcacaagctctacaagaatcgactagagtgagccaagacatgggaattgaaacaccaattccgatcagcgtgaagctgagagatttgaacaacattttctgcagaatcgtgcatgctgcgcagcagcctcatttgagcattccagagactgaaactggaaaagcacgtcggcaatatcggcaacttctaaaccgttcgctaatggttgtctctgttggagctgctgttgcagttgttggattagctgcttatcgggtttatgcagctcggaagaactcgtcctcttgaagcctcccctactggacaattggggaaataaggcccttccttcctgcgacctcagctggatccatgctggttgaagttcgtcgcttgggtttttacccggcaggaaaccaacgtttttgtacagacatgtcatcagctatgaattatccggccaattggggtttcagattcagacatcacctggctccgtaaaaatgccgtatctgatgatctgttggctaaattagctcagctaattattgttactactagcctaagttcttattattcgaatttcttttcgttggcaaacatgctgagacatttagttgaacaagcatgagtttgtgttgtaccttgatttctttcgggatttatcaaatcggaattacctagtcacactgccactgaggcctcgtgcacacggttatactttgtatgaataatttgatatacatgtaaatgcatgcagtcacactttgctttaaaaaaaccccacccc

SEQ ID NO: 56373 - DNA, 788 bp, Zea mays
  Clone ID: MRT4577_151403C.1
aaatcccgcaaaaccctaagccaagcagggagggagaagacgcgacgagagagagagagaggaggtgcgcggcatggcgggtgcgacgtccctggcggcggccgctaatctggcgggcaagtcgagcgtgcgggtcgtcgtgatcggcgaccccggcaccggcaagtccagcctcatcgtcgccctcgccaccgagcagttccccgagaacgtaccacgcgtcatgccccccacccgcctccccgccgactacttccccgatcgcgtccccatcactatcatcgacacgtcgtccagcgcggagcagaagccgaagttgatcgccgagtgccaggcagccgatgcggtcgtgctcacctacgcctgcgaccggcccgccacactggagcggctcagttcgttctggcttcccgagctccggcgacttcagttgaaggctccagttatcgtggtggggtgcaagctggacctgagggacgaacaacaggttagccttgagcaggttatggcgcccatcatgcagtccttccgcgagattgagacatgcattgagtgctccgctcttcggcagatccaggtgcctgaggtcttctattatgcccagaaggcagtacttcacccaactgctccgctcttcgatcaagagttacaagctctgaagcctcgatgtgtgagagcgttgaagcggatatttattatatgtgataatgacaaggatggtgctctcagtgatgtggagctcaatgaattccaggtccgatgctttaatgctccactccagcctactg

SEQ ID NO: 56374 - DNA, 2719 bp, Zea mays
  unsure (1)..(2719): unsure at all n locations
  Clone ID: MRT4577_151404C.1
gctggacgtcttttcgtccactgcaagacgaagcaaccggaccagccaaccctttacccttccgaccccacccgctgacatccgacgccgacgccggcgcagacagccgcaccagcgccacccaaatcccgcaaaaccctagagacagaagacgcgaggggagagagagaggcgcccggcatggcgagcgcgacgtccccagcgatggccgcgaatctggcgggcaagtcgggcgtgcgggtcgtcgtgatcggcgaccccggcaccggcaagtccagcctcatcgtcgccctcgccaccgagcagtttcccgagaacgtgcctcgcgtcatgccccccacccgcctccccgccgattacttccccgaccgcgtccccatcaccatcatcgacacgtcgtccagcccggagcagaagccgaagttgatcgccgagtgtcaggccgccgatgcggtcgtgctcacctacgcctgcgaccggcccgccacgctggagcggctcagttcgttctggcttcccgagctccggcgactccagctgaaggccccagttatcgtggtggggtgcaagctggacctgagggacgaacaacaagttagccttgagcaggttatggcgcccatcatgcagtccttccgcgagattgagacctgcattgagtgctccgctcttcgccagatacaggtgcctgaggttttctactatgcccagaaggcagtacttcaccctactgcccccctttttgatcaagaattacaatctctgaagcctcgatgtgtgagagcgttgaagcggatattcattatatgtgataatgacaaggatggtgctctcagtgacgtggagctcaatgaattccaggtccggtgttttagtgctcctctccagcctactgaaatttcaggagttaagagagttgttcaggagaagatgcctgaaggcgtaaatgaaactggccttactttgactgggttcctttttctgcatgccctatttattgaaaaaggtcgtttggaaactacatggactgtattgaggaaatttggttacgacaatgacatcaagcttagggatgatctcattgcagtgccaattaaaagagctcctgatcaaactctggaattgacaagtgaagtggtcgatttcttgagagggatattcaacatgtttgacattgataacgatggagctttactacctgctgagctggaggacctattctcaacagcacctgaaaacccatggtcttgcgatccatataaagactgtgctgaaaagaatgtgttgggtggtctgtcacttgaagggtttctctcaaagtgggctcttatgacactgctagacccgacaaatagttatgccaaccttgtatacgttggctatcctggcgagttcagttctgcatttactgtcacaaggaaaagacgtgtggatcgtaaaaagcaacagacacagagaaacattttccagtgttttgttttcggtgccagaggctctggaaagacatcgttgctacaatcattcatcggaaggcaaccttctgatgccctgccatctaacagcgaacgctttgcaacaaattctgtcgaaatggctgatggaactagaaagacactaatattgcgagagattcctgaaggtgatgtgagatcgatactttctgacagagaatcattggcgccgtgtgatgtagcagtatttgtttacgatagctgtgatgaatattcatggcaaagagctagagacttgcttgtgcaagtggctacacatggagaaaatactggctacgaagttccgtgcttgatagttgctgcgaaagatgatcttgaccaatcttcacaagctctacaagaatcaactagagtgagccaagacatgggaattgaaacaccaattccgatcagtgtgaagctgagagatttgaacaacattttctgcagaatagtacatgctgcgcaactgccccatttgagcattccagagactgaagctggaaaaacacgccggcaatatcggcaacttctaaaccgttcgctaatggttgtctctgttggagctgctgttgcagttgttggactagctgcttaccgggtttatgcagctcggaaaaactcttcctcttgaagcctcctggacaagtgggaaaataagttgctttcttcctggagattactttgcaacatcagctggatccatgctggctgattttcgcagctggggtttttacccggaaggaaaccaacgtttttgtacagacatgtcatcagccataatttatccggtcaattggtgtttcagattctatataaatggcagacaccactcggctccattaaatgccgtatctgataatctgttgcctaaattagctcagctaaatattgtcgttactaccctatgtttttgctctcttggagtcttggcccttgcagtagtttggtattggaatttcttttcgttagcaaacatgctgagacatttagttgaacgaacctgagttgttccgagatttctgtcgggattattcaattggaatttttgaagcttggtattctattggatctgagaaaagtgcatgctagctcgctatctttgcgtgttattgtcactgaggcctcgtgcatatgtttatatactttgtatggatcattgtgtatatactgttccaactccaagcaggcactattgctttgaaacaaannggagaatattaaanggg

SEQ ID NO: 56375 - DNA, 354 bp, Zea mays
  Clone ID: MRT4577_151405C.1
gtttaattcagatccgtgttctgagcacgtttattcaagccaaagctcgcgccaaagacagttgttccagtaacgaagtctctttcaaaaatagttaaaacactagggctcgcacgcgcgctctttctgcgcaattgcgccggccgccggctcggccgccccggagtcggccgcgggcgcgccggcgtcggccaaggtcgccgatcgcgacgtgcgcgtcctcgccatcgatctcgagggggcgcgccgcgaggtcgtcggcctcgccgggcagacactcctccgcgcgctcgccaatgcggagctcatcgagccggcctcccagcgccacgaggatatcgatgcgtgatccgc

SEQ ID NO: 56376 - DNA, 336 bp, Zea mays
  Clone ID: MRT4577_151406C.1
aggcatgtccacattatcatggatgcaagattacggacatgaccattatatatacccaccatgggtaaaaggcacacatctaatataatatatacccaccacgggtaaaacgtacacatcgaatatcaattctcactaacattataaaagacatgaccatttgaatcactaaaatataaaatatttgaaaccgcatacctaatcaatattaagaggctaaaatagtttattatctttatgacagcatgataaatttataaaaactaacataattttaccatggtaatataaactgacttgagcggtatagcctataacgtgataataaagattttg

SEQ ID NO: 56377 - DNA, 242 bp, Zea mays
  Clone ID: MRT4577_151407C.1
cccacgcgtccgactagttctaggctagagcctgcttcgagccttaaccctcttcctggcgcttcgatctggcttttgcctgcgtcaactttgcccccatgttttaataaacatgatgtgtgctattaattttgtcttgttcaaaaaaaaaaaaaaaaaaaaaaaaaaaaaaaaaaaaaaaaaaaaaaaaaaaaaaaaaagggggggggtataaaaaaaaaaggaaaaaatatgtattgtat

SEQ ID NO: 56378 - DNA, 307 bp, Zea mays
  unsure (1)..(307): unsure at all n locations
  Clone ID: MRT4577_151408C.1
gtcacctacgtcgttgtccaactctgcaagatgcggttcttgcctactttctttcccacctgggaatgcggcatctatgatctcatgtgggagttcatgaaggccagcgtggatgtggcagccctgataggtctaaaccttgtcatgtcccggactgccggcaagggagagtacaagatcatggctgctgncctgggctgggccactgctgagcttattatgtcccgctgcattcgcctatgggtcggaagccggggcattgactatnactgggagtacatccagatggagcatggctccaacatca

SEQ ID NO: 56379 - DNA, 387 bp, Zea mays
  Clone ID: MRT4577_151409C.1
ccccgcaaagtttccgttaaaaatcccccccccggattttcaaaccccggggggtttttatgaacccttaaacggggttttaaaaaagggtttataattttacgggtggaactaaatcagttataaatttccggccgggggggcccaaaatttttaagcttcccaatcgaaattttggcctcaaaaagtttggggaaactttttttttaaaacgttttacggggggccgggaaaccgggctttttttaaaaataaatcccatttcccaaagttcccaaggaaacttttctttgggcttgggcttgggcttgcccaccccatgttgaaaaaacttgaaaagggtttggtcccccaaggatttggcccccccttttttcccggaaggtt

SEQ ID NO: 56380 - DNA, 515 bp, Zea mays
  Clone ID: MRT4577_15140C.1
cgcccactcctccggtctctacgtattccaccgccctccagtcccactcactctcttgccaccgtttcactccgatagccaaccacaccggactggaccgatcgactgccttagaggcactcatagcatgaggagcccacccagctggcctgtggctgaggccgacgaacacctggccgcactcctcctggacgaactgaagcctatggcggcgcaggaccacccacccgagctgatcatccacgactccaccctgcgggaacgaccggtgtgcgccgacccctgctcgccagacgggcgcggccctcgcggaccgccacacgagcaggctccacctcctggggcagccccgagcgagggtactcttcaatgctgcggacactggagaacactgtagggtgccgctaccggtttccgctgctgatggcagcggccaccagagcaggcgcagctctctaatcagagctgatcatgcatctgaccgcctgcttcttgtacaccaacacggactggca

SEQ ID NO: 56381 - DNA, 1590 bp, Zea mays
  Clone ID: MRT4577_151410C.1
cattgggtacctcgaggccggccgggccgggatctcgatcgtgctccattccatccacgtatgtagctagagctgccaatcggagatacgtacatggcccgtgtcgcgtcgctgctgctcaccgtcatcgtggctgcggcggcgtcgctgctgctgctgcttgcgccgtcggcggcggagctgacgcgggtggagcacccgcccaagaacgagggctcgctcgccatccttgcagttggcgactgggggcgccgggggcagttcaaccagaccctcgtggcccagcagatgggagtggtgggggagaagttggacatcgacttcgtcatctccacgggcgacaacatctacgacgacggcatcgccaacaccagcgaccccctcttcaaggagtgcttcaccaacatctacaccgcgcagagcctccagacgccttggtacatcgtcctcggcaaccatgactacacgggcaacgcgctggcgcagcaagaccccgccatccgcgaagtcgacagccggtacctcaacctcgccaagtccttcatcgtcaactcaggaatcgcggatttcttcctcctggacacgtcgccgttctacctcaagtactggaacagcagcaagtacgactggagagacgtcgctcctcgcgacacctacatccaaaacctcctcgatgatttggacgacgccctggtccaatccgaggcgccctggaagattgtcgtcggccaccaccccatcagcagcggctgcgagcatgggaacaccactgagctccaggagctcctcagaccaatcctcgaggcgcgcggggtcgacatgtacgtgaacggccacgaccactgcttacagcacatcagcagcagaaacagcccggttcagttcatgacgagcggcggcgggtccaaggcatgggcgggcaagttcaagaccacgtccgacaagatagagttcatctacgacggccagggattcatgtccatgcagctgagcagcacggaggcgcacctcgtcttctacgacgtcgccggcaatgtcctgcacagctatgacagcaccaaaagcgaagaagaggacgatggctggccagctggacaacaagcagctgtgaggggatcaattgattgaggcaacttataatatgtgtgtgggccggaagcaattcgtttgtgtatcttatgatgtgtgtatctgctatgtttaaaatgtgcattattgtgtgcacaagagaggattattgttgtatcttctatagctagttgggtcacttgaggggctcagggctagaaaccaatttaaaaccacaatcattggatagtagctggactctcatatatatcatataaaatataatatatagttactagccagttgctcgctgttggggctgccatagctgagcaggacattgccgtcgacgtcgtagaagacgaggtgcgccttcgagctgctcagctgcatggacatgaatctctggccgtcgagatgaactttatcttgccggccgtgggcttgaacttggcccgccatgccttggacccgccggcgttcgtcatgaactgaaccgggctgtttttgctgctgatgggc

SEQ ID NO: 56382 - DNA, 338 bp, Zea mays
  Clone ID: MRT4577_151411C.1
cgagatccgaggacggaggaccgaggaggtggggtcacggggaccggggagccagccaatcggggatgcgactcagcgactgcgtggccggctgctggccggatccggatgtgcgtgcgatggtgatgcgaggcactgaggcacacgctggcctctgctaggttttaccggacagagcagagtaacagactcagccacggactcgggtacccgtatcctaaaggattcaggtatttgcccggtattgatgtttccgtattcagaattatattaactagttagtacccgtatctgtactgaaaacaaaattatccgtatctgaaaattcaggttttttt

SEQ ID NO: 56383 - DNA, 268 bp, Zea mays
  Clone ID: MRT4577_151412C.1
gtcacacttggttgaccccttgcacgtcctgctggcggcgtctctaaaggccggacgagtctggcctgctgctcctggagcgcttgggagttatggccatggacgacctcccgggcgcctcctgctctacatcttcctccatggcggcggctgcctcctccgacccctcggacggctggcagacggcgtcgtatcccaagcgcaaccgcaagcaggcgcagccgccccgtaccacggggcccgatctggcgctgcagtccaacggcaa

SEQ ID NO: 56384 - DNA, 439 bp, Zea mays
  unsure (1)..(439): unsure at all n locations
  Clone ID: MRT4577_151413C.1
aagctgcgttttttctttctttttctttatgttaccattgtttttgtctagcattatgttttatatgatgatgttacaatgttatctgttactccgttttttatattatgctgtaacattatttaccatttatgttcaaaccaatgggcatgacgattccacccatgttcttacagcaaccctttgttggggctgcattctaaatagaaaaatttgtgttcgaccaaataatgagttgacatgccatcgcgtgtgactcattattattaacaataaaacaagtttcccacaggagaagtttaaaaaaaaaaaaggaggtacacaaaaaactcattaagaaaaaaaaaaaaaaaaattatgtttaaataaaaaaaaaaaagaaaaaggggaggnagaaaaaaataaggagagttttattttttaaaacctttgtgggggg

SEQ ID NO: 56385 - DNA, 298 bp, Zea mays
  Clone ID: MRT4577_151414C.1
gggcggggggaaaaggaaaaaatttggattattaaaagccctgggttgggggaatttgtccaagggggcaaaaattggacttttttcttacggggttttagaccggctttttggggcaaaggctttatgtttcggcggtggacttgggatttttccgggcaaaaaatggtttcggaaacttggtgtggggaaaaccaggcgcatgcagggggccttttgcttgaaaggggtggaatgatcaaaaataaaatttcttgggccccctacccttacccgaaaagggaaaatttcgggaaaa

SEQ ID NO: 56386 - DNA, 338 bp, Zea mays
  Clone ID: MRT4577_151415C.1
gcctgcaggccgactctagaggatcctctcggggaattccaatgtccacgattgccagaaataaggaggcaaaactgctcatatctgaattgcaattatgtgttctcttattaggcctatgctgaagccaaaggaaatgagatcggcattcctcggggaattccaattccacattttgaagaaataaagaggccaaaatgctcatatatgaataggaattatttgttctctatattgtgcctatcctgaagccaaaggaaatgagatcggaatctctcggagaatttcaattccacattttgcagacataaggaggggaaaatgctcatatatgaatt

SEQ ID NO: 56387 - DNA, 390 bp, Zea mays
  Clone ID: MRT4577_151416C.1
ggtacaatctctgagcccatgcttcctttttcacaaatacgaggaacatcttctgaagttcatatatcgtatacgcctagactatcggtacacagcatacaagtgtggatatgccctaactcacttgacaggggacgaatttggtagagcaagcccaagccttgttgttgacagcatcagcaaagtgctctgcaaggttctcaaccgaacccttatcgatgacgatggcctgcacgaggaacccgcacctggagaacatgatgaggcgggcgcgcatgatctccttgtccttaatctgcgcgaacgccttcggaggtgcggaaagcccgagcgtggggtacctggcggagacatacagttggtcaaccacctgaccgagagtgacaccgg

SEQ ID NO: 56388 - DNA, 335 bp, Zea mays
  Clone ID: MRT4577_151417C.1
ggaccatcagggaaaaatgcatccttgtttagggggtgtcgacgattttcctaatcggccagccttgaacttttttgttttggaccttaaatcgtcacatatggcctgacaacagacatattcctttgctatgttcatgtcttcgaggggggcgtaatctgtcccaaatttattcaaacttgttgtaggaaaaaaaagcgagttgtttgcaagcccaaaaaaacaatggaaaatctagccatcatcatatttttgaggggcgggggtcatccgttcaacaacccaccgggggacttccttggtgctcagccttttgaaagcaaacatgccctttg

SEQ ID NO: 56389 - DNA, 529 bp, Zea mays
  Clone ID: MRT4577_151418C.1
tattttgttagctgctacgccggctggtgccgccgcggcattcccggggggtcccacgcggcctttttatcaagggatgctgtgcgggcaccccgacgcgggtggttaccctcccgtggagatccactgatgcatatttgccggctggcgctggcggagatcctgctcatgcgcagtgtcccaacccgccgaccggggcacgttcggtcggagtcctccgatgcgattctgacgccctcgggtatggttgggaaatctgaacgctggggagtcggtcagcactgttgaaggccatgataacactgtgccagggcagcacaggaagttttggcacactgaatccatgagtgttggtcagcgtgggacccacggacggacaatgagggttgtaccgtgagggaagtagcagagtggtgccaaaaaaatttttgcccaacacaccatgcttgaggaccaatttactcttactgagatgacggaagggttatcatcggatggaaggatcacagagctcatatctgagatgcgc

SEQ ID NO: 56390 - DNA, 612 bp, Zea mays
  Clone ID: MRT4577_151419C.1
taggggccttttttttttttttttttctaaaagaatctccatggaaggcgcttattcaggccgtgggccctgcatgcatgcatggaaacagattaccgaacgtgccgtctatcagcaagtgtccgtgcatccataaaacacaaaaccgataactctgcccttgcgatgatgaacggaacggatgagaaccccataacgcaaatctactatctacgagacgacgatgcccggcctgactccaaggacaccatgatctatgacaaacaccgccctagcccggcgccgccgatttaccctgcttcacagagaccccttgcaacagagacggcgatcacctacaccaatctgattcgtgcccagcccgctagactctgtccagcaccacaggcctctgaagggtccaaccacgcgaaatattctgctcttatagggggtccaggagacacatctctatctcttcggagaccttcccttcggtccaacacctggggcctcgcaaatattgaaggtatcacacagactgacaaaaatgttgtctagaccatctgtggaccaagcttgtccagaagaagcgccaacatctgagtaattgccaagtcccgatacgatgct

SEQ ID NO: 56391 - DNA, 564 bp, Zea mays
  Clone ID: MRT4577_15141C.1
atgactaaggacgaaggccgcagcagagagagcttcgtcaagaaagtccaatcaatgatgatgaatgagttgcaggctaccccatggccaccatcttacaagccaccacaacttcccatgtatgatgggcattcggatccgaagcagtttctcatgagttacgaagcaaccatatcctcatatgctggcaacacagctgtcatggcaaaatccttcgtcatggcggtcatgagtgtagctcagacgtggtattcttccctttgcccgagaacaatcacatcatggcaaaagctgaaggacatgctgagaagggaggaggcttgtaggtattctgagatgactaggggcttcagaggaagattccaccctaggcatgtcagaacaatccacaaccccagcacaaatgatgacagggcaaaccacactcatggcaaccaacaaagctcacagtcttcaggaatgcagcaaacctcttacaggccaccagctccaagaggcagaggaggaagaagcttgggaggaaggttcaacactcaacccaggagattgttctgcttattttga

SEQ ID NO: 56392 - DNA, 173 bp, Zea mays
  unsure (1)..(173): unsure at all n locations
  Clone ID: MRT4577_151420C.1
caataccgtctgtccggtgacagccgcgagatgtgcatacgcaactatacaatcatacaggctacaagaggccattacagccagcatnttacgggcggtagcatggactgctcaacaaccatgtgcattatcgcaacaacgatccttagtgaatgtatatatgcaaagaatct

SEQ ID NO: 56393 - DNA, 248 bp, Zea mays
  Clone ID: MRT4577_151421C.1
ctatacatatataaaaataggaaaagaaaagggaaaataaaaaaagaaaagagatttcctcagctagttgggccggggggaattcggcccagtcgagcgcaggcgcgcgcggccacgcgggcaggcggcccacttggcccgccagcaggggaacggcgccgtgggcacgggcccacgtgccagatggatggggaggctgacgacgctaggaaggggtgacgggggggaccggtcggaacctgtggggg

SEQ ID NO: 56394 - DNA, 399 bp, Zea mays
  Clone ID: MRT4577_151422C.1
ctacaacagaaggtaacctaaagaagaaggcaaacaggagaggcaaaaaagccgggaagccaaaagggccccaacgacaaagggccaccgggaaaaaaccatgggggaccacgggcggaggaacaccaggggggggggcacggacacccgggattggggccaccccgagaaggcgggaaaggggacgccccccaggaaacccccggggaggggaaaaagggaacaaccccaaatggggaaaatagaaaactgacaaaccttcaaagaagggattgctgcaaaggactaagaagggggcacgacgacggaacgacctagaggaaacgcctaacgggcgccattggcgaaacccatcttcccaaggggtgcatacccccagggacccggggaggggggggg

SEQ ID NO: 56395 - DNA, 332 bp, Zea mays
  Clone ID: MRT4577_151423C.1
gtactatttgctctgaaatgctgaatgcctctgatgtgcatcgccaccctgtcttggatgttgttgtttgtggatcatgcagatttcttgtgatagagaagaatcgccttgaggatcctgtatctggtagttattgcacttggtgtgcacaaagtgaactgattcaaagttgtagttcttgtaagcttcttttctgtacaaattgcttgtcaaggaatttaggtgaagaatgcttatcagaagctaaagccactggttggcagtgttgctgctgtgtacccagtcaactagagctcttaatttctgaatgtgacaaggccctcagtggtgtg

SEQ ID NO: 56396 - DNA, 1242 bp, Zea mays
  Clone ID: MRT4577_151424C.1
tcatccagtttttcacgtgtcacaactgaaatctgctctgggacgtcgacaggtggtagtgcctcacttacccttcactaatgaccctctgcaagtacctgtccaggttgtggatcgacgcatgatacagcgcaacagaactatgatcgcccaggtgaaagtcgtgtggtctggcatggatgcggagctggcgacatgggaggatgcggaggcgctgtacaatcgctttccacgggcaccagcttggggtcaagcggtgatcgaagaaagggggaatgtcagcaccaaaggtgaacaggcgctgtctgaagaagaacgttcgggtgaaggacggcagcgagaggaagaaagcaagcgcgctagaatcaggcgtcgcaacgttcgcttgtgtgggccagagtgggccatgtaaatgattgggccaggctgcgtccggccagacgtcttatactgtggctgctcgaaggtgtgggatatcgcataacaaagaactaaacaatattccaccgtatctctctcttctccaaccctcctttccccttctccacaacacatcgcgatcgcgccgtcatcccgtcggcaaggtcgctaacatctggtatcagaggtcgacatcctggatccgctcggcgccgtgccccatcggccctgatcctccatcatggagaccgccgatacaactgcacgcagggtgctcgaagaaatgcaactcatggaagctcgcctcacggagaagattgccggtcgttgcgagggcatgcagcagtgggtggagcagcggtgcgatgaacttcaccaacacttcacgcatcgctgcgacaccatccaccagcaagtcgatgtcgccgcgctgcgcggtgaagagcgacttatgtcgctggaattactgaagactgaagtcgacgtctggaagccggagatcacaaagaaggtggaggacttatcactagaggtggcgagggttggcaagttcctcgaacgggaatttcgacctcacgtcgtcgaccaacctggcatcttcggtccatatcagtcggcgtccgcgcgaccaccaggcggaatccaccacgccgacgggccttttggccgccgccctgatctgcactaccgggatcgtgagtccgggccccaaggggttccgactcacatcccggtcaagggtacgttctcagcgcatccttctcgtctctccgggttcatggctgagcaatattatccgcatgaatcccctagagaatacat

SEQ ID NO: 56397 - DNA, 200 bp, Zea mays
  Clone ID: MRT4577_151425C.1
ctgactcatacatccactcttaccaaagtctgagctaataaatgcaacttacgtgactatgaaggggcgattcatacaatacgatgatatgtacagctactcggaacgcaggcttaactaagccaccactaacatgccgctgaagaacgccatctgatacaaatgcaacatctctcacttcaatgctaataactatcaca

SEQ ID NO: 56398 - DNA, 612 bp, Zea mays
  unsure (1)..(612): unsure at all n locations
  Clone ID: MRT4577_151426C.1
cgtcgccatgcaccgcgtaccgtaagncttggnatnncctctagnanncggccgcnnccttttnntttttttttatattttttttattttttatatttttattttttttttttttttatttttttaaaggaaacaatttttaaaaacctggactgttattaaaagaaatcaccccttgttgacttttaacatatcgaaccaattattattggctccacaactgaaaaacgcaccatcactcgatgagggcggggatggcaatgcacaagaccgggatctggtgggcgtactccgcgcgccgggcgagcagggacggcatcccggcctggggaaaaacggggtcgaagcgccgccccaacgcgatgccctccacggccatttccttccccgccgggtactcgcgcgcgttgatctcgtcgtacgcccccgcgagcgcgagctccatgtcaaagtaaagcctggggaactgccccagcgccgccctcgctttggggccgtccgcgcccgcgcccgcgcccggggagccggccagaagcgcctccgggtcggggaccgccccgccggcgttgttgaccccgaggttggccgccaccttggccaggccccaggcgt

SEQ ID NO: 56399 - DNA, 673 bp, Zea mays
  Clone ID: MRT4577_151427C.1
actacttcaaagatagtcataggtctggatctagctaggtagtacaggtggggataatggctccgcgttctctgctgctgatatgaaccactgctgcagcccatcctgctcttaggagccacctacgtacagacccaacaatgacagattctcacgcgaccaactggcgtgttctctctctacagagcagaaaacaaaggggtaatcttatttttactacacgatctggaagactaggcagacgaaatgaagtccaatggttgagcccctagcaaataccacaaagggagtggatcccgtctgacttcaccttcaatgccgccacttcatcgcacgatattgaatgtgcttggaatgtacatggaaagggtgtaagcgactgggatcacttctgtgacaatgatcctggataggatagtggtatatgagcaattcgagacatgtggtcatagttcgtaccatatgtactgatgggacgtctgattgctcaaggatatggtgatggacgcatataggatctctatctcttgggccacaatactgtcgaagggaagctctgaaggaggaattaacccggatgctatcaagtactgacagatacgtcatcatacttgatggtagaaaacggcatatgagcatatgtaacaattttacactgggatgtacctctcgc

SEQ ID NO: 56400 - DNA, 176 bp, Zea mays
  Clone ID: MRT4577_151428C.1
tctatataacaaataaaaaagatgtagaacaaagtaagacgtggtaaaaaatgaagtaaaaatgaaatatggtttgtaaattaaagagtttgtgagaattactgtgtatgttggtgtgttgtcgtgtgatagggtaggggtggcctgtgtggtggtatggctctgtgtttgttgtt

SEQ ID NO: 56401 - DNA, 424 bp, Zea mays
  Clone ID: MRT4577_151429C.1
cccacgcgtccggtcaactggagcataacctttatgtgcctggctcaaatacaattgagccactgtctatctttgttaaaaattacattgaccttatctcggccaagtacccatattggaataggacaaaaggagctgatcatttctttgttgcttgccatgactgggggccttacacaacaaaattgcatgatgaattgcggaagaacactattaaagctctctgcaatgcagatctctctgaaggattttttatccgtggaaaagatgtttcccttccagaaacattccttaggtcaccaagaagacctctaagagatattggaggaagaccagctgcgcagaggactatcctggccttctttgcagggcagatgcatggtcgagttcgacctgtacttctcaagtattggggaaacaaggg

SEQ ID NO: 56402 - DNA, 527 bp, Zea mays
  unsure (1)..(527): unsure at all n locations
  Clone ID: MRT4577_15142C.1
gggcgggcaatcatacaagggttcactaaagggcccaacggcaaatggggttctggcaagagcgatgggattgagggccagccccacaagagggcggccaagtggcaaatcaagccgctgggggaaagagggcaagggggagcatacaacatgccccccacgaaaggcctactacctcatacccatcatagcatggtcgaatacaacaaccaaacctaaactcccgcttgaaaaaaagcccggtccagagacggtccaatatgcagcaggggccaaaatcaccttactcgtcatggacctcctcctcgtcctcgtcccccccctcatcgggaggggcatcctggtactggtgggcctcaaacaccagatcggtcatgtggctctcagcttnggggaactccattttatccatgcccttcccagggtcccaaagcaaaaaagctttcctcctgaacatacccgggaactggttgctcccaccggggaccattctccggagggggggggaaattccaaaaaaggtgggg

SEQ ID NO: 56403 - DNA, 325 bp, Zea mays
  Clone ID: MRT4577_151430C.1
ataaaccaacaccggcggtatttgagataccatggatcgccggaaaactaacctttaacaatgtctgtagcctgcaaggaggacaaaaagccggcggaggggggggcctacataaaccttaaggtcaagggacaggatgcaaatgaggtgttctttggattaaaaaggtcaacccagttgaaaatgctgatgaacgcttattgggaccgtcagtttgtgaacatgaatgccattgcattcctgttagatggccgaccgccttgttgaaagaatacccctgataacttggaaatggaggacggcaactaaatcaacgccttgctta

SEQ ID NO: 56404 - DNA, 254 bp, Zea mays
  unsure (1)..(254): unsure at all n locations
  Clone ID: MRT4577_151431C.1
gtacgtaagctcggaattcggctcgaggcgacaacaactgctgtatcccacgactcgaaacccggctcaaccggcatgtattgcggcgactgactacatcagcatgggtgggctccatatcttacaagtcattaccacagctaccactacatgtgtcgacggtagctcctcgattgatcatacagcggntctcgaactgtggatgactaccactcacggacctggatgtaaatcatgtatggtatcatagagac

SEQ ID NO: 56405 - DNA, 1450 bp, Zea mays
  Clone ID: MRT4577_151432C.1
gggtcgaccaacgtccaacacacttctggtcaactggagcataacctttatgtgcctacctcaaatccaatttaaggcattgtcaacctttttaacaaataaattgaccttatccccggcaagtacccatattggaataggacaaaaggagctgatcatttctttgttgcttgccattactgggtatgttttctccactgcatttttttttccttgaatgaccagcatgtaaactatggattttaaccaatacctttcttactggttttttatcaactttttttagaaaagtttgataaactgtcaaggagaaaaacagatttgatttgaaaaaaataatttttttgtacttgacattgtatcttctttcaggggccttacacaacaaaattgcatgatgaattgcggaagaacactattaaagctctctgcaatgcagatctctatgaaggattttttatccgtggaaaagatgtttcccttccagaaacattccttatgtcaccaagaagacctctaagagatattggaggaagaccagctgcgcagaggactatcctggccttctttgcagggcagatgcatggtcgagttcgacctgtacttctcaagtattggggaaacaaggatgatgatatgagaatatatagtaggctgccacaccgaatcaccaggaagagaaattacgttcagcatatgaagtcaagcaagtattgcatctgtcccatggggtatgaggtaaatagcccgagaatagtggaggcaatatattatgagtgtgttccagtaataatcgctgaccattttgttctcccgtttgatgccgcactcaactggagtacgttctctgttgtcgtaccagaaagcgatgtacctaagctgaagcaaatcttgttggcaatacccgagagtcgatacataacccttcaggcaaacgtgaaaagggtgcagaagcattttatgtggcatccgaatcctgtcaagtatgacattttccacatgatactacactcagtctggtttagcagggtgaaccagatccgttagagcagcacctgtggttcacatgcctgaattacatatggagggttgtttgctgacccgtttttggtgtgctcgtctgaggaacctgctcatgtggtgggatttggattgtaatcttgtcgacacagctgttccgtgctcaaggtgctgaatggagatgttgatctcacagtagacctgccagtctgtggataaaatacagtttatataggagcaggcttatgactgagttctcattactggtaatttccctcatggatagtttggtgtaaagcgttcacaaaagccgatgaggtgttgtgacgactgacgatgtccctttctgtaagattgtaattttcgttactctttttaacctgggcacgggaaaagatctggaatagggatgcacggggaattctctgtc

SEQ ID NO: 56406 - DNA, 169 bp, Zea mays
  Clone ID: MRT4577_151433C.1
ccaattgtggccgtggactcacccgcctcgtcctccaggatccggcgacgaagattagctcgtaagcttcgataagatgggatctgatattagcagtggtggcggtcagaattctttgggctatctctttggcaatgacgaagccccaaaatcatatgagaagcctgca

SEQ ID NO: 56407 - DNA, 757 bp, Zea mays
  unsure (1)..(757): unsure at all n locations
  Clone ID: MRT4577_151434C.1
gtacgcctgcaggtaccggtccggaattcccgggtcgacccacgcgtccggtgcgttccaccgccggcatggcgcattacaacttcaagaagattacggtggtgccgtctgccaaggactttattgacctaacattatccaagactcaacgaaagactccaacggttattcataaacattatcaaattcatcggattcgacatttttatatgagaaaagtcaaatttactcaacagaattaccatgacagactgtcacagattctgtcggatttccccaaattggatgatatccatccgttttatgctgacttgatgaatattctctatgacaaggatcactacaagttggctctaggtcaaataaatattgccaaaaacttggtggacaatgttgctaaagattatgtgcgtcttatgaaatatggtgattctctgtaccgatgcaagcagctgaagcgcgcggcccttggacgaatgtgtactattatcaagagacagaggcagagcttggagtatctggaacaagtacgtcaacatttatcccgcttgccaaccattgatccaaatacaaggactctgcttttgtgtgggtatccaaatgttgngaaatccagcttcatcaacaaggtgacaagagcagatgtgggacgttcaaccctatgcatttaccaccaaatctctgtttgttgggcacatggattataagtatctgcgctggcaggttgtagataccccagggattttggatcatcctt

SEQ ID NO: 56408 - DNA, 785 bp, Zea mays
  Clone ID: MRT4577_151435C.1
ccgcgcacggcctgctcccttgtgcgcgctctgcttcctcgccgagctcgtccctgcctcaaactcgtcctccactctgtcgtggccgccatggaatccgcccacgccccgttctgtggaagcccagcttgatccccttcggttgtgcttgttttggccttagacgccgccctcttcattttttcagctcgacgtcggcctgatcgagttcccgccagcacttcctctttgctcgccatggcgcgtcgagtttcctcgtcgagcctcgccgcgcgtcttgtttcctgctcgccatcgcgccctctcggctcgctcggccttaatcactacctcgtcgtcgacccacgtggtgcccacgacgtgctcgtcgacttcgatgatttgatttccaatttcatgctgcttatgtcgactcccggaatttcttgtcatactcgaccctgcaaatctccaactcgtcgtcgtttcgtacatcctcaagaaatacaaagactcgggtgaagacggagccagcagcgtggtgttcaccaagtgcgcgacaaaaagttcggacattctgcgcgactcaagttcgatgcgtcaaaattattccgtcgaggaaaagaccttcagcaattgattaccgaagaaaagaaagcccctgaatgacgtcaaccggaacccgtagtcgtgcttctgactatctcgtcaaattagtcagggtaagcaaatttgttattcgtgtgagtggattaatgaatgatctgactaggtctaatatttattagattgcctgagtcgctttg

SEQ ID NO: 56409 - DNA, 399 bp, Zea mays
  unsure (1)..(399): unsure at all n locations
  Clone ID: MRT4577_151436C.1
ctgtcgcatgggaaaaactgggcatggaacttgggttttgatgatttcctgcgtgagggttgattgaatatcttgatgttaatgaagaaaacaatgcactgattgcattgtatgagcacatggatcaagatgatgttgaaagaagcagcatcacacacattgaaatagagccattgagtatcttaggggttgtatctggacttattccatatccacaccataaccaatctccacgtaatacttaccagtgtgcaatgggtaagcaagcgatgggaaatattgcatataatcagttgttcagagcagattcactactgtacttactagtgtatgcacaacggccactgctaacgacaaaaactatngagttggtggggtcgacagcaacggaattcactg

SEQ ID NO: 56410 - DNA, 396 bp, Zea mays
  Clone ID: MRT4577_151437C.1
aaacaaagagaagtatggttataacattaatactgcgcgtgtaaacttggacggttggacctaacaaaagttggacaggttatcccgccgccggccaatattaaatcactggtcccaagttgttgcctactgatggtcccactgaaccctatgtgcgcctcccggtatgtcctcattctgggcggaggccttctggtgctgatgctgccgcctgcggatctccgtttggatgttgacgatttaaggcattgttttctcgaactcgaccagctccatgtcggtgtactgagacaccgctttgggcgggagcatagtctccagggcctagaactggttggggctcagtgagtccggcaacttcaccgaaaagaggatgtacagctcggccttcatgaa

SEQ ID NO: 56411 - DNA, 408 bp, Zea mays
  Clone ID: MRT4577_151438C.1
acgaaattgggacgtaaaatactaaggggcagctcgctaaacctgtatagctttcctagtataaattgtagaattatttgatggcaactggggtcctcctggctgcaacaattgcagaaaaaggatactccagcgtctgagaatggtaaggggaatgcaatgaagactgacaaagaaccagctgtcagaggtcttggaaagcattttgaacaattaaggaaacttaaaaagaaagaatgcaacaatgaaggttccagttctgagaaggaagaatgtagcaataactattcatcaatgaatggtacacaagtatcagatatgatagctgctgatgaagcaaataacggggctgatattagcaagttaatgtcagaggatgctttccttagcttaaagagtttgggagct

SEQ ID NO: 56412 - DNA, 853 bp, Zea mays
  Clone ID: MRT4577_151439C.1
ggtccgggccgggcgggtgtgtgtgcgttcgattcgcttctgctgcagctagggtttagaggttttctgggcgcggagcgggaggcggcggcggctatggctgcggcggaggaggagatcgcggtgaaggagccgctggatctgatacgcctcagcctcgacgagcgcatctacgtcaagcgccgaacgcaagtgcatgcgtcgccgccagcccccaaggccagtctgagtgtgcgttcgattcgcttgtgctgcagctagggtttagaggttttctgggcgcggagcgggaggcggcggcggctatggctgcggcggaggaggagatcgcggtgaaggagccgctggatctgatacgcctcagcctcgacgagcgcatctacgtcaagctccgatccgaccgcgagctgcgcggcaagctccatgcgtatgatcaacatttaaacatgatacttggagatgttgaagaggtcgtgacaactgttgagatagatgatgaaacatatgaagaaattgtgcgcaccacgaaacgcactatcccctttctttttgtccgaggtgatggtgtcatattggtttctccaccccttcgtacggcatgaagtttgaagttagatcatgctggttgttaattatgataactggtgtatttggccacttgatggcgttgcatggagtgtatgttatgggcctagccgctactttttctgatgggatgtaggtttaacatgtgatacaatcgtgtaaacaactgcttgtgcttggattatctgtcggatctcaggggtgcttctcagtctcaaaaaaaaaaaaaaaaaaaaacgagactagttctctcttctctctcgtgcga

SEQ ID NO: 56413 - DNA, 209 bp, Zea mays
  Clone ID: MRT4577_15143C.1
ttttctttgttgtaaataccagactaatatatttgggaacatcagaaacacttttaaatcagtttgttcccctaacacgaattaattaacaataactgaactaaaacaatatgaaaaactacctacaaagaaaaaacagagcaccagcccccttggcccaatcaaattactaatacttaacaaattttatttttttcacatttttttac

SEQ ID NO: 56414 - DNA, 485 bp, Zea mays
  Clone ID: MRT4577_151440C.1
ggtacacgggcccccccctcgagtttttttttttttttttttttttttttttttttttttttttttttttttttttttttttttttttttggaaaggggaaaaccgaccacttcttttttggctaaaaagggaaatacggaccggggggaaacaacccacggggctggaaaaaacaaagcctgccccctaaaaaggggcaaaaaaaaacgggcccggttttttagggggggccccatcccatacatcaggcccaacgatttttaagcgggggaaaaaattttttgggcacccgtttttttcgcagaatagaccttttaaacccactgggctgcccgcttaatgaagggttggcacccatcgtgggggccaaataaaacaaggccgaaccgtcccggggacccggaaaccctttcgaagttgcccaaaaaaaaccaagcgaaagaccccggccaattcgcccccaagtctttggactccttaaaag

SEQ ID NO: 56415 - DNA, 400 bp, Zea mays
  Clone ID: MRT4577_151441C.1
aatacattggttgtttgtttctttcggataagcaaagacatgcatgatggacatgcttgtggagccaccacttcaaaagcaagggaaacccgtttgggcgcgggggcgcacccggcaataccggaccggaacgtgacggggtgcccacttttcaaagaggaaggtccataacattgcggacctacaccggaaaatgtggagaaccgggtgaaacagcacctgggtgacaattaacccgaaccatcgaacattgagaacaaaactcaaatagaggggagccaaacgtgagacgtaacgcccattaattgccaggtccacaatgaacgtgtcgaagagggcaaacatgcagggcctggagtattaaataaacgcccaatgcgcgaacaaaaggaagggctct

SEQ ID NO: 56416 - DNA, 615 bp, Zea mays
  Clone ID: MRT4577_151442C.1
attgggtacctcgaggccggccgggacatatctttccacctgcatctcgcacctcagcgaggtcctttgaagctatcacgatgctgccgctgctgatcctccagatcggagagaatgtggcgcttgacctctcatggccttctggtctatccctcctccctcatcctcctgccatggcttggtaccaccacaccgcgctccacatcacgagcgcactgtcttctcaacggcatactgcgcggactgcagaacacctgagactccggtttctgcgcctacgtcgacaacacagtcctatgaagcgtcgctagagcacagacaccatgtctcaaacactccggacgctgtaatcccgattcctggaactggaactgtcacacaagctgacatccaatagcctagagcaccctgctgtggcatctgagtgctccctctccatcctacgaaagcggaaaaatgtacagactctcctccaccgacgacgacgacaacctgtgcgagtacctgtgcaacaacttcccggcgcgagtggctcgtaccggcctctcgttgtagtagtgctatactgcatctacttctacatctaaaacgtacaaccggcgaactacgacaacc

SEQ ID NO: 56417 - DNA, 344 bp, Zea mays
  Clone ID: MRT4577_151443C.1
ggggctctttgcattggctataaatctacaagtaagtatttccatggacattcctattcaaaatgagtcaaagccatatcactgtttgctccttattttcctttatatagatagttttattgcaatctcttgtatgcacagtaatgtacactagtgttaaaaggatgactctctaattacgctactcatttctagttgttgctcttgatagatgtatcttgtaacaatactatcattgtccactgttgtgacttgtgaaccagcaacacataatgcaagcatgattgcttttgcaggttcctggcactacaaactacagtatggtttctactttgttacgaaga

SEQ ID NO: 56418 - DNA, 522 bp, Zea mays
  Clone ID: MRT4577_151444C.1
agaacagaccaacagtgttcgtgactgacgacgacggttaccgttacatggaaataacaatgattacatagaaaacagacccatacaagcagatccgcataatccttcgtgcgcaaccacatgcttacattggaggggaacgaaaccaaaccaaatgtcacgcacgcgcgcaacgcaacagatgctgaaacaaaaaggcgacccgaaccaaccactgtcacccaagcacaccgatgatatcattatgctcgatcacgacttacgctgaacgaaggtaggccgtcattgttccacaggcaagccgcgcttcatgacgcgttggtgctgaaggagcctagggccttgatggcgccaggccgaaagatgtactgctggtagaaggccgggatggcagcgcccacgagaaggggccacccagaagatccgtgggcgccccagggcttgtgcttgttgtagatgacgcgagagcccaggctcctggccgggttgatgccggggccggtgactgggatgggggccagg

SEQ ID NO: 56419 - DNA, 265 bp, Zea mays
  Clone ID: MRT4577_151445C.1
cccacgcgtccggcacaaactcgtcttttccgctccacaggatcctgtgcgccggcgtaaccgtgtgaccgcccgtgccgccggccatcccgatccgccgacccgtaccagccccggtcgaagacatgtaaccgacggagcccacgcgggaggagagcgtgtacatggacaacctcgctgagcacgcggagcggtacgaggagatggttgagtacatggagcgcgtctagcgctacgccgggggctacggtggcggcgaccagtt

SEQ ID NO: 56420 - DNA, 251 bp, Zea mays
  Clone ID: MRT4577_151446C.1
gatcagaaagccaagggaggatggatactatctactttttgtgtgcaactgagcgcgcaatatcgagaaagagtatgtttaattacaaggctgctctattcttggagacactggtattgaattacagaggagaggctgttctgacgagcagaacatgggccgtgcggatacaccgactagtatatacgaactgatagctgatcttctacgcttgtaaccaatcgatcaggctcagcccgtctacgacgtac

SEQ ID NO: 56421 - DNA, 218 bp, Zea mays
  Clone ID: MRT4577_151447C.1
gggctcctgcccagggttacgactggagattgggggggtttttcattatgaatggtgggaatatccacgcggataccaggaagggtgcggcaaaatagtctgccacagatgtacttgacgagctgtagttatgactgggtgacaaggttgatgctcttgtgtaggtgatgatcgggacttgagctagtatgcagagacgaacatttttaatttttacc

SEQ ID NO: 56422 - DNA, 1605 bp, Zea mays
  Clone ID: MRT4577_151448C.1
atggatcctaagggaaaggggatggtggtcaacgacaaggaaaagaagtccttcctcaacgagcctagagacgacaagccaaccgactctagctcgagtcacaagaagaaggacgggaagaagaagaggcgcatcaagaagatcgtctactacgacagcgatgcatcttcctcttcaccaagagacgacgatgatgacgattcttcgttaaagaaaaagacggacaccctcaagatatctcatgagggaaatgacgccaccatgatcaccaaaatggagttggtggaaggcgagctggggagatttgcgatgattaggggagaggagccaactcaaacctacaacaggctcaagaccctggtcaacaagattagaagctatggaagcacaagatggacggaccatgacgtcgtccgactcatgctcaggtcatttactgtaattgacccccatcttgtcaatcttattcgtgaaaaccctaggtacacaaagatgacgcccgaggagatccttggaaagtttgtgagcgggcgcatgatggtgaaggaagcgcgacacatggatgacgccttgaacgatccactacccatctacgagtcacaacccgttgctctcaaagcaacaagcagcaaggaggcgctaccaagcaaggtagctcaagtagaggctgccgacctcaacaaagatgagatggcgcttatcatcaagcgcttcaagaccgcacttagaggacgcatggagtaccccaacaagaataaaacaaagggaaaacgctcctgcttcaaatgcggtaagactggtcattttattgctcaatgtctcgataatgaaaatgaccagggacaagaaagacatgggaagaaggagaagaagaaaagctataggaaggcgaaaggcgaggctcatcttggaaaagaatgggattccgactgctcctcatccgactccgacgatgaaggactcgctgcctcggccttcgacaagtcttcgctcttccccaatgaacgccacacttgcctcatggccaaagagaagaaggtaaatgttcgagaaacccctaagtacactacttctagcgatgatgattcttccgatgatgaagtagattactctagcttatttaaaggtttagatagagtcaaagtagagaaaattaatgaattaattgatgctctaaatgaaaaagatagatttctagagaagcaggaagacattttatatgaggaacttgacaaatttgttagtgtacaaaagtctcttgctttagaaactaagagaaatgaaatgctatcttctgagttatctgcttgtcatgaatctatctctagtttaaagattttaaatgatgatttaaatgctaagatagaggaagttaacaaatctagttcatgtgtagagcatgttgttatttgcaatagatgtaaagactttgatgttgatacttgtaatgaacatcttattgctattactaaattaaatgatgaggtgtcaagtcttaatgctcaacttaagacttgcaaaagtgattttgaaaaattaaagtttgctagggatgcctacactattggtagacacccctcaattaaggatgggtttggtttttga

SEQ ID NO: 56423 - DNA, 403 bp, Zea mays
  Clone ID: MRT4577_151449C.1
tttgcccatcttgctgagtcagagctggttcaatctgttgcatcatttgttgttgcaggtttgtaggtgctttggccacagcgggcgggctagatgaaagcagttgttgctgttgtgggtaggcggctgggttcaccatggctagttgactgagcgctggctgtaactgttgcagctgttgttgtggctggtttgctccttcgtttgccagagcaggtgggtttgatgcaagcaactgctgttgcaggttggcggctgggttcaccatggcttggtggctcattgctggtcggaattgttgttgctgtcgcgttgcgatggttcgttttgtttgttgtgccttggattgttcgtgcttctggcaaattgtttgttgtctgactcttcgtcgcttttgtttgtt

SEQ ID NO: 56424 - DNA, 475 bp, Zea mays
  Clone ID: MRT4577_15144C.1
gaataaacgggccgaccgacgcgtgcggaacagctcgctagctatcaagcttacttgtgctgctgcctcttcgttcatcagcaccggccgcgatatttttaagccccgcgggagctccatctgcttgaggttcccgtttttctgctcggtctattttgcacttttcctaaaggtgctgtagctgctcccttttctttccttcggtgaggaagctcccgtcggggccctgctttttcttacgtcctactacatcatttggctgcttgctacggtggatctttttaaggctactccgtccgtctactgattctgcgttggctccttctttctctactccgccgacgcttatgcgtgcgcttcatgagttgtttatcaaccactagtaatatattatgccgtaaatttgtgcctgcatataaacactcacttgaggattcatgcatgcggcttttaattaatttcaaaaataacatgc

SEQ ID NO: 56425 - DNA, 272 bp, Zea mays
  Clone ID: MRT4577_151450C.1
tgccccgcccgaatattcggggcgactcacacgtgcgctgcacggtggttcctttctggacagcgggggcgggcgaatcggcggatccttgggctagctcagcggggcgagactcacatggaggaagatacacacagcgggggcggtgcaaccactcggcttcttctaagggatatggggggcccaaagaattccggctgaagccgatcaacaacggacgaatcgctatgctggccttcacgggcttctgcaccaaacagatgaggtgcctg

SEQ ID NO: 56426 - DNA, 705 bp, Zea mays
  Clone ID: MRT4577_151451C.1
ctcgaggccggccgggaaactaacctccaggaccaccaacaccgccaaaatgggacccaagccagcatccaagaccgccaccaagaccggcaagcaggctaacgccgctgccaaagcggcccttaagggctcgtatgcgaacaagaagcgcgccatcaggaagagcaccagcttccaccgccccaagaccctcgagctgtcccgcgcccccaagtaccctcgcaagtcggtcccccatgctcctcgcatggacgctgagaaggtcctcatccaccctctcaacaccgagtcggccatgaagaagattgaggagaacaacactcttgtcttcatctgcaacgttaaggccaacaagcgccaaatcgctgccgccctcaagaagcagtacgacgtcagctgcgtcaagatcaacaccctgatccgccccgacggctcaaagaaggctttctgccgcctcactgccgatgtcgacgctctcgacattgcggctaccaagctcgccattgtttaaatgaggcggtgtttgtacgaagagagggcatgggatggtcatgatagggtcctggttatacccggcaaaggaaaaaagcgatgtgatatgcatggcgggcgttcatgggataaacgtagtcaaggttgacttcgaatgaaacaaatttccgcatggcgccaataaaaaaaaaaaaaaaaaaaaaaaaagcggcc

SEQ ID NO: 56427 - DNA, 205 bp, Zea mays
  Clone ID: MRT4577_151452C.1
gacgagctgcctttacagaagacctcgttagacagtagattcaattccttgtgctcctcgacctacactgtggtctctcctgcgacaccgataaacttatacatgtcggacttgtagaccgctgaggctactaacgtgcacactatgaccatgttggagacgatgatggtgaagtctccatggtactcccgctggacactctgtt

SEQ ID NO: 56428 - DNA, 306 bp, Zea mays
  Clone ID: MRT4577_151453C.1
tactttggtgttttccatacacaattttcaattggggggttttttttggatttttttgtttcaccccttcaatatgttgttttcaaaaagaaaaccggcgattttttaaaaaagaagggggggcggaaaaacaaccggggcgtatttttaaaaaacccaggggggatattgggggtcaataaaaccccctaattttttatagaaggggggctgcaaaaagggggaaaaccaacaaggagggggacaaaaatgataaaactgggggggagaaatcttaacgggaggggccctttccacccagggggg

SEQ ID NO: 56429 - DNA, 128 bp, Zea mays
  Clone ID: MRT4577_151454C.1
acggagtgcagtgctgatgcataacttgaggtaatgtgcgaagtacaagaggccagacccagtgggagacaggacaatgcctggagcacctgtatgggaaggtcgactagacgaaacaagtgactcta

SEQ ID NO: 56430 - DNA, 566 bp, Zea mays
  Clone ID: MRT4577_151455C.1
gagagtgagagagagagagagaggcggccctccctccgcagaccacagtccacaagttcttctctgcttttgtctggctctggtcgcgtctgctcttctggctttcggatcccggagagacttctgctggaaaggagagtgaaatagaaaatgggtgtcgggaatggatcagcagacgtgaaccagcagacggcgcgcaatgaaatacgagatgagaccgcgccgcttcttccggtcaaggtggaggaggagggattccatgagtttaatggagcttcattctccggggcagttttcaatctctcgaccaccatcgttggtgctggaatcatggccttgccagcaagcatcaagatgctgggcctcatccctggccttctgatgatcatctttgtggcactgctcacagaggcatccattgacatgcttatcaggtgcagccaccaaggaaagatcacgtcatatgggtggctgatgggtgaggcatatggacaatgggggaggattgcgctgcaggcctctgtggttataaacaacatcggcgtgatgattgtttacatgattat

SEQ ID NO: 56431 - DNA, 803 bp, Zea mays
  unsure (1)..(803): unsure at all n locations
  Clone ID: MRT4577_151456C.1
gggtacctcgaggccggccgggccgggcttctggtacattcagcttcttctgctgttcttatccgacaaaatttgcccatcccacataaatgtagcataactcaataacatttatagatatggtgtgtgcatgtaggttgtcgcaacagaaattctcagctgatggatagattagattaatgattgcgctgttgctgttcttgcttggccttctacggaggaagtcatcatggtgaacatggaggtactgcccttttgctttctccattaatgttcaagataaaagttacctggttttctacttcaatttccttctagccaattatggagggacttaatatgtggatgaaaattagattatatgtaacatctgtgaagctgcaaggtgctgtgcagaaactttagcaatccgaattaattgtttcatgcaacggttgaaggtatcagacaaataggatgtttataggatggagttctagccggttgttctgatcctgatacttcatcaattcgtatttacaaggttgaagcaaaccaggacaaacatcacaagtagaaaagcaattttagatctacatagcatgaacatgcttctttcacattccttgaacttagcacagttctcggaataatgctcagcttgtgtgtaccaagaaaaaactcagagacttgacttcctctgaagcgaccttagccatctcaaagtcatgccataaccatggaagcatacttatgttacaccttagntttctcccacagcaactcatcgatcacgcactcagttccatcaacaaatatggact

SEQ ID NO: 56432 - DNA, 615 bp, Zea mays
  Clone ID: MRT4577_151457C.1
cattgggtacctcgaggccggccgggcttgttctctgccctacatctccatctcgtaccttcttcctcacgatctgcctatagtcccccggcaatgagatgcttgattatcaatatctcctatctagatactaactcctggcttcttattaccctacccagtagctcgacaccggctcactgcggatatggctagggattcgtagcacccttggatgtgttattgtgaaccttgtggcccatccatccttctatggagtacaggactaaagctatctagacacatatgtgaaggtgaactgtattgtggcctcattccttcttcatcatcaacctcctttggacaagaaatcatttgtgtcatacatccaaaaacacatatagaatctcactggtgagcttgactcagaaaaagattcagaatatcacttaatgagatctagcgtgcaacccccgttctccctactctaccgtaagacctcccatattttcttgatcactccatttaatgatgatgcgcctgtgatactctcctattacatccatggagcctctacatcgacattcctctatttctctctcggtcttaaagacacaagtcgctatcttacctgcg

SEQ ID NO: 56433 - DNA, 159 bp, Zea mays
  Clone ID: MRT4577_151458C.1
attttatcggttttttttaatccacgtactgctatcatgacccgccaaaagacgattactcgcgaggccggaaacatagaggacctatccaaataagttgtcaccaactaactagccaagctgaagtcgcaaaagatacatcacgacgaccccaaaact

SEQ ID NO: 56434 - DNA, 437 bp, Zea mays
  Clone ID: MRT4577_151459C.1
agcggcacgaggccaatcaccatcttgccatttttgaaacaaccacgctctctgggacaggggggagataaatcctccttaccacccctcccgctgggaagacaccaaggccacacggagacgctactgcaacagacatcaaggataacaccacacatgactcagactcgaatgacaccccaagtatggcgccctcggatggcgacacggcatacgacaaagcctccaccttcggaatggaggccacccctaggatcacaatgactgagaccctcccaggcagcaccaagagtcttgccggaagcaacgcgacccgagccaactggctgacatccctcggaacaacaatgacggcaaacttgctgaacaactggagggccggaggtaccccgaccccctacatgaaagggaggagccaccactcacgcgaacagaaa

SEQ ID NO: 56435 - DNA, 306 bp, Zea mays
  Clone ID: MRT4577_15145C.1
gcgggctcaagattagactacaacgacaataccccactgacatcaccaaacaagaaccacccccaaacacaatacatttaccggcttcttgtgccggagataataacaagagtttagcacaccacaaccgtttgcacgctggcatgtttcgaactcagaggcccaaacccatggcgacggcaacgctgagacccaaagcaaccgagttccccaccaggctgcatccatgcttgagcgccccactgttgtacgggctgttgtccaccaacggctggttgccgaattcgaacgtttggcccacattct

SEQ ID NO: 56436 - DNA, 364 bp, Zea mays
  unsure (1)..(364): unsure at all n locations
  Clone ID: MRT4577_151460C.1
gtcaaataataccttgctctgatgcatgtgcctaagctgcacaaccgtaccctgcgagtacgtcatctgagtccgcactggaggtggccgatggctctgtgactgtcgccgaggcggaggaaccgaccccttcgagcaagcccaatgttaagttccgctaaataacttcgatactgaatacgcagtttattgcagactctcagaaggtgaagactgttccgcatctgatgactgacgatatcattgatcttatgatgcttccgaccatcaaaaggagatcgtcgctctttaatggcataatcatcacagtgcacanagctggtgttcacacgacaatctgtagcagaacgatcattgctggtgt

SEQ ID NO: 56437 - DNA, 410 bp, Zea mays
  Clone ID: MRT4577_151461C.1
aggaaaacaaaaaagttttattcagggcacaagcttattggcgaaattcgaacaggagctgagggcgggcccctacaaaagccaagaacaaagaccctggacaaccaggcaaccaaagacaaacaaaagggacccaggcaggcacaaacgggcggggatgccggcccccgggcggttaaaatagccctggggaggaaactctccctgcgcccggggacccccccggggcaggggttgaagccccccccaaccctgggttcgcgcaccaaaaaacccgggcccccggggggaccaagggggggggggggggggttggcccccgccccaaaaacccggtcaaccccccaaaacttttccttgaaaaagtgctggtggaccccccctccgggggggccaaaaccgggcggggc

SEQ ID NO: 56438 - DNA, 351 bp, Zea mays
  Clone ID: MRT4577_151462C.1
attcggctcgagatcgaaaactgtttttttccaaattggtactaaagcgcaagttgtaccttttgtgcaaaaggctactgctacagccaataagcgggactataatgcatgcaccgtatcgagagctgaagatacatgaggtaatttgattacatggcattgatggaaaacatctaataccagtggaagttctttgtcaccctggactacctgtgcctgtagaataaccacattgtaggtgaatgaactagtcctggacatcactactactattcatgttggatataaaatggagtgtgacatacataatatgatataggctgtaagagtaacaaaatatacgcatgcatt

SEQ ID NO: 56439 - DNA, 157 bp, Zea mays
  Clone ID: MRT4577_151463C.1
ggagggttaatcgtccgctgggggataatagggcgctgggtgttaccgtgggaaaatgggattccggtgacaattccaaacaactatcacacccggacacataatgggaaaagccgggggggcctaaagaggcagctaccccaattgagtggggtag

SEQ ID NO: 56440 - DNA, 970 bp, Zea mays
  Clone ID: MRT4577_151464C.1
aatgcaactcctgcaaataacttttggataatttcgatgatagaccaccttcacagcatatagacattacaacattgttaaacagaatcatgaagaagagccaacacaggggagaacgacgggaagaaaagaacaggctactgtcttctctatctcaacagggcgacgcatttcaataacaccctacactgtttatgttgtacacacctatctagaaaagacagaaaaaaactgaagagaaagctgattagttacacggagggaccgatctaatcagttgccatcaaccataccgagaaggagctaggcaatgatctacaaaaatgctaccagggtgaaaacttcaaatcaagtgacaagcagaaggttgttttcatgcccattgttgtgcacagtgggtcgcagcggatcattcttccaaacaccatcaacaataaacttaatctcatatctaccagggtacagtctcagatttaaggaaaacatgccgttttctgatctttccaactttctttgacttgtccagccatcaaaggacccaaccactaaaacatctgaagcagggttggcccacataatacagacagtacggagctcactcagtgccttctcaactttatcaagcctcctttgtttatcttcaattattttgttcctttcaattatctcaagagccatcttcccttctaacacagctattttagcccggattgatcttaactcctcctgagcttgcattacctttgtctcctcaaattcccaatcatcagagatgtcatccaacacagttgctccattactatttgacaaatctgataaaactttgtcaaatcttgatcttaatgtcttgagagcagcagaaaggtccaattccagaatttgaagccgtgaatgtatctcatcttctccaggtgccaacaccatcgctagaaaaatcgcttacagccacaccattagatgacctgtgaat

SEQ ID NO: 56441 - DNA, 244 bp, Zea mays
  Clone ID: MRT4577_151465C.1
cggccggcgggtaaagatgacttatatacacagcagttagcgagctaaccccacagccctcttacaactacaacaatagttgccctttgtacaacttgctttgacagacccatcattcttctaccaacaacacatcattagctggtgccctattctagattgctcattagttgttattcaatataaagttcttaggatgatgtctgtggccaaccagaaataataagttacattttgcaaacaa

SEQ ID NO: 56442 - DNA, 467 bp, Zea mays
  Clone ID: MRT4577_151466C.1
cacatagttgctaggcctgcaatacaagattcagtatcgtccgggctctgaaaatcgtgttgcggatgctttgtcgcgcagagttgatgcggagtgtcaggctgtttcagcagtagttcctcaatggctgaagaacgttcagaccagctatgaaaaggatccagaggctctgtccttgatcgctaaattgtcgcttgatccaacggcagcgccacactttatcttgaaggagggtatcttacgctacaagggcagaatctggttgggcgatgatcctcagttaaaaaacagggtgctgtccgcgttacacacctctgctataggcggtcattcaggcattccagccacgtatcgtcgggttaagagtttgtttgcctggccgaaactaaagcaattcatccaagaatttgtacagcaatgtcaaggttgtctgcaagctaaacctgataggttggcgtatcctggca

SEQ ID NO: 56443 - DNA, 315 bp, Zea mays
  unsure (1)..(315): unsure at all n locations
  Clone ID: MRT4577_151467C.1
tcctgtccggggtcagcgttatctcctgacgcgctccaattccatcgtcttcttctctgcacctggccgccgctcactgccggtggagatatttgtttccggccgccgtcgtcatccaaacgccgctcaagccgccgctgttcctcgccgttatccgctcagccggccggatacaaatccagtagcgcccagccccagccgttcttcctcctctgccgcgccctgtgggtcggattccgattgcctgcttttgaggctcccaagccgcgtccctggcgncttcctccctggntnctactctcccccccgcggagc

SEQ ID NO: 56444 - DNA, 262 bp, Zea mays
  Clone ID: MRT4577_151468C.1
cttggagggaacgatgggcagtggatagagaggttcgccggcaagaccgttgattgtaataagggtgattgtcctaatgagaaacggcaaagatcataaggttatgatgatgtacctatgggtggagcagcagcaggcccttttatggatacaagcacaaatgctgtagtaaaaccagaggagccaaagccattggctttatctgatagggacatggttttctacactggaaagagggttgttgttagtaaatctgatggtg

SEQ ID NO: 56445 - DNA, 725 bp, Zea mays
  Clone ID: MRT4577_151469C.1
agctagctcgacgcacgtaattcttcacaccaacaagaaaactcatctacccaccaatggcgctcgtacgcggtcggccagcctccctcctactcctcgcggctctcctctgcgccgcaaccttccttgccgtcccggccgcggccacggggaagaccggccaggtggccgtgttctggggtaggaacaagaacgaggggtccctccgcgaggcctgcgacaccggcacctacaccatcgccatcatctccttcctcggcgtcttcggccgcggcaactaccacctcgacctgtccggccacgacgtctccgccgtcggcgccgacatcaagcactgccagtccaagaacatcctcgtcttcctctccatcgggggcttcggcaaccagtactccctgcccaccgcccagtccgcggcggacgtcgccgactacatctggaacgcctacatgctcggcacccgcaagggcgtctaccgcccgttcggcgacgccttcgtcgatggcatcgacttcttcatcgagaacggcgcgccggccaactacgacgagctggccaagcggctctggaacttcaacaaggacttccgcggcaggacgccggtgcagctgacggccacgccgcggtgcggctacccggaccggcacgtggagtgggcgctcgccacggggctcgtcggacgcatcttcgtcaggttctacgacgacgccgactgcgccgccaac

SEQ ID NO: 56446 - DNA, 837 bp, Zea mays
  Clone ID: MRT4577_15146C.1
agcacattgctattgtgtattgcaaaattttggaggctttgactaaaaaagcttcgttttttcgagcttgctcctcccccgaaaaaaaaatcggggcccaaaaagttcgcaattctgggggctcccgtggccgcaggtccgcccgaattagcgcgcctctcggagatgatcctgcgccggcaaaggcaatgaagatctctaatctggatgcacacttaatcttgtccagctcttgatcagttgatcttgtgctttgctgctcctgctcaagttaatttgttggccaatcaagttcagaggcgcagatgagtgaggagtacaatatggatgatgccctaaaagccaaaaatgttgctgagaccaagttccatgcccgtgacatcaggggtgctcggaagtacgcactcaaggcccagaatctctgcccgacacttgaaggcatattgcagatggtctcaacgcttgaagttcatcttgcagctgagtccaagattgatggagagagtgactggtatcggatattgtctctaggcgcctttgcagatgaagaggaggtgaagaagcaatacaggaagctagctctgctgctgcaccctgacaagaacaaatcagttggtgctgaggaggccttcaaactgatctctgaggcgtggagtgtgttgtcagatactagcaggaaggtggtttatgatgagaagagaagaaatcattctgttgtcaatgtaaccaatggtatctatacttatgataagaaggcaaacaagagggctcgaaagatgccgctgctgcagctgctgccgccgccgctgctgcagccgcagctgagactaccactca

SEQ ID NO: 56447 - DNA, 328 bp, Zea mays
  Clone ID: MRT4577_151470C.1
aacctttgggctgatttatgtgcttgggacatttccaccgaggatttcgctagttccctcggctagtctgccgatagtcctctggaggtggcacacagtaaaaagtggatgttcctcggccctcgtacggattcgcggtaccgaagtattataagtattcattgcccgtccccgcaggagtatatacctcggtttacctccccgccgtagactggcgtaccgacctcctaccgggaaccctgtcgaaacacccgatccgtatacacctggcgaaatccaatcccctaacgatagcagggcaaaccaacgggtaaccctcccgcccttc

SEQ ID NO: 56448 - DNA, 1306 bp, Zea mays
  Clone ID: MRT4577_151471C.1
cattgggtacctcgaggccggccgggtcggcggggagttctagcctcccagccacccacgcttctctcgtccctcccctttgtcggtgtcttccccctctctcttctcttctctacaaatctctcttccgcatccgccgcaaaaccctaacctaagcggctcaaccctacgattaccgccgccgccgccccccgctcgcccacgcaagcttgggcgggcctccctcagctcggccaagagcccgaccccctgctccggcaccagcgccgccaccgccatggatatggaagtgtacgagcgcctcaccgccgaaaccagtcactaccgtggcacgcgtttcgatgcgctgatcgggctcgacgaggtggagcctagtgacgaggaagaggatgaggaggaagaagagcgagcggcgggtgccggggctggagacgagctgctctgcccgttctgcagcgaggagctggacgcggtggggctgtggtgccatatggacgacgagcaccgtgctgaggtcaatgccggggtgtgtccaatttgcacagataaggttgatatgaacttgattgtccacatcagctcacagcatcgaggtttcttgaaggataagtggagaaatcagcaaggttcatctggggtgcgttattcaacacttgccttattgaagaaagatctacatgagaggataagtggatcatctcgtgctgccccagtcagcacggtgcctgatcctctactgtcctcttttgttggtagcttttatgaagtcgatttgccaaaggatgctaaaaaagagtccttggttgagacagaagtgagaagtgataacatagagcagagagcagcggagagctttgatgagcctttgctccctgaggtgaaggaggagaaaaccaggaggagccaatttgtgcaggggcttgtcttgtccctgatgtttgatgacatcttatgaagagcacatcccaaaaggggaagggagaaggcatattttgctaccagcaaacgtttcgccggcacagctgttgtaacgattcgctgatttgccatcggaagatggtgacattgctctgggataatgggggagatgaactgtggatatggatgtttcgtagtactatgcatcatcattgcatgaataatagagtatatgtatgtatagcttgttagcatcatggtactggatattctggggctctgtatgtatattgggaggccgaaatggaccctacctatcataaatcagccatttgataatgtgcatgtggtgtttttctggaaaaaaagaaaaaaaaaaaaaaaaaaa

SEQ ID NO: 56449 - DNA, 325 bp, Zea mays
  Clone ID: MRT4577_151472C.1
cccagcttgaagcacagtgccaggaaacttgcaaagacacggtgcaaatccatgatatcactgggaaagattgtcaagacattgccaataagggagctaaacagagcgggctttactttattaaacctctgaaagctaaccagcaattcttagtctactgtgaaatcgatgggtctggaaatggatggactgtgtttcagaagagacttgatggcagtgtagatttcaagagaaactggattcaatataaagaaggatttggacatctgtctcctactggcacaacaggttttggctgggacatgagagattctttgatagcaca

SEQ ID NO: 56450 - DNA, 694 bp, Zea mays
  unsure (1)..(694): unsure at all n locations
  Clone ID: MRT4577_151473C.1
cgggaggctgcgtgttgaaggccatgccatgtggagcggctggaccaccaccagtaggagttggcaggacggcacgcctccgctgacctgaccgaagctgtgttgggtcggtggttcaactggacgccacgccacacatttccagggagaagaaaaacgccttattcccggtgcgtgttcaaactatacatgtcattttcgcactccccactttttttattttggtttatgaaatataataagttgatcaatcaccaattcattgctcataatctaataattagtaataatattaaaaattgattcattctaccaaatttatagacatctagaataagattttgattcttcaaaccgaaggttcccctctgccatacgaaagcatatgataagtactacagtagctaacaaggtggcaacgtgtatgtagaaccaaaagtgatgttaatttggacccctgaaaacgcggacgtcgatatcaccgtgatctttagagtacaaactaattattttagcaatggtctaagcagctggcatatttgagaggatcaattccgattntaaataaaagtgaagcaaatccatggtacgtaactgcgtttctccaaacttggaataatcatcctttacagggtattggtaaaagatgctcgatataaaaaacgaccatttattagtattatattatttttga

SEQ ID NO: 56451 - DNA, 628 bp, Zea mays
  unsure (1)..(628): unsure at all n locations
  Clone ID: MRT4577_151474C.1
gctaggacttgcatatttatctctacaacctatagcctacttgtggcacagtgttcattgaaaggaggcgcctgtgaccagagcggggagacgtatgtcgcgggacaagcaccctaatacaatgatctactttggggctgtacagggcgcctttgcagctagcgagacctaaaaatatctcgtgagcactgcatcaacgtgaaggcttgagggctaactcagaggggggctcccttacgttatactatatnaacagagaaggcacacatagggtcgagttggtcttaacattacgcgtgatatgactctattacacgaagagagccacaaacttctgaaagtttatgatcgcagaggaagtatggtcctcactggatcgaatacacggaggtatgctagcctgtgttcgtgcattttcattgatgcacgatacaatgagcttgaatgccatgagatacattcatcattacgtcaactactggaccgctatgtccgcagtgtatgagagttggatctgataaaaattgtcataacgcctactacatactggatgagatattcatctttggtgaactgcaagaatctagcaagaggatgttgcgagacttattgctgcacaggattcatt

SEQ ID NO: 56452 - DNA, 855 bp, Zea mays
  Clone ID: MRT4577_151475C.1
aaagattcaggaagctctcaggtccctaaacgagtacaaaagatcaagggaactcgatggcgtgagctactacgattccttcaagctccaacgtgaggtgcatgacttcaatgcaaacgtgaaaaggctagagctagctggcctctgggacgagatagtggagatgctgcggaggcgtgagctgccggacggcttcgaggctcgtgaggagtgggtgagcctggggaccttgttccgtcgcctggtcgagccgctggacatcgccaactactaccggcactccaagaacgaggacaccggctcctacctctccaaggggcggccgaggcggtacaagtacacgcagaagtggcacgagcagctgcagcgcgttcccgtcgggtccagcctcgagtcctgcttctgggcggtggtcgaggagctccaggccgagatggccgacggtagggcgttcgaggatctgagagaccggttggttaaacttgagaacgatgcgcatggctggtataattctggaagtttgggcaaggacgtgtttctggggagctcgtctttcgtggcgtggtggaggacgctcccagagcagcatagggcggcgtcgagcattgcgaaacttgtatctctataaagggattttggctgaggaactagcgtttctagatctttgtaattatgctgctctatatgtacttcccaagttcaataagaagactagcatagttcttagggttcgtttggatgtagatattgttaatgttagaattaaattatatcaatatcaaatatgtctagtattggaaatgagtttcaatgtaaatctgttatttggatgtatctggaattacaattccatcc

SEQ ID NO: 56453 - DNA, 432 bp, Zea mays
  Clone ID: MRT4577_151476C.1
cggggttggcattagtattttctaatacccatggagaagttcttgaagcacaccagcatccacggactctggctgctttcgataattcttttcgcatcttctgtcattcatgcacgcataataagcggccaaatcaaagaggacgccaatgctaggagcttgacgatgaccaccgtgacgagtgcaggagacaacatgactggcagtgtcgacggggaagcttctagcgggctgctctccgcaaaatatttttttggattttacctatgcaaaaagactggtaggatatataggggcttgccggagtgcatggcgcattgccttctaggagtctgcactaaagcgtactagttgctgagaaatgtattaggggctgtttgatatgtctgtcacatcaaatatttaaattattaaatactacctatgaatatt

SEQ ID NO: 56454 - DNA, 217 bp, Zea mays
  unsure (1)..(217): unsure at all n locations
  Clone ID: MRT4577_151477C.1
aacgcaggaaactcanaaactgctcctggtcattgtcccggttgtatgcgacgaagacgggaacccatttggggatgattcaagcacttcccgctcatgcagtctctcctacttgtccttgtccatggctctgggtggcctntttttatgggcgcacacgttcagcctgttgcggtgggggggggggctgtncnnctggtgctgtctttttgctttc

SEQ ID NO: 56455 - DNA, 371 bp, Zea mays
  Clone ID: MRT4577_151478C.1
tcaggaatcttgagattttggtcggaaagcaaactgagaacatttcaactctacagcaagctaatgaagagttacaaaagaacatctacactttgactgagcaatcacaacaggtcaaggtggagatgcaaagtgatttgaaggcaatacaagaagagaagaatgcggtgctatcacaactgaagcagtcagaaacttcagtacaaaatcttgagaatgaggtgatacgactgaaagaggagctttctgtccagctagaaaacaattccaccttggacaagcagtttgaagaagccaggagcaatctgcatgctgaaatttcagagctacgtgcagataagaacacatctctattgaaattacagacgtct

SEQ ID NO: 56456 - DNA, 328 bp, Zea mays
  Clone ID: MRT4577_151479C.1
tgggaagcttttctagctttatataaagtttgggggaatttggaggaccgggaataacagatgggaacattctagaaaattacaccaccacattttcctagatccattatctggtggagcattcaaactcaaattgacatttgggatgaaagaaaactgttatcgcactggattaagacaatcgcggggaaagattggctacttgtaacagttggatcgatgcacacctattatcaaaaaatattttcgacgcattacccattggaataacggaatggaaactgataatgcttctatttcataacaataggaaaatattactccccat

SEQ ID NO: 56457 - DNA, 769 bp, Zea mays
  unsure (1)..(769): unsure at all n locations
  Clone ID: MRT4577_15147C.1
agttcgattagtgtgttcccctctatgttttcttgttcgacgaagcctttttttttctcgaaagcgcaggagagctgcgcatcattatattaagtagaggaaaagagggtccaaaatagaccatagtacaaaagacctccccagaggggataagaaaaccaaagagaaaataagagaaaaaacaaaaacaagagcaagacagatcctaaaagacaaaaaccagcccatcagtgaaaaaaccaggcagctaggtgcctctgatggttgcggcaagaaaggagagacccttagctcctgccatttcccacaacaattgcataagatccaagtatatcatacactatttggttaaatagtttgaatgtttgctaccttctcagaaaattacatgcaccacttagcacaacggcgtatttgtagttattttcagttagttgtttggagtaacatctcgtggatcttctcatggttcatttgttgatggtatctccacaaggaagctggtgctggtagttgggctcgatttctactattctgatagacgtgactgtagatttggcgatcttcaatcagagatggcaaatatgaatacatttctggcgctttctgaagctatcaattggcccagtggttcctactctgtaagaatgtgttcatttggtacactacaattatttatcttatttatcttgatatcacattntctatattgcatccaactatataaaggtattctgtataagaaacattgtagagttccctagtttct

SEQ ID NO: 56458 - DNA, 250 bp, Zea mays
  Clone ID: MRT4577_151480C.1
cctgcgctcccccggcccctcgcccaagcgcaagggatataacacagcttctatgctgctgcgattcttccggccgcatggtggtggcggtggctgtggcggttgccgacccacatggcacggcggcggtgtggtgcgtgtgcaggggctcggccagcggcggcgaacacgacgaccccgacccccgccaccaccaccgggtgcgcggcgtcgagcgtgacggtcgtcgtttccaacacgtctgaaaggg

SEQ ID NO: 56459 - DNA, 799 bp, Zea mays
  Clone ID: MRT4577_151481C.1
gtaataatagagcatcccgtcctccgcccccgccttcccttccacgccgcccgtgccgccccagatcggcaaatccgcccgcatctaccccgcgcgcgtcccggatggccacttcttcctccgcccgccccggggttccgtagcatgggccactctctctcctcgcattccaaatccaccctctcctcctcgtttgcgccgcccgcccgggactacacccaggacctgcccgacgagatcctcgcgctcgtcttcgcatcgctctcgcccaccgaccgcaacgcctgctccctcgcctgctcgcgctggatggaggtcgacgccaccacgcgccaccgcctctccctcgacgcccgcgccgcgctgggcaacgctgcccccgcgctgttcgcgcggttcacggccgtcacgaagctggcgctccgctgggcgcgcgggtcgggcgcggacagcctctccgactacggcgctgcggcggtggccaccgcgctgccctcggggcgcctctccaggctcaagctccgcggcctaaggcagctgtccgacgccggtctagcctcgctcgctgctgccgcgccagcgatccgcaagctctccgttgcgtcctgcaccttcggacccaaggcattcgtcgccgtgctccagtcctgccccctcctcgaggacctctccgtcaagcgcctcaggggcctaccagacacggccggtgccaccactttcattgctgaggacatcaaatttccaccgggcttcgtccctgcgttcctgttgcctcaaggaactatatagcgctctatgc

SEQ ID NO: 56460 - DNA, 283 bp, Zea mays
  Clone ID: MRT4577_151482C.1
agcgtacaagtccattgagtgttgaatggcctccagggaagtagttggtggcaagaaataagcaataaccgaccagtctcgtggctttgtttcaagagccgctttgcggtatatataacttgatcaagggataattaatgtgattcttctgcaagtactgattataatatgctaacctgaatatattgtctaactcggacattttggggatattgaataaacaatgggagtgtttttttctttcttgcaaaaaaaaaaaaaaaaaagggcggcggtttaaaag

SEQ ID NO: 56461 - DNA, 2083 bp, Zea mays
  Clone ID: MRT4577_151483C.1
tccggccggatctccaggccggccgggccggggctgagcgttgtaatgcagaataagtgggtgttctgtgaacctgtaataatagagcatcccgtcctccgcccccgccttcccttcccacgccgcccgtgccgccccagatcggcaaatccgcccgcatctaccccgcgcgcgtcccggatggccacttcttcctccgcccgccccggggttccgtagcatgggccactctctctcctcgcattccaaatccaccctctcctccccgccgcgccgcagcaggtcgctctcgccgatgagtccgccgccgctgcggctgaccgcgccgatgcagatcgctgcggaggacagcggcagtgacagttcctcctcgtttgcgccgcccgcccgggactacacccaggacctgcccgacgagatcctcgcgctcgtcttcgcgtcgctctcgcccaccgaccgcaacgcctgctccctcgcctgctcgcgctggatggaggtcgacgccaccacgcgccaccgcctctccctcgacgcccgcgccgcgctgggcaacgctgcccccgcgctgttcgcgcggttcacggccgtcacgaagctggcgctccgctgggcgcgcgggtcgggcgcggacagcctctccgactacggcgctgcggcggtggccaccgcgctgccctcggggcgcctctccaggctcaagctccgcggcctaaggcagctgtccgacgccggtctagcctcgctcgctgctgccgcgccagcgatccgcaagctctccgttgcgtcctgcaccttcggacccaaggcattcgtcgccgtgctccagtcctgcccccctcctcgaggacctctccgtcaagcgcctcaggggcctaccagacacggccggtgccaccacttccattgctgaggacatcaaatttccaccgacttcgtccctgcgttctgtttgcctcaaggatctatataacgctctgtgctttgtgccgcttgtggcgtcctcaccgaacctccgctccctcaagatactgcggtgctccggcgcctgggacctgccattggaggtcatcgctgcacgtgctcctggccttgttgagcttcaccttgagaagctacaggttggcgaccgtgggcttgcggcgctttccgcctgtgccaatctggaagttctgttccttgtcaagacccctgagtgcactgattcaggcatcatcagtgttgccgagaagtgccacaaactccgcaaactgcatgtggatgggtggcgcacaaacaggattggagatttcggactcatggctgtggcacgaggatgtccagatctgcaggagctcgttttgataggggtcaaccccaccgtgctgagccttcggatgcttggtgagcactgccggttgctggaacggctggcactttgtgggtgtgaaactgtgggggatgctgagatcatttgcttggctgagcgatgggctgcgctcaagaagctctgcatcaagggttgccccgtgtcagatcgtgggatggaagcactaaatggggggtgccccagtttagtcaaggtgaagctgaagagatgtcgtggagtgtcatacgagtgcattgagaacctgaaggttactaggggggagtcattttccatcagcttggatgttgtgttggagcatgatgctaggagcgctagtgaaaatggtgcccaggagaacggacaagcacaaattactgcgctgactgatcaaatggcaggcatggaccttccagtcaatgctgctggcgcacaatcatcgactcatacaattaccaggatgaggagcgtcgtgtcagcactccggcgtaggtttggcaatcctccgccaccgtgatttgtgattgaaattaatgaactgtttttacagcttttttctaatgaaacattcatgttgcctaagacttccattatttctggtcagtgcaagataaccgcctatggatgcttctgcatgtagtttttattaatccacatcagtctttcctgtgctctagaacgaaaaaaaaaaaaaaaaaaggcccctgttgctttgtttaccataactgtgtttccatatgc

SEQ ID NO: 56462 - DNA, 539 bp, Zea mays
  Clone ID: MRT4577_151484C.1
gggtgtgtgtgttttttttttttttttttttttttttttttttttttttttttttttttttttttttttttttttttttttttttgggtcaaaaaaaaaaatttttgggggggggatgggggggtacatcaacagggtacaattttttggggggggggggggttcgaaagggaaaggggaaacttaagcaggacacgggggggcaggggcgggttcagggtacacgggggttttggccgggggggaaaggggggggccatcaacgggctccataggtggggggtgggggcgcaacaggattaggaaaaagggtttttcttggggccccaatcctatttttggaacaggggccggggtcaaaggaacactccccgggaactggggcccccccaagggggaatttaggggggatattccctccgggaactccccccaggggggtagactttttatatagggggggggggggtcaaaaacctccttggggggccttatcactccttaaaaagaatacctgggccatttttttcatttggggg

SEQ ID NO: 56463 - DNA, 384 bp, Zea mays
  Clone ID: MRT4577_151485C.1
aattaaagaggccaattggctccaatggttttgggccaaaaaaattgacccatttacgggggaaacgggttatgataaaggaaaaaaaactttaaacttttactcctttaaaaaacaaaagatcgccccccccggaaacaaaatttgcaatggtttttgacctttttaaaaaaccgccccttttaaaaatttggggtcgggggggttttttccaccccccccccatgaggagacattatgttgaaaaacaatttcaccccctttttgggggggaccccccttggaaaaggggccccaacagccaaaaacccttccccaaaaaggggggggggaacgaaacctagcctggaaacccatattatttttacgtttgccacctggggg

SEQ ID NO: 56464 - DNA, 1031 bp, Zea mays
  unsure (1)..(1031): unsure at all n locations
  Clone ID: MRT4577_151486C.1
gccggcctcagccagtcagcctccacccgnaaattcccggcccctccaccatctcgccgcttttccaccctcctgctgctgttggtaggagagtacttgtcaattgcttttccaccctcctcctccgccatcccaattcttgcctaccggctaccgctgctcctgttaggagtacttgccaattactgttggaatcaccttcgccgcctcctcgagaaccaattctagcctaaaacccgcagggatccgcccaactcccgacccactcatggtcgatcggcgcggccgctgaactgcctgcggcgggggcgagaggacgtgggtcgaggcgggcgatggccgggctggcggggaggcctggttcctggggcggcctggtgctgcgggtggggcaggctctcttcgccgccgcttgcatcggcgtcatgggcagctcgctcggattcgccagctacaccgccttctgctacttgattgcgtcaatggggcttcaaatgctgtggagtttcggacttgcatgtcttgatggatatgccattagagccaataaagatctcaccagtcccattctattgagcttgtttgtcgttggagactgggtaacagcaatcctgtcattcgccgcatcaagctcagctgccggtgtagtaatcctatttcaaaaggacgtgctcttctgcagaaggtatccccagctcccctgcggaaaatacgagctcgccacggcgttcgccttcctgtcttgggcgctcagtgcgacatcagcattgatcatgttttggctcctggctgcgttctgattttgtgtaaaaattttgtgacagcgatgttcatagtgcccacttcgctgttctctcatcgcattcttttacgaccatgtcacatatttagagccacatagccccccccccccccccaaaaaaaaaaggaatgttgggatcatgtaaagtccttgaagtgaacagttactaatggaagaaattcactaaaaaaaaaaaaaaaaaaaaaacggacgctgggcggacgcgggg

SEQ ID NO: 56465 - DNA, 386 bp, Zea mays
  Clone ID: MRT4577_151487C.1
gagtaactttaaaaaataaaaaaataaaaaaaaaaacaaaaaagaaaaaaaatttctctgcgtttaagaggagaattttaacacgctggtgggatttttatccatggtttcctttttgttataatactatcatctatctgtacatatttcttgattagatcgtttgttgtcaggataagcactgacatccttcgtacagatttttgttcccagcattcctatcgtatgatgtcttcctgatgaaggaatctctagtgtgcactcgttattaacatctttatatatttttttttttattttcttttctcctttatttacaaaaatatattgattcttttttcttttatatttttaacaattctcacttgatcgattcacatattttt

SEQ ID NO: 56466 - DNA, 299 bp, Zea mays
  Clone ID: MRT4577_151488C.1
acgagacaagcgtggtgtaattattattcgggacaacacagctacatatattaagttccaggttgcgcctctgcatgaatatagttctaatttgcacgagggcagacgacagtggttcacgaaacgcacactcgatcaagactagctaattataacgaagactagcacaccacacttgttgaagcatcgatcatccggaatttaactactcaaaatgtttagggctaaaatcttggccgccggccggactagaatcacttggcgacggcgggcttgctgctgctgcaagccaatgctta

SEQ ID NO: 56467 - DNA, 3128 bp, Zea mays
  Clone ID: MRT4577_15148C.1
cccctagaagactctcgagtttttttttttttttttttttccaccagataaagcactagattttccgaaacggttaccagagtctacaattactggccgtgaattacttactataagacacgaaggaaatacatcatcatcatcataagtaaaaaaacaggtacacaaatgcggggtacatgggcaagcaaagccaagcagctctttccctcggctcgagcctgcctcctacattacagagtgagcaacacaaacaagtaacatcttcaccctccctacctccgtgactaacctcctcatctcatctcggtgccgtgcgcggccggcctcctcccaatggccatttaatctacgtggcggttggcttgtgtagtgatagaatcaaatgttaggaatgcctaagaattaacaaggtcagaagtccgtcacacacacacacaggctgcttgccctggaagtgttgtccaagccatcagccgaaaataagatggcgtagtagagctttagacaccatcatgtgctggcacgctgtcattaaccaagtggggatctggtcactcagacatccagctaccttatcttcgctgttatcggagtcgctcactcctatttaggactctgcgccaccgcgtcttccttgtgctccgtgataaccttgagaaggtccactggagtggcagcagggtccagctcatggcagcctttcggggcattgctgccctcttcgcccgtcaggagacgagaaggaacccggtgcgagaaccggaacagctcttcctttggtatcctcctcacctcctcgggatccacgtgtctgtggaagacggctttgaatccggcaaccttcagcaacgggatgacagtcagccctcgctcctcagtgaaatcatcagcgacttccactatctcgtacttgtatatcacgtcatcaggcgtcagctcgttccagtcgggggaccagttacggtacaaggcccacgtgtcccctttctggggaacgatcctgatgatgccacggggacctttagtccacctcactctatgtgaaaatatgttcaccgtttcgctcacctgatatctcccaaccctgaagtcaccacatgtcttttggaaaccagaggcgacccagtttataggcgccagttcgatatttgacttcgagttgagaaagctcatgcggatccggaagggcctcgttgaaagaactttctgaaccattacatataggcggggcatgccgtcctcgcagtcataggtagcccatacttgatcagtatcaaaagccttctctgttcggtctttatcgaaatcatggaagtcggggtctgggacatcgattgacacaggcacacggcgttgctctggatttttgtcatcggtagcaggcacttggatttccatgcttcttgagttgcatagcttgactcccttgccaggtttgtcagagaggacaccgttgacctttatgttgttgtcacaaggatacagctttccttcagatcctcttctatctgcagctcgtgaagatggtgtgatgtttaattcatgcaatttttcacagacagttgccttggctttctcaagaagtaaatttcgtgtatcaatctgggtaatctcaccaagaacatttgctcttcttccactcactgcagatctaaacctttccgctgaagtaccattgacccgtcccacatcagtaaaaacagcagttggttctgtgcttgcagttgcagcaactgtttctttgttatcgccaccataatccacagtggtataagcatcatagttatgccttctccgctttgagaagcgaccgcgccttgaagcagctttctcatgaacatatgtgttgccgctttcagaatagttgtagctgtagctctcgtcatgcttccttctctgtttctccaaggcctgtgtactataagcattagtaacagctgcagttgttgtcttggagtactgattccactggaagccttgattgttgtaagaatcataagtattatcttgctggtaccccccattccctgtaccagggatgctagaagtcctgcttgttgagccatatgaatgcttggttgaattgtggttctgctgcggctgctgcttggttgaccatgagaatgatgagctgcttccattgcaagggaacccagtctccactgccaagaatgcattatggcaatttgggcacaacaggttatgattaagataaatccttaagtactcatactgcatccggcagcggttgcaagatgtccaaaatgtatcaatcccaacaggacgagtagtagcctcagctgcagcggcagcagcagcggcagcagctgcagcagcagcattctttcgagccctcttgtttgccttcttatcataggtataaatgccattggttacattgacaacagaatgatttcttcgcttctcatcataaactaccttcctgctagtatctgacaacacactccacgcctcagagatcagtttgaaggcctcctcagcaccaacagacttgttcttgtctgggtgcagcagcagagctagcttcctatattgcttcctcacctcctcttcatctgcaaaggcacctagacacaatatcctataccagtcactctctccatcaatcttggactcagctgcaagatgaacttcaagcgttgagaccatctgcaatatgccttcaagtgttgggcagagattctgggccttgagtgcatacttccgagcacccctgatgtctcgggcatggaacttggtctcagcaacatttttggcttttagggccacatccatattgtactcctcactcatctgcgcctctggactcgattggccaacaaactaacttgagaggaagcagcaaagcccaagatcaagaactggacaagattaagtgtgcatccagattagaaatcttcattgccttagcctgcagttaagtacatccagattagaaatcttcactgcctgggccggcgccggatctccgggaggcgcgctaattcggggggccagcccccagaattgcgaatttttggggccccgaattttatttcggggcaggagcaagctcgaaaaaacgaagcttttttagtcaaagcctccgtaattttgcaatacac

SEQ ID NO: 56468 - DNA, 381 bp, Zea mays
  Clone ID: MRT4577_151490C.1
attcggctcgagatgcgattgagtaatcggaaaacctcatcggagaagaaactcctcgagcgaagatcttatctaaaagtagcgacggtgagcgccgaagctgctaccaagcggaggatgaaaagactatctagcccttagcgatttatgtcacattaatgagcaagtgttgaaggtcataaatgtaattttatctaggcttcgtcccgtgcctataaatagatgaacagtagcaccgtactgttcacgctgaattgtaatcttgctttcgtgtcaacaccttcgagcaagccgaaggtatcaatgtaatatagattactattcatataaactttatggaatgctgatatgaatagacccatgacttataatcattgtatc

SEQ ID NO: 56469 - DNA, 572 bp, Zea mays
  unsure (1)..(572): unsure at all n locations
  Clone ID: MRT4577_151491C.1
gcgttcgcccacgcgtccgcggncgcgtggggaaaaaaaaaaaaaaaaaaaaaaaaaaaaaaaaaaaaaaaaaaaaaaaaaaaaaaaaaaaaaaaaataaaaaaaaaaaatataagaaaaaaataaatttataaaagaatatataaaaaaaaaaaagtaaattataagggtatcctatattatatagaactggtggggggggtggggaatacgatttttattaaaaatgggtgggggatttcccaatttttttctgctttttgctatcgtgtttcgttttcgataccctttttttttttgtgggaggggtgtgccttattatttgatcggttctcggtgtttttttcgcctttctgtgatgggataattgggtcggggatctgtggttggtgtccttttatcgtgggactttttctttgtggcagggggggtggttacacgttacacttcgccacaacccctttccttcgcccttttgggggttctttttttttttttggctccctttctggggtttccctttggggttcggtgttggggtttttcttttagggtgcccttttttttttttt

SEQ ID NO: 56470 - DNA, 212 bp, Zea mays
  Clone ID: MRT4577_151492C.1
acgcggatagatctcagagctgtgcttccctgttccttccatctagaggcagcggagatccactgcggggtgagagagagagagaaagccccatggccctcttaacaagaaatgacaagagagagatctcagtcatgcagtctctcacaacacaatgccggctaccaccaatccgatcttgctcccaaaggcgtgggcagcaacgccactcc

SEQ ID NO: 56471 - DNA, 407 bp, Zea mays
  Clone ID: MRT4577_151493C.1
cccacccatcccttgcccgttcgtcctcctccctcccctctacggaacagaacagccctgcccaaccaaagaacctcgagagccttgaggtggtggggtagggtgtgtctggctggcacagagagtagcagtgcagagcaaagcagtcaggcaagcagcagcaatgccgtacacagctccgaggccgtcgccgcatcatcacagtcgtgtactgagcggctgcggtgctaatgcggcgtcgcacggggcgtcgtgcgcggcggtgcctgctgaggtggcgcggcaccacgagcactcggtgcgcgcggtgcagtgctgctcggctgtggtgcacgcgatcgcggcgcccatgggggcggtgtgatcggtggtgcagcacttttaccgccctcaggcgtacaagcact

SEQ ID NO: 56472 - DNA, 257 bp, Zea mays
  Clone ID: MRT4577_151494C.1
tttatctccacgttactggaaaacatgaggagtaatactaatgatcataatagtgataatgataactatgtattaaaccctcaatgattctttgccaagaactttaaatggattcaataatttaacccttacaaaaccttatacattaaaattgttatctccattttatagatgagaaaactggtttagatgagtaagaggcttattcttaggtgctgcaaattcaatcctaggtttaaatctagagaccacatcct

SEQ ID NO: 56473 - DNA, 221 bp, Zea mays
  Clone ID: MRT4577_151495C.1
tttccgcggacgctttggaaaaaaattatacaaatttttaaaaaacaaaaaaaaaaatgaggaacttgggacaacacaaataaaactaatgtacttagaatggcactggaaaaacattctaagctattcctttggttcccacaaacaattggtccaaatggtttccgatccttatgacaaaacgcttactgagaaaccttggcaaaccttaaaggcccctt

SEQ ID NO: 56474 - DNA, 351 bp, Zea mays
  Clone ID: MRT4577_151496C.1
tcttgcttctgaatgataccgtctctctgcctcctatgaccggcccacatgaagatagacgagcacctgctctccactcatgatcgcagaggcagaccatctgaccctcctcgcgtctccagcccccctcctccatgcctacgaagtagaagcgagccctgcgagtaggtatagctatcgcctatatgggcctccagctactgtatcttcacggtgatggcctgactgcgacttgacagtggatcacccgtacctagaatcaggcgggtcatgatcgtcctggagcatccttatgagcgcgagaatgctcttcccgtcactgattctaccagctgcgctcaacagtcactt

SEQ ID NO: 56475 - DNA, 371 bp, Zea mays
  Clone ID: MRT4577_151497C.1
ctcacgaaaccaaggcgaccctccgagaaggagcgttttgatgccggactggggctggcacgccagtctggtctgtggcgcaagccagagctacatgagggctcaatacgcactgagcgggatcactcacagctgcaagggacttgatgaccctgacgagaataacccgccgactatctctgaggaccagagccatcatctccgcatgaaccacatatgggctgcttgctaggggccagaacaagctcgattatattaacaccctcacctttaagaactccctggcacgggacatgctaacactcgacctcaagggtggcatgaccaatgacattcaccatgctcaggtcttgaccaaccagtgctacatc

SEQ ID NO: 56476 - DNA, 292 bp, Zea mays
  Clone ID: MRT4577_151498C.1
cagagctcctgccattacgttaaaaaaataatgctttacatttccaattatctacaataacgaaattttatgggacactctatcggtctaacatcctttaccctattgagatatatagatatgtgttcaacacaaaattctagcatattcaaatattgttgtttattgtagtctctttaccataaaaagctgacaaatgagagatgaaaagtttactttagtctatttttctttaactccgttttggtttgaagtcgtctgaagcttgagatttattaaggaattaatttta

SEQ ID NO: 56477 - DNA, 609 bp, Zea mays
  Clone ID: MRT4577_151499C.1
ccgcgaaacaacattatgctactacatagttgttggtacagtcaatttattggagtcagtgacataatgtggataggtatactgattcagcaaatcttttttctttagtgcattgatggcactgttcgactggctgaatgcatggttgttttagctgctcgctctattaatgtaattattattattgtggagtttggttgcttctcattattgtatggcgtggtctgcagtgttttctgcttcagcctcgcactcttgtttgcagcagtgcccagttggtgtaacttgttatggctaattccattggttttgaacagaaaaggagaacttgtgcctttatggctatcccgatgagacgtgggaggtgaccttgccagctgaggaagttccccctgagatccctgaaccagcattaggaatcaactttgctagggatggcatgaatgagaaagactggctggcgctagttgcagtccacagtgattcctggttactgtctgttgcattctactttggtgcacgctttggatttgacagagaaactaggaggcgactctttagcctgataaacaacatgcccacgatatttgaggtagtgacaggagcagc

SEQ ID NO: 56478 - DNA, 137 bp, Zea mays
  Clone ID: MRT4577_15149C.1
ctcgagccgattcggctcgagtaacgctacaggtggtccgcttcacttccgaacaaacctatcccgagagccgtctcctcatcaccgctgcttcattacctagacgtcgctattcatggcctacagcgacagccgtc

SEQ ID NO: 56479 - DNA, 278 bp, Zea mays
  unsure (1)..(278): unsure at all n locations
  Clone ID: MRT4577_1514C.1
gggtttgggtttttttttttttttttttttttttttttttttttttttttggggcccgaagttatcctataagactggataaactgattctgagattggtcccaaattacttattccatcgggttctttattttttcacaccggtcctaatggtagttgggggtacacatacattttcaacaaatagtttcctgcttcnggcattaaaaaacaaaacattccccctgggaaaaagcagtttctgagcccacaacatgggcagaaaggcatttgtttga

SEQ ID NO: 56480 - DNA, 202 bp, Zea mays
  Clone ID: MRT4577_151500C.1
gggagcaagaacagccatctttacacagctgcgcagggcgctattacacaaggccgaacgctacaaaagggactgtttacggtggcttcaattaataaatgtacgcgcctggaactgcaacttatctgttgcaggattgaactggacattcttttctatagggtaccatcaccaggggacaggcgataggggggataacaga

SEQ ID NO: 56481 - DNA, 460 bp, Zea mays
  Clone ID: MRT4577_151501C.1
ggccggccgggaaaaaaaaaaaaaccgatccactcaatcccatggattgagagctaaccgaacaagccctaaacggggcacgggctatatggctatagcccaattaaatggaaacgacatcttacgcgttgtttaaacaggctaaacgatcgttttaggcgaacaatatttagacttagatttgactatcactttttaccatattttaatccaagtacaaatactgataaatatatttttaaatataaacatgtatcttatattcggatttctattcgagtatttactcgatttagctcaaactgtgttttgctacaggaagcgcccgtcaataatggcatttgcgccagcagaaggaatctggacggatttcgtatcgacgtcatgccaccggccatgtacgtagcgcagcacctgcttccagcctttcacgatcgagtggagaagaactacgcgatgc

SEQ ID NO: 56482 - DNA, 393 bp, Zea mays
  Clone ID: MRT4577_151502C.1
gcgttcggtacttgcgagtggctccatcaaggcaacacaattcaccggcacctacccagttcggcggggccggttacccataccccctttcccggagagcgatggagactgatctgacagcggcacagctgctcgcgtactaccgtaccgacccgtccaagcccatctacgtcttcgtccggggcaaggtctactacgtcacctcctgccgcggcttttacagtcccagcggcgcctacgccgtgttctcgggccgcgaggccagtcgcgccctctgcaaaatgttcaatgacgagggcgacgtgttcggggaccctttcgggctcaccgacaaggagcttcggctgtctctcccacttgggagaccaatttcctagccaagtaaccccgttt

SEQ ID NO: 56483 - DNA, 1368 bp, Zea mays
  Clone ID: MRT4577_151503C.1
acccacgcgtccgcccacgcgtccgcccacgcgtccgcccacgcgtccgttcatctcgtggagatgttcatctcttggagatgctgaaggaattgaaaagcttgcttctttggcaaaagaacatggaaaaaacaatgttgctttcctctgcctttttatgcttggtaaagtggaagattgcatacagttgcttgtagacagtagccgtatacctgaagctgcactaatggcgcgatcgtatcttcctagcaaagtaccagaaatagtagcaatttggagaaacgacctcagtaaaattaatccaaaagctgcagagtctctggcagatccttctgaatatccaaatttatttgaagactggcaggttgctctaactgtagaaaaaagcgttgcttctcagagggatcattatcctcctgctgaccaatacttgaatcatgctgagaagtcagacatgattcttgtggaagctttcaaaaggatgcaggtcattgagcacgaggaacctgaagatgcagctgaggaaaatggagaacctgatcaacaggcatcggaagagaaggaaatgcataacacagatgatgctgatgaacatgaagagacagtttcagtaaatgggaacgagggtgaggaacagcaggtgctaactgaacatgaataggggccgagggaagcacaacgcattggctgcaaatgttattttttcccgagggtaacaaatgtggcccccagttttaccctgaagcaccggaaactggtgatgcttgtggccattggaggccacctgatgcttgtccgatctttctgagtgaaccccaagcttgacatattgatgcttgctacacttttggtgtcgatatgcttcttctgccaacaacataggcaattctttcttctcggatcatctgcggacccgatttctatgcgctcgaaccaatgaactgggtggggactgtggagccattttgtgatgaatagttcgaataatcagtatagaggtacgttgtaagatatgccagattaccatagccatcgaattctcctaggagatgacagtttttgttagccattcattgtaatgatgttacttgataaggaaggttacgtgtagtatatgattgcggttgcgggccgagggttttgcccatgttatacttatatatagtggtatcaatccatcggatcggaggctctcgtctactgatgcctaatcaatgccgatgactgcgagaaaaaaaaaaaaaaaaaaaaaaaaaaaagttcaatgcctagatatgcagtgtaacagtgtctcgctgcacacctattcatcgtttcaaaccatggtccatggaatttattttgatgctggaatgctgcggcatgtcc

SEQ ID NO: 56484 - DNA, 983 bp, Zea mays
  Clone ID: MRT4577_151504C.1
gacagcgctcccccacgcgtccgctcttgataatattaatgtggtgcctttaacaacagagtcagaagtaggccacaatgagcattcaaatgaagcacctacaaaaacttttgcagaagagacagccaaactacctaatacttttaagacaccagaggccaacaatgaaagcacacatagaaatatggaagtgcttgtagacaagcctgaggagaaagttgttgtcaatgcgtctaatcttggtaattttgttgggaagcctgtgttccaagcagagcgcatatacaatcagactcctgtcggagtggtcatgggtttagcttggaatgctatgggtggttcgaccttgtacattgagacagcaaaagtagaggaaagcaaaggcaagggaacactttttgtgacaggccagcttggcgatgtcatgaaagagagcgcccaaatcgcacatacagtttgtagagctgtattactagagaaagaaccaaataatcccttttttgcaaagtcaaagctgcatttgcatgttcctgctggagccacaccaaaggatgggccaagcgctgggtgcaccatggtaacatcgatgttgtccttagccatagggaaatctgtgaagaaagacttggcaatgactggtgaagtaactctaacaggacgaattcttccaatcggtggggtgaaggagaaaaccatcgctgcaaggagaagcggggtaaagacgatcatattcccatcagcaaaccgaagggattttgatgagcttgcttctaatgtaaaagaaggtcttgaagttcactttgttgacaaatacagcgaaatatatgatttagtttttacaagtgacaccaagacgcaggaaagctagtgattaactgctcgaattcatttcccatttcaattgttggcaacaacatattcaaagcaatcgagtttcatcaaatatgatgataaaacataggggagaaaagaattaacaaagc

SEQ ID NO: 56485 - DNA, 823 bp, Zea mays
  unsure (1)..(823): unsure at all n locations
  Clone ID: MRT4577_151505C.1
tgagggcttgaggtttagtgttccacgcagctaccaactccgctcgagatcgaatcgagctcactgatgccggcgatggccgtggacaagcagcggctgcttcctctcttcgttcttgctttagtgacgccggcctgcttggcgagtggcggagaggagccggcgaggttccagatcccccaagacgggagcgtggtggagctggacgaaggcaacttcgaggcggcgctggccgccgtcgatttcctcttcgtggacttccacgccccgtggtgcggccactgcaaacgcctctccccgcagttggatgaagctgctccggttcttgctgggctgagcacgccaattgtagtcgcgaaagtaaatgcagagaagtacaaaaagcttgggtccaaatatggagtagatggcttccctactcttatgctttttgaccatggagtccccacagagtacactggttcaaggaaggccggccagctcgttgagagcctgaggaagcttgtcgcacctgatgtttctgttctcaagtccgacgcggcaatcaaaagttttctccaggaagctggtgtgggttttccattatttattggatttggggtggatgaatcctccattgccgagtatggagcaaggtacaagaagaaggcatggttttctacagcaaatgatttctctgaggatttgatggccgtgtatgattttgacaagattccggcattggtttcgctcacccaaaatataacgagcagagtgttttttatggcccctttgagggaccttttttgaggattttatacggcaatncctgctttccgatact

SEQ ID NO: 56486 - DNA, 164 bp, Zea mays
  Clone ID: MRT4577_151506C.1
tcttctcccagatttgcagctcgcaccccgttgatccccataattacatcggcggcgccctctcttcccgcggcacccggagcggagcgcaccctccccctcttcaccgcaattcccgaggcggggacgcttcctgccttggcgctcgctccctccctcgtgat

SEQ ID NO: 56487 - DNA, 474 bp, Zea mays
  Clone ID: MRT4577_151507C.1
gccgctcgaggccggccgggttcgcggaaattaaattttataaaatgggtctctttgatatgtttagcgaacaacacggtgaagtccaccaaactcctcacgagcacaagggtcacctttctcacgaactcatcgctggtgccgcttcttatgaagctgtcaaggcctaccaaaagcactgtgaagaaaaaggtgaacctgttgaccacagaactgccaaggccctcctcgctggttttgccggtgccgctttggacaagttgattgaaacaaagggtctcgactttatcgataagcaaaaggccaagagacatgctgaagaacaagtcaagcaatactacgaagaagaacgctaaatctttttcatgtgaatattcaaaacatacctttcactctatgtaacataaataaataaaaaaaagaagctcgttataaagctacacaaaaaaaaaaaaaaaaaaggcccctaaagtt

SEQ ID NO: 56488 - DNA, 898 bp, Zea mays
  Clone ID: MRT4577_151508C.1
taccctcgggttcgggcgggacgccctcattttctcccgctccagctctctgctacggacgcgtggggccgcaagctccatcttcctccctgctgcagctcccgagcgccctgccctttgctccagcttgccgcgtgctctagcgtctgtgccgtggagcccctggcgcgggttcttctgcgcccggccatcctctctctccatcaccatggagcttcttttctccagccgcgccctgctcggttccatggccaacgttccccaagctcctccctccagtccagctgcggtgctccctgcgcgcctgctcccgcgcgcgttcctctgctcgtcgcgcccagcgagtctccatggtcaagcacgcgcggatctcctctgagctcgcccccggcctctactccttccagccggtcgagtctcgactgcgctcggcctccagctctgttgtcgcgcagctcgtcgacgttgcccctgtttccatggctgaccgcactgctcctcaacgccgccgttctctgtgcccgggcatggggcttcctcgccgtcgcgcgtgctccttcctctgctctgctcggccatggacgccacgatgtagctccctgctcgcgcccaactccctgcgtacgcctgcgcccgagctgaacttcctcaccgcgccctgcgctctgctcgcctcggctccctgttcgacgcgtgattttggagctctgcgcgaatggcgtgcgatctggtgctctgcggcaagcgcttcgtgtgggtggtgtggttcccaaaccgcgtgatgcgctggctcaatacccagaccccagcctctgtcgtgctcatctacctcgacagcaggtacttcatgtcagagcagcggcagcaacaccctcctttgtgtcgtgctcaccagatc

SEQ ID NO: 56489 - DNA, 338 bp, Zea mays
  Clone ID: MRT4577_151509C.1
catacgagaggaccttcgcccgcaattcatgattgatggctgagctcacactggagatatcggcaagtggcagccgcatggtaccttagcagactgtgatcgaaggaacaagatttttaagctgtcgcagggagagtacgttgcactggtaaatctagagcatgtgtatggtgttctctaagatatagattcgatctgcgtatacgggaacagattggaatgttgtatcgtcggcgtcgcaactccaaccagtcagctctcgagcgctgtgcgaaacagaacggcgttaccggaagcttcgctgagctgcgtcagcatccaatgttcagagaacatat

SEQ ID NO: 56490 - DNA, 1533 bp, Zea mays
  Clone ID: MRT4577_15150C.1
tttaattaagatcatgtgccacttcatactttggccccccgtctccctagtaaagccaaggaattgtagtaaagccaaggaattgccccaagaactacacgaagaccaattcctgtctccctgaggacaagtacttaagcttgtagcgccgtttagaaattttgtggttctaacggccttttcttgtcagtttgagaaactcagcacccatttgtttttgtttcatgtggcagcccttctctctcctcgcgccgttttcctctctacctctttgatccggcaatggccgcgcccgcccctgccaccaccggcgacctcctacgcgtcgaccccctcgagctacgcttccccttcgagttgaagaagcagatctcgtgctccatgcagctgtcgaatcacaccgacgactacatcgccttcaaggtgaaaactacaagtccaaagaagtattcggtgcgacccaacactggggttgtcttgccacggtctacctgtgatgttgttggtttgtggatcttagcacttaccaaagtgtatgtgtttgggcaagccatcatccattttgtcgtttttatgtatttatctgtactgttgttgttacgatgcaagcacagcgggaagccccgcctgacatgcagtgcaaggataagttcctagtccaaagcgtcgttgcccctgctggtataactgtgaaggatgtcactggggatatgtttacgaaggagtctgggtataagatggaagaggtcaaattgcgagtgacctatgttgctcctccacagccaccctctccagttccagaggaatctgaagaaggttctccacctagggcttctgaatcagaaaacggagatggaccttctggaggattcaccagagcactaagagagcgcattgagcctcaagacaaatctacagaggctggagctttggtttccaagttgactgaagagaagaattccgcgattcaacagaatcatagacttagacaggaacttgacttggtgaggcaggagatcagcaagaggcgtggagggggcttctccttcatcgtcgtcataattgttgctctgatcggcgccatcctcggctacctgatgaagtcgtaattctttcaggctgtcctctgctggccataccagaggcagtcgtgcaagttgtgtttgggaagaactcgaaaaaaaaactgttgaaaccagatgtcctgagatcatccttcatattttgtcgatataggagtgggtacgtgaggaatgctgggccagtgtttaagcttttcttttccttgttgtttctccgttggatgggcattgcggacgctgtaacttgaaagttgcatcaattgcttctgtttcatagttttatcttgctgaaaaaaaaaaaaaaaaaaaaacttattagtgggttcttttgttattttttgtaaagtgcaacgggtgtttcttccttgccgttgtctgtacctataatttagctagatttcgatttatataggatttgttgagggcgaaaaaaaaaaaaaaaaaagcggcc

SEQ ID NO: 56491 - DNA, 1737 bp, Zea mays
  Clone ID: MRT4577_151510C.1
gttccaatatatttcgtttcattagtaaatttaatagctgtatagttttcccatacaatgttggtataaatgattggatcatttggcaccatttcttactataatcatgcacattgaaaagatcatgcgtagatagtatgagctgtctctgtacaaattgtcccctctccgcaggggaagctgcattcaccatagcacaggtttcattccatgacattgtatgactaaattgcagtgcccctcttagtacagacactttgcactttcgttaaggtgaggtctacaccaagttctggctccacaatgagtttcagtgttggagaatgctggtagtgtggtgagagcttcaaaacaaacttggaaacgatgagagagatgaggatcttgagctcagccatagcaaatccctgccctaggcaggttcgggccccagcaccaaatggcaagtatgaatgtagctggggtcgaacatcagagaagcgctctgggttgaactctttcacatcaggcccccatagctctgggtcaagatgcattgtggagacagggatgtagatgttgacaccttttggtatatgtacgccaccgagcttcagttcctggagggcctgccttgaaacaaaggcacctgctgggtacaacctcaaggtttcctggatcaccattgtcaaatttttcatcttctgaagtgaccgtgagtctactggctggcctctgcagacttcatgcacctcttctcgtactcgattctgccattctgggtgcagtccaaggagcattagacaccacgcagctgtaacagctgtgctctcatgtcctgcaaaatatatgctcttgcagttatccactataaagttctctgcctcggcaatgcccaccctactggtgcttgcgctgtgaagaattgcactcagtaagttcctgtcttctccactttcctttacgatttcaagaattagtttgcggacttgtttgtgaagctcccaggcctgcttgttcctcattgaaggaaagaaccttaggccagtcatttcagctagcacatctggcttggacacagcctgctggggttctcttatcttcataaagatttcctttcctttgatgtagctgcttccaaagcacgttctagagatcacatctgcagagtaagccctgatgtcatcgtcgatcttaatgtctgtgatcccaccatttctatcaactctctcttcccatgacataagcagtggctgtgcagaatcgaccatcagatccaccatgcccttgaccttgtccaggaagaactccggggcgatgattttcctctggtgcaggccaggcctcgccgttggacttgaggatgcccccgccgaagaggggctcgtgcgttgccttgaggtaggagctcttgccgaggtccagcgacacgcagaggttgatgtcccggaccacgtcgggccggctcacgtgaaggaatacgacgttccccatggagtaagtgaatatgggacctgcattatatttcagtgaaactggacaagtcagctgaggctcgttgtataggcctgatctactacggtcactgtccggttgatgagcgaactgtcacggcgtactgtaggttaacagagaccgggtatgggtccatctccggtcaagtgggcgtggacagggttcagtcgacgagtcatggtcatggttgataagttttccctacccctcatgattaattgttagtcaaaaaaaaaaaaaaaa

SEQ ID NO: 56492 - DNA, 120 bp, Zea mays
  Clone ID: MRT4577_151511C.1
ggggaggagtgatggaatggttaccgggagcgaagagcttgccgataggaagacatgcatggccttctcctctacggtcttcgtcggctaaggccgcgaacgtgacgtcgtcttccgcct

SEQ ID NO: 56493 - DNA, 628 bp, Zea mays
  unsure (1)..(628): unsure at all n locations
  Clone ID: MRT4577_151512C.1
ccgtccgatcaggttgacagnaggaagacacaacatcatcttctcgtattttataaaaatattgttccaagaattatcggagcacctgggcatacgcctactcaatgagaggctgaatgatcctaacatgcaaggttcctttgagtctatcttcccaaaggatcatccgaagaatacaaggttctcgatcaacttcttcacgtccattggtcttggtggtatcacggaaagcctgagggagtacttgaagaacatgccacgtctaataatgcagcagcagaagccagaatcatcagagtcagattcaagtggatccgaatctggttcggaaagctctagttcagggtccagttctgagtctgagtcagaatcaagccctgatgagcgtgacagaaggcgaagtaataagaggaggaagaggacttgagagcacttccaactatgctttttggaattcatgtatttggttttgtttaaatgtgcttcttcagtatacatgtgcagtatgtgatctagctcttgatgtgttagtggtaatcagaaagccgtaacagtaagatactatccgaacagggccaacagagatcttgtttatttttcataacttccaatgcagaacaagttctgt

SEQ ID NO: 56494 - DNA, 3263 bp, Zea mays
  Clone ID: MRT4577_151513C.1
cctcgaggccggccgggacgagcaggtgccggccgggacagaaaatagcaaaccctcggtcccggtcccggtcccggccaactccgtctccccgctgcgccgccgccctaatcaccacgatgacgtctccccgcgccatcgcaagcgccgcgcgtccccgtccctatgtccaccccgctcgcctttcctcggcgtcgacgcggatcgtcgtcgcagatctagggcttcgccgcccgatttcgatatccgcggtcgccgctgcgatgccaagccctctgaggagaaggagaacggccatgccaagcccggaaaggatgaggacggcgacaaccgatctccccggcgcgacagggtttcagacagggaggaaggtagcgaacgccggaggatacgcgatatggtttctgacgacgagaaggtggaaggccgtcggcgcaggcgggcaagggatccggacgaccgccgtggcaagcaagaccgggagaggaacagacggcgccaccggcgccggagcccaagctcggagtcagggtcctcacccaacgaacgtcgccaccgccgccggcgccgagacgagggctcgaggcggcgggatgaccgcagtcgaagggaggacgagctccgtagaagccctatgaagagggagctgaccccgccactgtcgcccccaccgccgcctccttccggagatgatccctgggcgcacgggtgggatctacatcccgcctttccgcatggcgcagatgatgcgagatatggaggacaagtcgagccctgagtatcagcgcctcacctgggatgctctcaagaagagcatcaatgggctggtgaataaggtgaatgcgaccaatatcaagaatatagtgccagagctctttgcagagaaccttgttcgtgggcgggggctcttctgtcagtcttgcatcaagtcacagatggcctcgcctgggtttactgatgtatttgctgcgctagttgcggttgtgaataccaagttccctgagattgggaatttgcttcttgttcgtgtcgtgctccagctcaagagggcatataagcgaaatgacaagccccaattgcttgcagcaaccaaattcattgcgcacttggtaaatcaggtggtggcacatgaacttgtggcgctggagcttcttactgtactcctggaaaatccgactgatgatagtgtcgaggtggctgtgggttttgtcaaagagtgtggggcaatgctgcaggacttgtctcctcaagggcttcatgctatttttgaaagatttcgaggcattcttcatgaaggagaaatagacaagcgagtgcaatttttgattgaaggcctttttgcaattagaaaggctaaattccagggtttcccagccatccgtccagagttggatctagtggagcaggatgaccagtttacacatgagatatcccttgaagatcacctagaccctgagaccaatctaaatgttttccaggcaaaccccaattttgttgaagatgagaaggcatatgagaatctaaagagaagcatcctgggagcagagtcttctgaagatgaagaaggatcagatgctgcttctgatgatgatgatgatgatgatgatgaagaagaatctgatgaagaggatgaggaacaaatggagataagggatagaacagagacaaatcttgtgaatcttagaagaacaatatatttgactattatgtctagtgttgattttgaagaagctggacacaagcttatgaaaattaagcttgagcctggtcaagagatggagctgtgcattatgcttcttgagtgttgcagtcaggagagaacatatcttcgttattatgggctgctaggacagcgtttttgcatgatcaataaagtgtaccaagagaacttcgaaaaatgctttgtgcaacaatattcgatgattcatcgtcttgaaacaaacaagttgaggaatgttgccaagttctttgcacatttgttggggactgatgctctcccttggcatgttttggcttacatcaggttgacagaggaagacacaacatcatcttctcgtattttcataaaaatattgttccaagaattatcggagcacctgggcatacgcctactcaatgagaggctgaatgatcctaacatgcaaggttcctttgagtctatcttcccaaaggatcatccgaagaatacaaggttctcgatcaacttcttcacgtccattggtcttggtggtatcacggaaagcctgagggagtacttgaagaacatgccacgtctaataatgcagcagcagaagccagaatcatcagagtcagattcaagtggatcagaatctggttcggaaagctctagttcaggttccagttctgagtctgagtcagaatcaagccctgataagcgtgacagaaggcgaagtaataagaggaagaggacttgagagcacttccaactatgccttttggaattcatgtatttggttttgtttaaatgtgcttcttcagtatacatgtgcagtatgtgatctagctcttgatgtgttagtggtaatcagaaagccgtaacagtaagatactatccgaacttgtacgtggcaggttggtagtccagcaacaaagggccaacagagatcttgtttatttttcataacttccaatgcagaacaagttctgtacgtgggtatttgtaccattgcgacatcacactgctagccatgttctgtatcctgtagtgtggtaactggtaagcatcaaatatggacatcggttttgatttttttcgagtctatcttcccaaaggatcatccgaagaatacaaggttctcgatcaacttcttcacgtccattggtcttggtggtatctcggaaagaccctgagggagtacttgaagaacatgccacgtctaataatgcagcagcagaagccagaatcatcagagtcagattcaagtggatccgaatctggttcggaaagctctagttcagggtccagttctgagtctgagtcagaatcaagccctgatgagcgtgacagaaggcgaagtaataagaggaggaagaggacttgagagcacttccaactatgctttttggaattcatgtatttggttttgtttaaatgtgcttcttcagtatacatgtgcagtatgtgatctagctcttgatgtgttagtggtaatcagaaagccgtaacagtaagatactatccgaacagggccaacagagatcttgtttatttttcataacttccaatgcagaacaagttctgt

SEQ ID NO: 56495 - DNA, 249 bp, Zea mays
  Clone ID: MRT4577_151514C.1
agcacggatccacttgaaggcaatttgaaggtaccaagtcctaaagagctaaagtggaggacagaaagtgcaactttgggtaaaatggtaaaaccatgaggtttgaatacttagataagttgcatatgcctaataatatgtttctagcacttttgctttatctctaactcaattatgtgagaaaagtgcttataggacttatattgagtgataatgcaaatcctggtcaacttatggtgaaatgatgag

SEQ ID NO: 56496 - DNA, 617 bp, Zea mays
  unsure (1)..(617): unsure at all n locations
  Clone ID: MRT4577_151515C.1
cttttgtttcgtagttatgtaactcttttttggtccttctccaanaagttttggtgatgaggacattgcggtgggctagagtgctggagaggatattacccgagcttccgtccaactcaaatgggcctctcattgaacattggtaaatgatcttatccaaaaaaccaacatgtacaaaattccaccaaagaattgttcgatttcggttgtctcaatattgagggctctgactgaatggctttatggtggtgcgccattgttgtttcgacatttatatctatttcaacggagctttgcatatcaagttcagttggcaagtaaataagaattgtgctatttggcgcaatcaaaataaccaactcggttgtagatgatggatgttagaaacaatggtgcaaagcatgtttctaagttctgttgtattctatttttgtgtaaacttgctagctactatttgcatcatgatcgttgttcacactgtatgttgtttgtactttacaataagcattcgtctctattttactctctttcacccgctttttttcatgattctccttcttatgtaacattaaacgtctaatgaagtctctatttatttctcggcaggttttcgtaca

SEQ ID NO: 56497 - DNA, 250 bp, Zea mays
  Clone ID: MRT4577_151516C.1
cttggggtattgtttttttttttttttttttttttttttttttcaaaacgaaacatccgggccatttttaccccccaatgtgacccccgaaacccaacccacagggtttagttgcctggtcaaattacccttccagcaggaaacaagaacaattaccctcttagggtttgggtggtttgaacacttccagccgacaaaaaactttggttggttaaaaaacaacttaacctttcgcccaaataccaccttt

SEQ ID NO: 56498 - DNA, 186 bp, Zea mays
  unsure (1)..(186): unsure at all n locations
  Clone ID: MRT4577_151517C.1
atatataaaaacattactcaaccggncttgttaaattaaaacactggcttgtcnccnnaacctcaaacaacaaacacttatacaatataactttaacatacatttaactaatatcatcaactctttttncacctatcatctctaaattattctacaaaccaatctcttttttctttccatttttta

SEQ ID NO: 56499 - DNA, 764 bp, Zea mays
  Clone ID: MRT4577_151518C.1
gccgaagggaggcactcccccgaccacgccgcgcaatcgccgtcgcgtttctacgccggcgtcagcgttttctctcgctccgcagatccccagagcctcacgttacagcgacgaaccctccgacgagccggcttcccccgccgcgcgcggagcagcggaaccggaggcggattgcacgagacatgtgagcctgctgtcgcggcgacggcgctggtggtgatgctcctgacccccgtcctccggggtcgcgtccgccttctccaccggcaccgctcctgaccatgccctcccctctcttcctctccagaaaccctaatactagcctcggcaccactaacccccacctctcatcgccccccgtgtcggctgcaatgagcaccaccggagtctacgtgccgccgatgcggcggctccgctccgttatcgcgtccaccaacgggagccttgcgccaccaccgtccgccgcggcgcaggcacagcagacgcggacgccagagtggctggtggacgggcgttcgctcagcccccagtcgccgcctcagctgcggcggcgcgatatacctcccttgccgaggccacccctgccagagcattaccggcagcagagcgctgggtttgcccgctatgcatacgatgatttctctgaggatgactcagataaggacattgacccgcacgtcagcttcgagcaaaggtgcatctaccttagataatgttgatgaatggaaatgaaaactgcatatgcttcctcgtaatggtgatga

SEQ ID NO: 56500 - DNA, 1639 bp, Zea mays
  Clone ID: MRT4577_151519C.1
agctcggaattcggctcgtggagcaatcaatcagagcgggcggggaggagaatacaaggccccttcgtctcgcctcccaccaccaacccttcctccgcctccgccgccgccgcctggagctgaaagtatcccagatctgagcccgccttccgatggcgatgccttcctccccttcccccacacgccttccaacggcctcctcctcctactggtgctaccagtgcgaccgcttcgtgcgcgccgcctccccgctctcctcccccgcctgcccctcctgcggcggcggcttcctcgaggagatgagcgcgccgccgccacgaccggcctacctccgccgcccccgcgcgcaccacgccgccgactcccgcgcggcctcgcccttcaaccccgtcatcgtgctccgtcgctccccgcccgccgccgccagcttcgagctcctgtacgacgacggcgcggggtcgggcctccgcccgctcccggagaccatgtccgacttcctcatgggctcgggcttccagcgcctgctggaccagctggcgcagatcgaggccgccggcgggctggcggccggcgcccgcgacgccccgccgccggcgtccaaggccgccgtccaggccatgcccgttgtctccgtcgccgccgccgacgcgcactgcgccgtctgcaaggaggccttccacctgggcgccgaggccagggaaatgccctgcgcccacatctaccacgccgactgcatcctcccatggctcgcgctccgcaactcctgccccgtctgccgccaccagatgcccaccgacgccatcccccttgagcaggaggaggaggccacggtcgggctcaccatctggaggctccccggcggtgggttcgcggtcggtagattcgccggcgggcggacgcccgaggagcgggagctccccgtcgtgtacacggagatggacggcgccgggttcaacagcggccgccgacccaggcgggtctcgtgggggtccaggcaggccgcgtccacgaacaggggcaccgtccgccgcttcctccgcaacgtcttcgcctgcttcgggcgcggccacgcctcgtcctcctcgcgctcccacgccgtgcctgagctcaacgacgacgcgttcagccatgggtccaggagccggagcaccagctggaggctcgaggacgggcatgccgacgccacggtgcagagttgacggacgaaccaactcctgctgcctgcctccctgtctctagtacagcacgctgcaagaagcgaatcttgttgcttttgtttcataattcattcgtcttgtattgtgtttaccatactgctgctcctactcctgcctgctacttagaagaaaaagaggaaggggaaggggaaggcgaaggaggaattggaggatttgtagaacaggtcgattgcaaggagaccatgcaagggttttcattgtaggtgggggattgttttttttttgcttcttctgtagctgtatgtatccatgctagtcctatcctttcctatgttgcagcaggatacttgtgctggctgcttgcttggcagggcagcggcatcactgtcccggccgttgtctgtcctggcttggcaatgaagcagcagagcacagaaagtcagaaagtggcatccccatgg

SEQ ID NO: 56501 - DNA, 267 bp, Zea mays
  unsure (1)..(267): unsure at all n locations
  Clone ID: MRT4577_15151C.1
ccaaaaaagcttcaataatgtgaaacaatcncaaaagtgtatttatcacatattcttttacaacattaacaagctcctagttagtaacaatatctacctaacttccaacaaatttctatcaacttatacatcaaatacattttcttattaatatttcataccatacatttaaactaataccaaaaacaccaccaacttataacattccatcatatttatctatacttccatcaaatacagtatctccatacaaccattcactatcaa

SEQ ID NO: 56502 - DNA, 753 bp, Zea mays
  Clone ID: MRT4577_151520C.1
atgaatcggtgcatgcacaacggaatcacacatcagtacaaggaatccaactcaggccgcttttttttttttttttttgcaaacagaacaaccagcccagctatccattgtttctttgctctctctatattagccatctgctctgagttgcagaatctttacgagccaagacgccttccagaaacaaagagatacagcaatactcagctacaatctccggtttacagaactaaagcatggatccatcttcattgtctagccgctggcttcagaagccagatcgccactgccgatgctctacacgagtcattcaattgtaacaggttgcaagtttaccacggccacctggctaaaggatgagtagccacacgacagagcatacagggacgagcagggtttgcaagggcagtccacctcttaccattttcacctacttgctaatggtaaaggatcccagcttagacaggtccggaacccagcatgacagttctgatgatcctgtcacgaacatcaaggatcctggagcccaccttaccagcggcggttcgtcgtctgtgcttccccagcgcgcgacctttccactcctaacattccaagcataaacactaccgtcaccggagccagatatgatatggtctccatcagggctgaacgacgcctccagtgttgagttggttaccactggcttcacattgcacgacgcgatcctattgccatggaagaaaaagggctcataagaaccatcccggccag

SEQ ID NO: 56503 - DNA, 1922 bp, Zea mays
  Clone ID: MRT4577_151521C.1
cggacgcgtgggtttttctaaaattggatcttcgatgctatttttcaaatggtatagagctaattttcccaactcagaactgaagcacgcttctacttcctttctcggctctcacaaccatttcccctcccctcgcttccaactattggaactgaagcatataggctctgaggagaagcaagactgaataaggtcaatatcttgggctaacaaggctgctattgttggctctgaggagaagcatcatattctcccatgattactcttggcctcgaggccggccgggaacccggtcgagagctccgagccgcccccacggcccacgccatcctccgcaccggctggaccagccccacgccggacaaccggggctcgccgcgccgccacgctcccaagccggaactccgaactcgccgcgccgtcctcactgtggcaccagagctgctcgatctgccccgccctcgcccctcgcccctcgcccccttgccggaggggcgcgaactcgcaaaaattattgggtgtgcatttatacacccatgtcctttgctgaccctgtctggtagcagattaaggtttggttgcggaaaatattggtgggttgtccaccatgacgagtccgccaagggtgagcatggagatcaccgacgacatgctcaagagcatggaggtcggcctagctttccgggactataatggtagaattagttctatggattttcacagcaaggctaccaactatcttgtgacagctagcgacgatgaatcaatccgcctatacgacactcaaaatgcagtatgtttgaagactattaatagcaaaaaatatggggtcgaactagtgtgcttcactgataacccaaatattgtcttatattcatcaaaaaatggctgggatgaatctctgcgtctactctcactgaatgataatcggtttcttagatattttaaaggtcaccttgacagggttgtctgcatctcattttgctctgagaaagaaaattttctctctggttcacttgaccgtactgttctcttatgggatcaacgggctgaaaaatcacagggcttactgcgtgtgcaagggaggcctgcagtttcatatgatgatcagggcatggtatttgcagttgcctatggtggtcacataaggatgtttgatgctcgaaaatttgaaaaggggccttttgagatcttctctgttggtaataacgattcagaggcccatgtcataaagttcagcagtgatggcaggcggattctgttaaccactaaagctggacgtgtccatgtgctagattcattccatggcaatagcattgcgtcgtgcaatgtgaagccagtggtaaccaactcaacactggaggcgtcgttcagccctgatggaaaccatatcatatctggctccggtgacggtagtgtttatgcttggaatgttaggagtggaaaggtcgcgcgctggggaagcacagacgacgaaccgccgctggtaaggtgggctccaggatccttgatgttcgtgacaggatcatcagaactgtcatgctgggttccggacctgtctaagctgggatcctttaccattagcaagtaggtgaaaatgatagaggtggactgcccttgcaaccctgctcggtggactgcccttgcaatataaccctgctggtccctgtatgctctgtcgtggggcaactcatcctttagccaggtggccgtggtaaacttgctacctgttacaattgaatgactcgtgtagagcatcggctgtggcgatctggcttctgaagccagcggctagacaatgaagatggatccatgctttagttctggactgagtattgctgtatctctttgtttctggaaggcgttttggctcgtaaagattctgcaactcagagcagatggctaatatagagagagccaag

SEQ ID NO: 56504 - DNA, 796 bp, Zea mays
  Clone ID: MRT4577_151522C.1
cgatacacacgcttaccggctcgataccagcggaggtcgtcagcctctcctctctgaccagctaccttggtctctcgtacaactccctcactggtcagatcccatcagaggtcgggaaactgacgaacctagtgctgctggacctgtcagcgaaccagctatccggggacattcctgcagctctaggcaagtgcgtcgagctagcgcagcttcagctgaacgacaatcttcttcaaggcgtcatcccgcagtccttgagtggactgcaaggaatgcaagagctggacgtcgcgaggaacaacttgtctggccctgttccgaagttctttgccgactggccgagcctgaactacctgaacctgtcgtacaacaggttagaaggctccgttccggtagcgggcgtcttcggtaacgcgagcgcgttctccgtggctggtaacaaggtctgtgggggagttacagctctgcagcttccgccatgccccactgtcgaagacgaagagcccgacgacgctgagaagaggaggccaaggagactagcagtgataataggcactgttgttggttctacatctttgcttctccttgccttttgtggtcttctcctgttgatcatgaggcggcggaaaagggcccctgccaatctccctttggcggaggaccagcattggcaggtctcgttcgaggagatacagaatgcgactgaccagttctccccgagtaacctcataggcgtgggaagcttcgggtccgtttatagagggatcctccctgagccaggtgcgcggcaaggtga

SEQ ID NO: 56505 - DNA, 778 bp, Zea mays
  Clone ID: MRT4577_151523C.1
gtcatatagatctggaggggatccaatccaacaaccatggaaggcaaaccctagcctagccgcctctctctcctgctcctgctcctctcctcctcagatctcctaccaccatggccgtcggctcctccttccaagcccccatggaagcaaaccctagcctagccgcctctctctcctgctcctgctcctgtcctcctcagatctcctaccaccatggcctcgttcttccttcaacccccctgcgaccttccatggcgacatggatctagccagccgggttgaggccgctggccggacggcagcaacgtgcgtcggtacggtggcaaccgggccgctcccggagaccgccggcgtgtgaaaccgcttgttcgtctgatggttatgtcccactactccggcgagatggatttgcttgtgttttagaggccgtatgctgctgcatttgttgcacacttgtgaaggcttccaactcggtttttttctgatgcataagcaacttccttgatcctggtatgaaggtgtacaaatcttgcccatgaacccagtcttcttgaagcaagccgggcatgcacaatgcatcttgtttggttggtgcctgagtggtatttggaccagcctgacctgagctgtccaccgaaatcagaggcctgactcaggcagaagcaatcagtctgctcataatttagggatgcacacatggagcggttcacgtgtgtccctgcagtgttgcagctggggcgtcccaaggtccatagctaggcccaccaaaagaatggag

SEQ ID NO: 56506 - DNA, 140 bp, Zea mays
  Clone ID: MRT4577_151524C.1
tcttttcgccaactacaactcccaaaaccctgcctacatataaatgcccgctagtctccaataatttccattctaaaacactcccaaccctctcttctaatctactacttcttgtatttactatctacatcaacctactt

SEQ ID NO: 56507 - DNA, 199 bp, Zea mays
  Clone ID: MRT4577_151525C.1
aaatttgaatatatgtataatatatgaataagctgctgggacataataatcttaaaggctaccggggcgttacatatggggccaactatttttttttttctaaaataacctgctatttcttttattttcttttctcttccactcgggaatatcggttttggaaaaggctttcacctcggctggtcaggcttggccgggc

SEQ ID NO: 56508 - DNA, 1074 bp, Zea mays
  Clone ID: MRT4577_151526C.1
agaatagcctgcaactgaatcatgaaaaatgtatacatcttcacatactgcacgttataaaaatcaccaaactgaagtgctgcaacctctgttaggcattgaagtgtaagattctgataagcagccatagggaagaacttcagtaatgtctccagcaacggtgactcaaaaatgaatccaattgggatccatgataagaaagcatggagtgtcgccaatgtagcacggatgagctgtggcctttgcgttgcagataagacatacaagcatagctcatgaatgagccggaattcactattaagtgacgacttcagttctttgatcttttgttgtgtcatttcacctcttgagaagtcaaaaatttcttcgcttagaagcttcaatatagccatgcaattttcacatagagtttcactactctttgcagctgcaacaagatcaggtatgaaggatgaccatctggcaggccactcatgtttcagtacctgcaccaaaataatattgagtttattgacataaagcctctcctgccgaaaggtaacttcattgctggaaagctgcacaataacatcagatatgtaattctttatgccatcacgttgatcgacgggcaatgcattccacctgtacttgataacactttcaagtatttgcaatgcaaagaacttggtgttgaggttctgggaattctgcagaatgtgtacaacttgtagccacatgtctgggttgttttgtaggtcacgtagtatctgatcagcggcgctcctctcctctttagatccggtgccgtagaaggcagcgacagtagcatcgaggagcgtcacgtctaccggctggcttagatccctgagcttctccgccatggcggcagcggttggagtgagcaggtgaaggaagcttgtggaggcaggggatcgtggggagcagggaaggcaccggaggcgcgagaaggcgcagccctagaagcagcgagcgcggcgacgctagcggcggcggcggcgggccggattcttaccggaagagggagtcggcgaagaaggaagaaggccccggccggcctcgaggtacccaatg

SEQ ID NO: 56509 - DNA, 574 bp, Zea mays
  unsure (1)..(574): unsure at all n locations
  Clone ID: MRT4577_151527C.1
ggcgattgggaccctcgaggccggcccatatctgcgccgcgcacgtccgccgtcgcgcgcggtgagagagccgatgcatgaaagcgtcaagcaattaagtacgcgtacgtgaacgtaccgagctagtactgctccggtgattaaatcctcccccgagatcgatccagccggtgacggactacgcacccgcacgtacgtacgccagacggccagacccaacatcgcagcgaaattgaatgccactcgccaccaccgccttccgatcgtgtgtacgcgcgcggcgcgatgcgagcgacccgcgcgagcattattaacagagctcgccgtccggccgtgcgcgcatcgcctataccaccagccgtccaagcaaccggtccggcggcgatggcgcgggcaccggcgacgacgcgatccatcatctaaatctccactgttctatatgaaggcaacgtggtcgttcacatcaggctttaccatggctccacccctcccaccacgnccggaattcgaggaccatcctcggattccgtccgagagtcctcgnctcacatactaccattcatggactgaacgt

SEQ ID NO: 56510 - DNA, 311 bp, Zea mays
  Clone ID: MRT4577_151528C.1
ttttacttttttttttttttttttttgaacaggcgtaacttgggtgatcttggcatatacaacacgcttgacacaacaccggaatgtgaatctctcttctgtaggccggccacttaatatacacaactaaaaatccctgtccaagaaaacagaccagacgagggccgaatccagagctcaatacaagcaaaaccttaacataacagcggagcaaattccaggatgctcatcttacccaaaaggccttaaaaagccaacaggctgcctgaataacacccccaattaaactgaccaacccctgaaggagacct

SEQ ID NO: 56511 - DNA, 241 bp, Zea mays
  Clone ID: MRT4577_151529C.1
ccttcttggtgaaaactcccccgttccacctgcacggttgctgcctctaccattgggcctcccaaaacacctccgatcacatatctctcacgtcgtgctgatcgtaacgctaagcccgcctatatacttgccctggccctggcactgtgctcgttgtgagccctcatccacgttgtactactccggttggcttatgatctgggactaccccccgtacatggctcgcctgttgatgtacggc

SEQ ID NO: 56512 - DNA, 1112 bp, Zea mays
  Clone ID: MRT4577_15152C.1
cgattccggagagggagcctgagaaacggctaccacatccaaggaaggcagcaggcgcgcaaattacccaatcctgacacggggaggtagtgacaataaataacaataccgggcgcgttagtgtctggtaattggaatgagtacaatttaatttccttaacgaggatccattggagggcaagtctggtgccagcagccgcggtaattccagctccaatagcgtatatttaagttgttgcagttaaaaagctcgtagttggaccttgggccgggccggccggtccgcctcacggcgagaaccgaccggctcgacccttctgccggcgatgcgctcctggccttaactggccgggtcgtgcctccggcgccggtactttgaagaaattagagcgctcaaagcaagcctgaatatccagaaaatggctccaaaaattctccagccctgccaagctacatggctgctacacaatctgcaaaggcgaaactgcgggggaatagttcaccaagacttagctctgattcagcagagaaaaacgggttcactcgtcgtcactcccttccgtcccctaacaatggtaagataatttcacattctccacgtacgcaaaggccaacccatgctggtggcaaggacggagcaaaaggcgacaaggctatgctgtcatcaagagatgcgagcgagagaccactgaaagctgagtggagacgctgaggtggcgaatcaaaaccccaaaccctccatttggttagtgcaactatttgggtcggtggatggcgtctgcagtttgctccgattgttttgcttgttatgtaaaaaagacgttatcatcattatccgcggcgatgaacgggttcagctttgttgtgatgaatctgctgggagtcaacttatttacagggttttgggtcatgccttttgtgatgtatagctgaagtattttcccggtttgttttgtttcccagactcccccccaccccccacccgcttgctgagagggctgctgatgttagagagaacgagaacctgtatggattgagtcgaacagaacactcttagtcccgtttggtcaaatctgggctgcgttttgaaaaaaaaaaaaaaacccaaccac

SEQ ID NO: 56513 - DNA, 671 bp, Zea mays
  Clone ID: MRT4577_151530C.1
ggtcactcagcagtcagcaccacagaacgctgatggggacagagaagcgcgcaatggattctgtggccgtcgtggcggtgccgttcccggcgcagggccacctcaaccagctgctgcacctgtcgctgcagctcgcgtcgcgaggcctggacgtgcactacgccgcgcccgcgcagcacatccggcaggcgcgcgcgcgcgtgcacggctgggccgacgaggcgctccagtccgtccagttccacgacctccgcatctccggctacgtctccccgcctccggaccccaccgccgactcgccattcccctcccacctcatgcccatgttcaacgcctacatcgccggcgcgcgcgctccgctcgcggctctcctcgacacgctctccggctcttgccgccgcgtagtcgtggtgcacgaccgcatcaacgccttcgcctccgaggaggcggcgcggctgcccaacggcgaggcgttcgggctgcactgcctggccttgtcgatgcttcttggaagaatggacgctaaccaccagctactgcgtgagaacggcctggtcttcacccccgtcgagcactgtgcgaccaaggagttcctggagtgcgccagccgggacaggacgtcgaaagagatctccgactggagccggtatccttgataatacatgccgcgc

SEQ ID NO: 56514 - DNA, 299 bp, Zea mays
  Clone ID: MRT4577_151531C.1
gtgcttgcctgttcgtgcatgtgttcataaactcaacactttaatcatgggttcatgagcattaaaaagcaaagggaaaaaggatgtgtaatggtgtacacagtctgtatattttaataatgcagagctatagtctcaattgttactttataaggtggttttattaacaaacccaaatcctggattttcctgtctttgctgtattttgaaaaacacgtgttgactccattgttttacatgtagcaaagtctgccatctgtgtctgctgtattataaacagataagcagcctacaagata

SEQ ID NO: 56515 - DNA, 635 bp, Zea mays
  Clone ID: MRT4577_151532C.1
ttttttttttttttttcgcagcggaaatcttattaccaaattttacatgttacatcaagttttacaatgtacatgatcggagtggttacaaaagtgattcaaagaaataactttgaattgttataaattgtctataagtttgaaatatatgctagctcaagtgaccatcctcaaaaagaagtatagaagagttacttatacttataagaaggctgagcccaccggcacttaacaccatcatcaacagcacaaaactatgacctttgttgcagtgaagaggttcaagacctttctacccaataaccagttagatagctccatccacttgatgaataggcactggagcaaactcttcttcagtcacctcttcagcttgaatcttcactccttctggtaggagttctaaactttggtgctcacaaggaatcgacaagagaaagtgtgagttgttcggtcaacacaggggctgctcacggctctggtctacggtggcacaactctgttctgggcaacaaacttgttgagatagtctgaccacggcgaggtggaaggatggttgctgtggcactagagtaccagacaatggaatggcacttgatgaactgaacaaagccgacacagaggcctcgtgccga

SEQ ID NO: 56516 - DNA, 317 bp, Zea mays
  Clone ID: MRT4577_151533C.1
aaaagaaaaaacttttgctcccggggtttattaaaaaattttttccgaaattttttttggggggactttttatggttttaacaggaccccgaaaactttaaattttcaaccccatttttttcccggaaggacatgttcctaagtttaaaatttaaaaggtttcgggcccattatttgctttcaaattttgccaaaggggggaatttaaacaccgggggaattttttttgggagaaaaaaacggggttttaaaacccttggttttaccaaaaatttcttcaccccaaaagttttttttttttttgggaaaaatttttt

SEQ ID NO: 56517 - DNA, 574 bp, Zea mays
  Clone ID: MRT4577_151534C.1
taaagtgagtcgtagaaacagtttgattggttggaggataaatccggtggtgatggctgccagaggtgatgaggcttgtacttttttcgtacgttccttgcagatccccctgtgctcacgcagctacattgcaacagtaacatatataggtgtacatttgtgctgtacctaataggccggcccaaagcacacaatttttggcacggcccatatctggcacggcccaacctaattgtgggcctgggccggcacggcccacattgtgggccgtgcctgggcctcaagtcaagcccacgggccggcctggcacggcccatttaactaaggcccaccgaggcccactaaatatagactcagtatttaactaaggtccatcaaagcccacatgactagcataacttggagaatctagagcttcaataagccatcgagaaccaatacctatatatggatagtgaatagtgatgatcattttatatgtattttgtatggatgtatagtactcaattaaacactaaacagagaactgaatattatttgtgagcttgttgtaatattttttttctttctgacc

SEQ ID NO: 56518 - DNA, 377 bp, Zea mays
  unsure (1)..(377): unsure at all n locations
  Clone ID: MRT4577_151535C.1
ctntattttnttttttttngaaaagccatggaaaggggtttttttggggaagttttcgtttttatatcactcacgtaattatgagtccattccaaataaagcatgaaagccactcaaacaggacgccacacattaggggtaaagatccagttgatagggggcaggcaaggggggtacagtggaataaaaacaacgaaactaccctatgggatacaggcctttatggttttgacgcaccaggggggaaaggcgccaaatgggcgcttgctagaggtgaactcaacaacaggatctctaggccttcttgcgagttgtgacctatataagcagtggggggaaaagctctaccatcagctggcatgacaggcatcatagaa

SEQ ID NO: 56519 - DNA, 108 bp, Zea mays
  Clone ID: MRT4577_151536C.1
tcggaaaaatttcaattagaaacttaaggaaatagcaccggactgctgttggagctgacagtacacacagatgaagaacacaatgctccattgaggaaaagaaggcca

SEQ ID NO: 56520 - DNA, 899 bp, Zea mays
  Clone ID: MRT4577_151537C.1
tgggtacctcgaggccggccgggggttcattctccagctagcccggggtccggagacgcgttggcaacaagctgcaggtgcagctatataaaaagcgagcagctcggacatacccgcaccaaaaggacccaacgaagtccagccagctgagctgagcctcgtgaaccagagcatttgctccttcctcgtcctcctcgatcgacctctctccttggtgccgctgccgccatatatgaactgctagcacgcgcagcagccagcagctgccgaccggcctataatcagaaggccagaaaggatcgatggagaccatcaagtgctgcatcgcgtgcatcctgccgtgcggggcgctggacgtggtgcggatcgtgcactccaacggacgcgtggaggagatcagcgggggccccgtgctggccggggagatcatgaaggcgtaccccaagcacgtcctccggaagccgccgtccacgtgcccggccgacggcggcatcgtcgtgcagaagcccgtcatcctgccgcacaatgccgagctgcagaagggcaagatctacttcctcatgccggtcatggccaccccggcgcccgagaagcccgccgcgaagccacagccgccgcccgccgccggccaatccgcggcggccgcttcggtggcgaggagacggcgccggaggaaggaccacgccgccgcacggccggacggaggaggagcggcgcccgcctgcagcagcggggccggggcccggccgccggagggcgagaaggagcggctgctggccaacgagaggtacctgtccgagatcatgaaggagaaggcctccacggccagggaccggcggcgaggccgcgtcgccgtgtggcggccgcacctggagagcatcaccgaggatgacttgtaa

SEQ ID NO: 56521 - DNA, 722 bp, Zea mays
  unsure (1)..(722): unsure at all n locations
  Clone ID: MRT4577_151538C.1
ggtacccntcgggccggccgggaatataccctattcacactcgctattcactcttttccctagcctcattctgcgcgaatatactgcttgggttgcatcgggcgacattgagcgccagacaggatgagttccaacaagaagagtagcctcacgggctatctcccggatatcctcatggcagctgctgcaccattaatagcatactttgtcatccgcaacctgctcacgcgcctcgatcccgaagcccaacaaaaagaagaagcccgcgcaaaggccacggccgcaactcgcaaacttgatgctattctcacaagtaaacggcggaaaagctatagcgagtatgatagcgaagatgacgacgagacggactcgcggcatcgacggccacggatacaagacctcaatctcaacacgtacgaacaaacaatcgctatggaagtcgttgcgcccgaggagattcctgtcagctttgaggacatcggaggtctcgactccatcattgaagaactcaaggaatccgtcatctaccccctcaccatgccccacctatacgcccacagttcctcgctcctcagtgcaccttcaggtgtcttgctctacggtcctcccggctgcggaaagacgatgctggccaaagccctcgcacacgaatccggcgcttgcttcattaacctgcacatttcgactctgactgagaagtggtatgngcgacagcaacaagc

SEQ ID NO: 56522 - DNA, 793 bp, Zea mays
  Clone ID: MRT4577_151539C.1
taccctcgcggtctggcctacaagcggagggaccggtgacggtgaggtccgttccgtcgtccgcgcgtggccagggatcgacgacggcggtatatatgcatggagaccatcaagtgctgcatcgcgtgcatcctgccgtgcggggcgctggacgtggtgcggatcgtgcactccaacggccgcgtggaggagatcagcggggggcccgtgctggccgccgagatcatgaaggcgtaccccaagcacgtcctccggaagccgccgtccacgtgccccgccgacgccgccggcatcgtcgtgcacaagcccgtcgtcctgccgcccagtgccgagctgcacaagggcaagatctacttcctcatgccggtcatggccgacgccaccccgccggcgcccgcgcccgagaataagccaccagccgcgaggctacagcccccgccccccggccaaaccgcttcttcggcggcgaggacgaggcggcgccggaggaaggagaaggaccgtactaccgccgcacaggagggagcggccgggctggcgccggaggagggcgacaaggagcggctgctggccaacgagcggtacctgtcggagatcatgaaggagacggcctccacgtccagggaccggcggcaggggcgcgtcgccgtgtggcgaccgcacctggagagcatcaccgaggatgacttgtaaccaatcaggcaatgcaaggtgtctttgtttcttttgttttcttcttctttctctcccacccatttttctttctctccatttcttttgggttttcattgat

SEQ ID NO: 56523 - DNA, 660 bp, Zea mays
  Clone ID: MRT4577_15153C.1
cacgcctgcgtgtaccgggctcctattacacggtcgacctacgcgttcgtataaacacaccatgcgaagcgcactatcaaccaacctatcagcattggctaccaagatataatccgtccttgcgcctcttgcgctttttgatagcgcatcaaatgcgaaacattatgtccactaatgactcacgtgtgctgcctgagctccattatacacacatttatctaaaaacaactgacttgaatggcactaataacacgcctagctgtagcgaaagcgctaataggcctactagacaagacgcacttgtgggcagatgcgatcataactaacatgccagattgctcgcaattagcgaacaacaactaccgtggcacatataacaatacaaaccatggaaacgcatcatgaacgacagctactaccatcacctgcagcctacgctagccatggagatagccctgactcctactagcaacagcagctgcttgcatgcaacccacttgctctaacaaacgtagctgcaaaccagcaacaacaactactgcaacagtttctgccagcgcttaatcaactagccattgagaaccctgacaactagctacaacagcaacaactgctttcatctaacccgctcggtgtggacaatgcacctacatacctgca

SEQ ID NO: 56524 - DNA, 688 bp, Zea mays
  Clone ID: MRT4577_151540C.1
tgtgtgtgacaaccttgtctccttttgttcatctcattgactactctgcttcttgattgtactgtgtgtgcagagggtaactgccaactggttggtttctgcttttgcgtttttgggtatgttctaataccttgcttttttttggatttgatgcatcattaacatgaagacaatttctgagggtgatgtattgctaataagatggaacctgttagatttgtagtgagtttgtgacaattcagactcagatggttgcccagtgttctgttcctcttaagccgatatttttttcaggaaaacttgtgaagagctgttcattaaataacttcactactcttgtgactgactttatgctgatcccttcgaaataaaatgacaaagccttcaagttccaagcaagttaaggtaggctaaagtaatcctatggatcaagaaaagatacaacttttgaaggggcaaatattaattattgaggcctaagtttgaactgaagatcctccaaacagacgtagtcatatgttggagtaatatataaccgtgtaacagtattcccccacgtttaagatgcaagtttttgacatatgtaggattttgaagatacttatcttcatatatgaaccagcttgtccatactgatgattgcctgtcgacctaacagcttaaagttgatggggtactgatgaggttg

SEQ ID NO: 56525 - DNA, 772 bp, Zea mays
  Clone ID: MRT4577_151541C.1
gggtacctcgaggccggccgggccgggactgacgcagccaaaaactctgctccgctccggccacctccctcttcttcgactgagtaaacacgagcagccgagcacgcgacccgacaacgctcgcgcggaggccgaaatgcccgctgctgctcctcttcccagtacgtagcagcggaacatcgtcgtgggtcgtccgccgttgccatcgtgtgacggcgtgaagggatcggatcgaaggaggccgcaagccaagcaaggatcaagaaatggcgtcgcgcggccacctgctgctactagcgccgccgacgtgggcgcgtccgccttcgccatgccgctctcgtcgggggcctacaccggcacgggccagtacttcgtgcgcttccgcgtgggcacccccgcgcagccgttcgtgctggtggcggacaccggcagcgacctcacctgggtcaagtgccgcggcgctgctggaccaccggcttcggacccgccggcgcgcgagttccgcgcctccgagtccaggtcgtgggcgcccctcgcgtgctcctccgacacctgcacctcctacgtgcccttctctctcgccaactgctcgtcgccggccagtccctgcgcctacgactaccggtcagtacctcaccatctccccatttccattccccaagaacaggcaccaccgcagcagcagtagtaagtgttgccgtgttggttggtgagcgagcgggtgggtcgggacctcacctcgcgcgcgccattactcgcgcagctttttaac

SEQ ID NO: 56526 - DNA, 379 bp, Zea mays
  Clone ID: MRT4577_151542C.1
gacacacatacgatcccgagtcacagcaataactgctgccaacgctgaggtgccgcgggggagggcacaccacgtgctgaggacctcaaactccctcaacacgcagctggctcccctcgagaacactcgtgaagacagcgacacaggctgcgtacgagtggatcacataaggccaggcgaggaacgcgtccatcggccgttgaacacactaaaacactaacagctgtcgcacgaagacgagcccgccaacccacctccaagcgcggatgcccaggaagcctacagcacctcctcctcaggtgacgaatgcagtgctgtctacgccgcagcccacggcgcatgaccttgtagatgaacaacaatgtactagcatcagagc

SEQ ID NO: 56527 - DNA, 722 bp, Zea mays
  Clone ID: MRT4577_151543C.1
acggacgcacccacaaactctgctccgctccggccacctccctcttcttcgactgagtaaacacgagcagccgagcacgcgacccgacaacgctcgcgcggaggccgaaatgcccgctgctgctcctcttcccagtacgtagcagcggaacatcgtcgtgggtcgtccgccgttgccatcgtgtgacggcgtgaagggatcggatcgaaggaggccgcaagccaagcaaggatcaagaaatggcgtcgcgcggccacctgctgctactagcgctgctcgtgctggccgcggcggcagcggcagcgtcgggcggcgggcgacagcaccagcagcggcagcgcggcgggaggaagccgaagccggcgcggccgtggctggacctcgtccccgccgcgccgggcgcgtccctgggcgagcgcgcgagggacgacgcgcgccgccacgcgtacatccggtcgcagctggcgtcccgccggcgccgcgccgccgacgtgggcgcgtccgccttcgccatgccgctctcgtcgggggcctacaccggcacgggccagtacttcgtgcgcttccgcgtgggcacccccgcgcagccgttcgtgctggtggcggacaccggcagcgacctcacctgggtcaagtgccgcggcgctgctggaccgccggcttccgacccggcggcgcgcgagtttcgcgcctccgagtccagggtcgtgggcgcccctcgc

SEQ ID NO: 56528 - DNA, 571 bp, Zea mays
  Clone ID: MRT4577_151544C.1
ttgcattgcttctcataggaaaagcttcatactgttgtcctgggattattctcaacaccttgagcatgacatgtactgtcagcgtaagactgattaatttggtaattcatttttataacattgtgctatggaatttctttctcttttattcttattttaattctgtaccaaattgttgaatgactgtcactctcaagtgaagtgactcatagttgttatctatgatgatttattttaacagtctggtaatgtatataccttactcatcaagtttacttatgtcaggctttttaatgatgagtactactattgtaactattgtggatttaatgaaattctcagaagagtatttcagctcaaaaccaaagtgtggtcattgactgaataaattataatagctgcatgctattttagttgttgttaaaattaagggatcaattaatggacaatatactttttattagataagtcaattcaccttaggaatgagaagttaccttacataccaattgcgtgcaaaaatctcagcttctagttaattgcattggtctgtacgtcatatccacatggt

SEQ ID NO: 56529 - DNA, 684 bp, Zea mays
  Clone ID: MRT4577_151545C.1
gcatcgtcgaattattgtcgaatattgcacaacgtaaccaagctcaaagtcaatcttcgcaaccatccacctcatcggccaataatccatcgcaatcatcaggattaattagcaattcaatattttcaaatgctttatcacaggcattgtttgcagctggtgcaggcggtgcaggtaatacaggtgatactggcactggtggcaatgatacagtcacttcaactcaatcaacatccacacggcaaaatccatctgatggctccaatttaccaaactcaaatgaaaattatgccgaacgatttgctaacgaattgcaaacgatgcgtgaaatgggactctttgaagatatgatgaacattcaagcactgatcgtttcgaatggcgatgttgaagctgctatcaatcttgttttatcagattcgggacatttcaattgaatttaactataagaaacaaatttaaaacactcaataattcatgtgttgttaagtaaacatttaaatttattgaacaaaatcgaattaaagggaatattgtttccatttaattatcaaatgcatttacatttattttcattttgagaaaaagccataagtttttcgtttcataatcagttacatgtttggtatttgtattttcaatgaaaatttattaaaagatattaatcaatagtcaacttatacg

SEQ ID NO: 56530 - DNA, 1462 bp, Zea mays
  Clone ID: MRT4577_151546C.1
tgggaccctcgaggccggccgggccgggacttagcggttcacccagcgcgccgctctcgtgcgacaattgggcgtcccgcgtccgccgtcgccctgcccagcccttcgccggtcctttcccaggccttcgacgcgtccttcgccgtcgaagagtccccagcagtcaccatgcccttttctcggcccgccgttggtttcttagttagactggttggggtccggccaagctgctgtcctccttcccgtgcatttgcagctgtcagagctcaaaagattcagcttcccaagaaaaaaaggcgattagatgaagtgtgcttagaaaggtttcaacaatacagtagaacatacatccagtcatggattcttcaaggcaaagtcatcgtggatggaagagttgtgaataaagctggaacacaagtatctgacaagtctgtcatcgaaatcaaggctgaaatcccaaaatatgtatgtagagcaggacataagcttgaggcagctatcaaaggatttgatattgattgtgatggaaagatagcccttgattcaggattatccacaggtggctttactgactgtttacttcagcatggagcatcacatgtttatggtgtagatgttggctatggacaggtggctgaaaaaattcgcacacatgaacgtgtttcagtgatcgaacgcacaaatttaagatatctatctcaactgccagaaccagttgacttggtgacactagacctatcatttatctccattctcttggtcatgcctgctgttatcaaagtaatgaaaacggattctacattgataacacttatcaagcctcaatttgaagcacgtagatcacaggtaggaggtggtgggattgttcgagatcctttggttcatcaagaggtactggatagaataatttcaggcgtggaagaatttggattctgcaataagggttggatcgaatctcctataaagggtgcagaagggaataaggagtttcttgcttgcttcaacaggatcccaatatcagagtcacagccagaggcagaggcaaaggaacctgtaacctaggatgtcagcagaaattactcaaagtgcgtcatcattgatcaggacaccctcataaagtatctggaagctatattgattatcaaccataacctctgatattcctgacattcttagttgtgtgataaaatttgtccagtttatcaccattgtttatagtctgtaggaactaggggtacttgtaggagatggagggaggtcgatggcgctgtggtggtgtcaggccatgccaccttgtagggaccgaccatagggtgataggatgcactgcctctatcctacggtgatggtctgatggagttgctccttcctgacggttcttgcctccccctcccccccgcttgcccttctccgttcttctgccctccggctgccccccttccctcctttctccctcccttct

SEQ ID NO: 56531 - DNA, 710 bp, Zea mays
  Clone ID: MRT4577_151547C.1
gggcttcgccacagacaagagtacctaactacctacgtgcctgcctgccatcaccagctagcatgcacggctgcttcttccgttccgggagccctcggcgtccgcaagcgctccacagcggcggcggcgtcgtcatcaccgtcgtgtcacgaggcggcgaaggtggtgtccgcgccaagatcgtggtgagcaggggcgagctggagcgcatcgccgcgggcgtggcgtggcggcagtgcagcggaggcggaggcggaggcggagccgcgaacgcgccgagccgtcggcacatagtcacggccgccgtgtcgctgggagggcaggtggcgcgcgcgccgccgcgctccgagccggaggagggcgcgggcgttgcgcggctcggcgatggctggaggcccgccctggatggcataccagaggaagcgtagagcgccgtcgtcgctgcgactgcgagcgagtaatgcttaccaacaggtaactgagagctcgtccgcggctctgggatttcggaatggctgagatgcgtgctttctcttcgtgcggcttgcgtgtcgttaccagcaggaagtgctgctgctctgcactcctgattctctgttgtattgtgactcgtgatttaatcatgttcaactgagagtttttaccacggtttgttttagacaattgtgataatccttggcaatattgaaacattaagggcccgttcgttt

SEQ ID NO: 56532 - DNA, 441 bp, Zea mays
  Clone ID: MRT4577_151548C.1
gaataaactgatttgtaatggttatcactattaccaatgttctggggcggacatgtgaatcaacgggatggcacggatgctaatcaggacactcttcgcataaggcacctgcacgcaaaacaagatgtgttaaggcttatgagccgacacacgctacagaggccggcaaccttgtccttaggggtgcaccctctaggtgcccttgcggacggcgtagaggccatcctgatgccggtcatgtatgccacgaacttgaggacgaacctgatgcacaacttgcgagcgtagccccacttggagaacacccgcattggacgcaagataatggcgatcaagcactgcacgcttgtggtagaccgcttccacatgctggcaaatcttcttcttcctcctgttgttcttgtctgacctggatagggttgaatcaatcttgttccttgt

SEQ ID NO: 56533 - DNA, 410 bp, Zea mays
  Clone ID: MRT4577_151549C.1
gaacgcctacttggcgtgttatagagtagtttttgttttttgaattggacccacccatttttattaaaccccaagcaaacctatccggcatgttgtacagacaaaattacatggccacaccaagacacactcgatcaaaacaaccactgcgacagatgcaagtattccaggcagggttacattagcaatggataccacaaaggcgtaatggcacacaactttcacagcctctgcttctcgatgtgaaccaactccactgaatgatccttgggactcgcatcccgaacccgagcttcatcttctccaccgttggtgcgagtttgccaaggcaataaagctttttaccagatacttcgtcggatactttaccagaaatctcaactctgtatgatctatcaggagaatcggga

SEQ ID NO: 56534 - DNA, 346 bp, Zea mays
  Clone ID: MRT4577_15154C.1
ctccccaaaaaatagtaataatacatgtagcagactttgagggatgcttgttgttcaatcattgctttctttgccttctaactgaactttgagtccgtaacttttgtcatgccttggtgcgtaaactgcttgtctaatgtgacttattcatgaggtggaactactcaagtcaaatgatatcttctatccattgatgtctcaggcagtccaaggagcttcataacaacttggaactggcacaaaagagcattgtagaccacacttctgctcagagaaaacgaaaggcgagagtaatttcagagtatgctgttatggcccgttctatcattcgtaagaaagttcagca

SEQ ID NO: 56535 - DNA, 1362 bp, Zea mays
  Clone ID: MRT4577_151550C.1
ccctcaccttggtgtgcctttattacgccaccactgctgtttgattccttctcctttttgtttaggacgtcgccaaattcattccatctctcagcgccgtggtctcccgatgtggatgggggaaggtacataatgcgctcgaccacattaattttgtcgttaagagtcaaacgatggtttgtgttcacaactgaaaccatgggattttgtttttgacatcctaaaggaggaattaaccgagagctctctgcaacaaagaacatttctcacatctgagatcgggagaagaaagcattttcaaggagaatagccgatctgttgatgtgcttggccttaagactgcttttgcaaccttcatgggtaaggcaagtaaccttcctcctttgcctctctgatgctatgtgttatgtaataatggcctaaccccatcggtcgcttagtaagttgtcttgtctgttattaacttacattaaaattctgccacaaattcccatcaacaagaaaaacaagaaagatagctactaggagaagctttaatacgctcgatacctggcatgatgagttcctcaatcaagtaagccacatctcccacgagcatgtatctttctggatgtctggttacaatagcagctactcatgtggttgagaataaaatacaaaagataaagataaatattcagatgatcgtcagtatagtctcatccacgacaagttcattatgatttacatagacttcatttttacacccaaaaccaaaagaaaataaaagaaaaccggcaaaaccttgcctacgttagtttcaggctggcccatcggatcctcaatgctttctgttcattttggtcgggaacaagattgatttagatggcgggagcaaacggatggtcagttttcctgaatgcgcaagctttctcatatatatatattcgaaataccctgcagtctctttgcctttcccgcaggttccagagaagaaagcgagggaatggtgcgcctccaagggcgatattccatacttcgagacctctgcgaaggaggaccacaacgtcgacactgctttcctatgcatcgctaggctcgccttggagcatgagcatgaccaagacatttacttcaagacagttgtggaacaagtcccggacactgaacagacaagcggatgtgcttgctaggagccagccatttcctggaaggctggaactacgtggatgttactgaaggactggcccccgatatgtttccctcccattttttcttttgagctccagtaactttattactattctgtgttgctctcactggattttagcacttctgtaagttgtcatcttttaaagttaagaatttttacataagtcttac

SEQ ID NO: 56536 - DNA, 509 bp, Zea mays
  Clone ID: MRT4577_151551C.1
cccagaaggcacaacagtgcatatttaacatatgcagaccaaaaccggtcgactgttatccgacaagcgaacaaggcgcccagcaccaactgaatgttcctgtgatttccagcactaacttacagcatcgtggtgaaaaaacaaaaaccaaaaccaccggtagaaaacagacgtcttgttctacagctacaccaaatatttggtggacctttgagcgcaccaacaaggaccatacccatatccacaagacaaatttcttctaatttcacccccctacgtggaagtagttctcctcaacacatttaacttgctagctgtgaattccttgggccgccacatagaattttgaacccagatcagtccctaactgaccttggggtatgaaatccgcacctcccactggagggacttgtccatgctatcaaactgatttatcgtgtccggggggtccctcactatcagcttgccctgggacctcaatacacggtcgacctcggagaaaactgcag

SEQ ID NO: 56537 - DNA, 399 bp, Zea mays
  Clone ID: MRT4577_151552C.1
gccaaagggaaagggaagtaactttggagggttttagcccattccatactacaagtttttgggatgaactttttgatgaatttgtttagagcataacttttctagttgcccacatatttttagcatggactaaaaacatttttttagcacattgatcagacgatttttactccagttgtcctttccgttttcatctgccacctggatgcatgagctgcaaaaaaaccctgctcggggtcagcttctccgactccacgctggcgaggttccgtcccatcatgctaaaagtcgtcgtcaacaacccggggggggtcggggccttactgtccgggggcggtttgtcccagtgaagcctggaaacaaaaagcggcaaccacctttttgaggacaacccccttt

SEQ ID NO: 56538 - DNA, 2446 bp, Zea mays
  Clone ID: MRT4577_151553C.1
gtcctaattcattcgcgaggccggccgggattttttctttcggtcggggcgttcatttcgcccttcccattcctctccactgcgctgccatcgtctcgcgccggccccccgtggggaactagaactgactccctcgatcccagcggcagcggcggaagcgaacggtgaccgcgacctcccctgaggctgcatatactcggatcgggtttcacatctccggttttggattggttggttgcccgcggcgatgggaggagagctgtggtggtatccataggggatcctcggttgcgtccttgtgcgatggcttcgacctccgttcctgagttaaccgcggacaagaaatgcgacaaagccatcgcggatacggcggcaccacttacttctcagggacactccgaagaaccgactgggaaagtcagcacactagtgcctgctttgccggttgtaattgcagcaggcgatggggctgcatccagtggggtgatagaaaacagaaatggcatggacaattctgctgatggttctttgaagcgggatgacagtgaaggtgctgagaagagctcgctgcgggggagcgtcaaggatagctcggtgtcggctaaatgcagtgacagggcgagcagcctgtcgaaagccagtgggagcgccaagatcagcggtcaacctgctgacatgatcgagagtggcaagagtagtctctatcgggccagtggtggaagtgatctgagtgatgagagcacctgcagtagcatatgcagcagtgtcagcaagcctcacaagtcaaacgactcaaagtgggaagcgattcaggttgtccgaaccaaagaaggttctgtaggtctaggtcatttcaggctgctcaagaggctcggttgtggtgatattggcagtgtgtacttatcagaacttagtggcactaaatgctattttgccatgaagatcatggacaaggcgtcattagcaacccgcaaaaagctgcttagagcgcagactgaaagggagatattgcaatgcctggatcatccttttcttccaacattgtacactcactttgagacggataagttctcatgcttggtgatggagttctgccctggaggtgacctacataccctaaggcaaaagcagcctggcaagtatttccctgaaaaagctgccaagttttatgtagcagaggtgcttcttgctctggaatacctgcacatgcttggtatcatataccgtgacttaaagccagagaatgttcttgtgagggaagatggacatatcatgctgtcggatttcgatttatccctccgatgtgctgtgagccctactcttctcagatcttctaaccccagtggggataaccaaaagggcaacccagcttactgtgtgcagcctgtgtgcattgagcctgcctgtatgcagccttcttgtgtcacgacaaccacatgcttctctcctcgctttttctcttccaaatccaaggagaaaaaagataaaaaggcaaaggcagacttggcaaatcaggtcagaccacttcctgagcttgttgcagagccgacagatgcaaggtctatgtcttttgttggcacccatgagtacttggcacctgaaattataaagggcgaggggcatggaagtgctgtagactggtggacatttggcatattcttgtatgagcttctcttcggcaagacaccattcaaaggttctgggaatagggcgacattgttcaacgtagttggacaacccttaaggttcccagaatcacctgtagtgagttttgctgcaagggatcttattaggggattgctcatcaaggaacctcagcatcgattagcgtataagcgtggagccacagaaataaaacagcacccgttctttgaaggtgttaattgggcattaatcaggtgtgccactccacctgatatccccaagccagttgagatccctcgttctgtagcttcatcaagccagaaggctacatcagccgctgagaaaggctcagattatcttgaattggagtttttttagtggtcacgcatgatctcccatgtgcaagttgtaaagctctaccttttccacttagacttcttttttttatgggttttaataactttatatgtagatgcatattgtcgtacgtagtgctgttctcttcagttgatttctcagttcattcctttagatgggatcctcaatctggtggagtctgtaatcctttattggctgccgttcactagattctctcaataacatggaaacattttcgttcaaaaaaaaaagttggttttagttctctggagaaggatagaggagaaggtgtgtgtctttgtagtgtgagaagcatggctctgtagtgttgttgttatagtgtactactactgtgctagccagccgcatacacagactgtttattctttggagacgaatcaattctttcatcttgactgggtca

SEQ ID NO: 56539 - DNA, 383 bp, Zea mays
  Clone ID: MRT4577_151554C.1
ttttttaaatcataaaaggactaaaataccctttagcattctctcctaactagtacaactgaaataaaggtagggcaaaaagtagaatttatatggtttagtctcttttagtcatcccttgagggactagatactaaaacagtgtaatctatgttttagtcccaccgtttagcaatttagggactaaatgagactaaaatagagggatcaatatttagtccctcaaaccaaatagaatctaagtaagagcttagttgctcccgctcgccctcctctggtttcacaccgtgaagactctacgatatagaaaatatatattattttatatgcgcacacgacatatagtaggtttcagagagatgatttagtatacgttattcgag

SEQ ID NO: 56540 - DNA, 456 bp, Zea mays
  unsure (1)..(456): unsure at all n locations
  Clone ID: MRT4577_151555C.1
gaaccatgtttggctcctcaggcccacaggctcagcgtggcccttgcccgttcgcgttgctggtgctactcctgctgggccccagctcggtcctcgccatctccttccaccttcccgttaactcccgcaagtgcctccgcgaggagatccacaaggacctgctggtgacgggcgcgtacgagatcaccgaccagtctgggggcgccggcggcctgcgcacccatctcaagattacagattctgctggccatattctgtactccaaggaggatgcgaccaaggggaagtttgcctttaccactgaagattatgacatgtttgaagtgtgttttgagagcaagggaacagggcggatacctgaccaactcgtgatcctagacatgaagcatggagtggaagcgaaaaattacgaagagattgcanaagttgagaagctcaaacctttggaggtggagc

SEQ ID NO: 56541 - DNA, 332 bp, Zea mays
  Clone ID: MRT4577_151556C.1
ataaaagtgtcctaaaaataaaacagatttattttatataatttaggataccaacaaaaaaattaagatccaacagtaaagctctaaatcaagtgattaaccgaaatatgttaatctacgttcgtttgaaaaagaaagttttgtgaagcgtctgtttgtttagatttagatatataggagataatgtaataatttgcgggatatttgtgacactttaggagataacttatattttttcgacattcttttgtaaaaagggtttgggtggagcaatttaaggtttgggtggagcaattttttttttggaggtgagccctataatttaatttggg

SEQ ID NO: 56542 - DNA, 800 bp, Zea mays
  unsure (1)..(800): unsure at all n locations
  Clone ID: MRT4577_151557C.1
ccggccgggccgggcctcttctacaccgagctggttcagggcatacccccggtgttccgtcatctcatcgagaagatcccttccatccactcggtgctcattttcgtctccatgaagcacttgccgatcccatctgtcgacatgtcggagcgcttcctctttagacaggtagacagagaagattacaaggtgttccagtgcgtggcacggtatgggtacagggaccccttcgaggaggcccaggacttcgtcgacaaacttgtagagcatctccagtactacatccgggatgtcaacctctacggcctgggctgcgagccgatgatgaagcagtcctccagctactgcagttctcgcgctgagagctttgccagccatgaaaaaaccaaagtaaaggcggtctacgctgaggagatgctcacaccagcagagtcgttctcggagcacgcgaggcaagctagtggaaagagcaagctttttacacaatttcagggagacaagatgaatatagtagacatgatgaagattcagcaggggcaacaggctgtccttgaagaatgagtaaaggtgtggtgtacatatttggagagaagcgaggtggtggcaagaccccactcctcactcattaagaagatagctatcaactacatatactcttttcttagaaaaactccaggaatgggnagaagatgctgtcgatcccccgtcacagatcctaaaaggtcggagtctcatatgaatctannnaggtgtggatgaaagacagggatatctgattgcacacancacttaattttgat

SEQ ID NO: 56543 - DNA, 216 bp, Zea mays
  Clone ID: MRT4577_151558C.1
gaactcgacgcctttttgagtgaacaccattgggcacctgagaaacgaatcccctatcttctccctccatagggattggcttatgaggaagaacaggagcggctctatcctcaggaagatgctgatgaaatttccgtctccacactagattcttcgaatttgacttcaccgaagagagcctcctccagaccgagacacgtgcctcaggtcgagaat

SEQ ID NO: 56544 - DNA, 827 bp, Zea mays
  Clone ID: MRT4577_151559C.1
gggtacctcgaggccggccgggaggggcttcgcaagggcgacacggaccgtcaccaccttcgtcaacctggcggaggaggccaagctcgcgcgcgagggggtcaaggcgcccggccaccagatcctcaccatctgcaagtcgctcgtcgccggcggctcagcaggcggagtgtgagtccccttctcttggctcgcctccacccctgccccgatcctctgtctctcgtcgtcagtcgtcaccgtcccgctcctccagacctcctgggcttcgatttgtcctcacgtgcgtctgccactccgttggtctaccctgattgggttcggcttcctggggattttgttgtcgtaggctacctatattctctatccgtgtaggtgttctcaggctcctggtacagggaattgggggtttccgtgatgcttggcacggggtgtgcgtgcttggcctggcttctctcagctttatgcccgatcgttgggcgccgcccgtgtgatctgggttggattcgcaccgggcttaaaccctgcacgcgagccaccactcagatctcggtccgttgactggtcccttggtttgattcgctgagaagccacatgaggaaatacctcgacatcgggcgattaaataaatttgccagggggatgctccagttttggttgatctattattaattctctggacaagattccattcccccaaaaataatgcgtatgcgtctttgccagttgccatattggtccccttttccctttttaattgtgtgttttggcccttctcatattgctgttaataaattgctaggcgatgcgttcagtattctgcacag

SEQ ID NO: 56545 - DNA, 235 bp, Zea mays
  unsure (1)..(235): unsure at all n locations
  Clone ID: MRT4577_15155C.1
tntnnttttttgagcacaatatgaaggctaattatatatccatgtactgtcccaagttacaaaatcctaacttatgctgatgatatatgtagagtcttgatgtcatatctatttaggtcgtcatatgaggttaatataagcatcaacacaacagttgtatgtaacaggcatgactgaagggttaaggtaggatcgataacataaggtgagggtacatttaagcaatccttttagc

SEQ ID NO: 56546 - DNA, 358 bp, Zea mays
  Clone ID: MRT4577_151560C.1
ggggggacgaagctacatgccgttactatcacgaaccataattaggactatgttcgacagcttaaacaaagaagcaggtgtaaactgcaaggggggctgatgccatgcccatcgacctcacagcatttagagcacactgggtgagagcgcaatgcaacagaccatgcccatttgcacatgcttgggaatggtgagagagtacacactctgcagctgagaggatcggaaaatcgacgattggctcgggatcttgctgcattcagagcgcacctggtagaagagcatgatcgccagcttcttgggagactcaatgttggttgatccaacgggtcgaggccatagcggcttgtgtggtaaa

SEQ ID NO: 56547 - DNA, 458 bp, Zea mays
  Clone ID: MRT4577_151561C.1
ctggtttttttttttttttttttttttttttttttttttttttttttttttttttttttttttcgggaaagaaacttcttatttatgggggggccccatacctcactccaaaaaactttattttggaattccaaccaagaaccaatctaaaagagaggggggcggcaaggatgtgttgttggcaggaggcccctgggcctgccaaagcaagttggccaaagggcaacaattgttgtagttgaaagagggtggcggggttagccccaaactgctggtagaaaggcaccaactgttgctgggtcaagaaggaagcccggtttgctgcagctagctggctaaatgggggtagtatttgctgctgcaaataagcggcggggttcagggcggcccattggttaaatggaagaagttgttgttgctgggcgtgggcagtacctagctggctgaatggaaatagt

SEQ ID NO: 56548 - DNA, 513 bp, Zea mays
  Clone ID: MRT4577_151562C.1
tttcccttttatcaaaacacttctatacaccctggctccgggcctgcggctgagtcctataacaacgcataatgttctggaaggacttatcttcttttgtgacctttgccatcacataaatggcacacattaataactggtccagatgtctgtccatcataagttcaggacactgaattatggagaattcaaagcaggtccagatttttttcctcaattcatctgaaatatctagtttggcacagagatcccgaaggcggacagctgctaaatggtatacctttctaaagaaaagcgataaagagctggtcttcctgggtctattactactgctggttacagactggccttgcttctgctgttggccacctggggaaatctgttgaatggccacttgaccagggacttgcaaagttgttcctgtcacctgttgagagctcagacttccagccagggcctgagcactgaggggctggatggagcctgtcacagcttgtgcctgccccccacatt

SEQ ID NO: 56549 - DNA, 380 bp, Zea mays
  Clone ID: MRT4577_151563C.1
tgcctctgtcatgaccctctcaattaccaagggcggttctacgaatcatacgccgtgttaccttacccgctatttcccaagcgactatctctgggacaccgttgccctactatgccacccctaaaccttaacgcgcaaccgaaagctagaggtgatacactcctggtggaccattctgcaggcgcttctcttcgtgttcccgtagatcctgtgctaataacggcgataagttacgctagtcggcgtggtataaggccagcacgcatatcttctcggaggtcgtgctctactacctgaggaaccctaaccttgcgcacgcgcagagcatacttgccatctggacatgacaggaggtgctcatgggctttatgcagcgctac

SEQ ID NO: 56550 - DNA, 144 bp, Zea mays
  unsure (1)..(144): unsure at all n locations
  Clone ID: MRT4577_151564C.1
ccctgtcagtantcgtacggagttcngngtncancancgcgtccgatagttcnatgaggcagcatgctcttgagcttatatgtacagatgaangtgatactcatctcagcgcagagatgtatatcagcatggacagtactgttg

SEQ ID NO: 56551 - DNA, 366 bp, Zea mays
  Clone ID: MRT4577_151565C.1
ctaccagctatgccactaccacacctgcacccgttttaaaacctaggcccctccctctacgtcggccatgttcttctctaggagctcccccacgccgatggccaaatgtgcctgactctaccaacgctcttctcgaagcgtcaccccgctgatctgcactccgtggagaacaacctcctctctgcctaccaccacctcctgttgctcctcgtcataaacgagcccgactaccaacagatccagaccatcctcttcgtatacatccactccccgttgatcatcttctcagaattctattaccctatcattgctaagaactatctatcaaagtcggacatataaaccttggacaattctgaacactac

SEQ ID NO: 56552 - DNA, 274 bp, Zea mays
  unsure (1)..(274): unsure at all n locations
  Clone ID: MRT4577_151566C.1
tggagtaattttgtgncagcaggcgancgaaccacttgtctacagaaagagggactgggaagaatattgcgctgcaacaatcatcccgaaccagctggtaaatctggaaaggtaggttgaaaatgctgggacagcttttctagctcttcgaacaagaggtcaaccgagttatatcagttgaggagtaagcacaggaactaaatcttgtgccgacacaatacctccaatgtgtcaagactggatcaagaaaattgggtcggtaaagccttaaact

SEQ ID NO: 56553 - DNA, 407 bp, Zea mays
  Clone ID: MRT4577_151567C.1
ggccccttttctgaggttttttttttttcttttttttttttttttttttttttctcttttttttttttttttttggtttttttacggacaaaaaacgaagccccttttttccttgcattatttaattttgcccccggccccgctggcaaaaaccaggttttacaggtgtaggattattaggaagcaatttttggaacaaggaaaaatttttctttccggcaaagggtcccccgaagggacttccccatggccccccctgctggaaagcccgaaacctcccaaaaaaaaggggccatgaaatgggccagcatagtttcaagggcgcggaatccgaagttcttcccggggcaattcctccggggcgggcccaaggggaagacccggaggtccttcgcttttttggggac

SEQ ID NO: 56554 - DNA, 719 bp, Zea mays
  Clone ID: MRT4577_151568C.1
gccggccggttctcgctcgatcccgtggactcccgattggctcctcagcaacttccatacccccagcgtgaaggagccgaagtgagcatagcacccggacagcctgtcggatccgccgccggcaagatgaatgacgccgatgtgtccaagaagatccagcatatggtgcggttcatccgtcaagaggacgacgagaacggcatccagatctccgtctccgccgaggaggaattcaacattgataaggtgcatcttgttgatcctgaaaatcaataagatcaggcaatagtatgaacgctaagagaagtaggctgaagcacgtcaagaaaattggaggactctatgcaggtgaatgcttctcgcatcaaaattcttcgagctcacgatgatctatacaacaaagatgaaagacgatgccatgaaggaacttctccttgtcagtacacataccactcgtgaatacaagaacctttgtgaaagacctaatcattcaaggattgctccgtttgaaagagccagcattattgctccgctgctcgcaaggatgatcaccatcatgtgtatatcagtgctgcattctccaaatgcatgagtatgcatcaacagcagatgtacatgaaccagagatatttgttgatcatgatgtatacctgccacctgccccaagacatcatgatgctcatggccagatttgctctggaggtattgtattggcttct

SEQ ID NO: 56555 - DNA, 227 bp, Zea mays
  unsure (1)..(227): unsure at all n locations
  Clone ID: MRT4577_151569C.1
caagagcaaacaacgcacgcacgcgacacgcaaactagtaatccgcctccagcagtacaggtctgaggaatattgtcnaagcaagaaagtaacacaacttgngtgaagtgcacacacnnacagggangcaccatcttctcgccgaataagagaaagcccgatttgcacaagagagcggcaacgtttcctagttccacatgaggacatgaacatttgtcggttgaaag

SEQ ID NO: 56556 - DNA, 686 bp, Zea mays
  Clone ID: MRT4577_15156C.1
tttttttttttttttttcctctgaatatgatttgattgtgtgcctggacagtcacaaaagatagcaccatgaacaacaggaagtgagactgctgggccgtcacggacggtccatgcagttcgatccgaagaagtgaagtaaaaaaaaaagtacaaggactttttcagtgacgaatcccaacgacctccatcatctcttcaccattcccccagaaagaaaactaggtccaagtttctccggaaaccgtcccccccttacaggatcttcacgcagttgagagcgttgatgttaatgaggccgaactgaggagcaccggcatcgcagcagaaagcaccgccaccattctggttgagaatggtcccaacgatgctgatgaggcccaagaccccgtggacctcctggatgttgacctggacgcggtcgtcactgcagaccgaaccgctagagccttctcctccgtgggaaggcgtcttgcctccacgggcctccacctgtgtggtcgccatgtcagtgggagcagccactgcaacggaggccagagcgagagtgaagatggcggtgaacttcatggtgaagatggggatgggatggaagctgggtgttgcaaaagagctgtttgaagtggtttaaaaggtaaagggaggactttgagagaatagtgtggaagaagcttgctgctcgtgccg

SEQ ID NO: 56557 - DNA, 573 bp, Zea mays
  Clone ID: MRT4577_151570C.1
ggccgcttttttttttttttttttcctttttttttttttttttttttttttttttttttttttttttttttttttttttttttttttttttttttttttttggaaacggaaacaaccaactcccacgacccaagagcgaaaccctggggacaaaagcccccccccattcccacaaaaagggggaaaacggccaaaaccccccccacgggttaaggccacccaccccgggggggggaaacaggcacccacaaaaccccggtacaaacgggggaacccctcccaaacccccaaaaaaaaggcctggggccgggccccccccgaaaaagctaaaaaacccagggccctaattttattactccccggaaggcccaggcaggcattcctcccccggccccccacaggacccccaaacactaaaaaaaagggggggcaaaaaacgggggggcggaccttgaccgggagggcaaccccccccttgtggggaaaggcgggggcccggttaatgaaagacccccccccgggggccccgggggcaactttttggaggcaacccaaaatgggccgggggccggg

SEQ ID NO: 56558 - DNA, 289 bp, Zea mays
  unsure (1)..(289): unsure at all n locations
  Clone ID: MRT4577_151571C.1
cgnntccgcttctggttttggttttccctccacccaaacctctttcaannttccaccatttagacgacnngacgaagagcgagcgcnncgataagaaatctgcgcctgtgcacaanncgacgaagcnggaagggggtacccgtacctnntggagaatcccaagnnnaagctaannngaaatgggtcagccnnncagtttgcnnatccgaagcatggggcttgctatgnnntcaactgcnnaactattgggcaacactttatcctgnngtggtgaaatgggttgccaagc

SEQ ID NO: 56559 - DNA, 533 bp, Zea mays
  Clone ID: MRT4577_151572C.1
gggggtgtttttttttttttttttttaataacatcatatttaatgtaatatagataagtacaattcaatgtctcataaataagcattgtcaaataaatcatacataagtgtactctaaatccaaattaaaatactaactgaaaaacttatggtgggggggttgcgctaacattgaatctaactaagcatactagaatagaaggcgtgttatcgtcgtgccctcgtcagaaagcgttcgttacaaatgtagagctttagctgaattcatcagacatccatcatgacacatcatggccaggggacctgtaggtaaacatcttgctagaatggtagctatacgattcgaacaataccattccacatcattaccctgtttatatcttgtagtccctgttaatcgattgctcgacttcatcagttgacatttgatctatatggttttccaacacatgcttaccaagaattacttcagatgcttcaatcctctttgctagaacatgttgggtcacttggaagtgtttcctacatccaca

SEQ ID NO: 56560 - DNA, 793 bp, Zea mays
  unsure (1)..(793): unsure at all n locations
  Clone ID: MRT4577_151573C.1
agcccattgctctcttgtttggcgtcatggttcgtccgaaccgatagttacaacgaagagcgatcgacgattgagggctgcgtggcattcctgcggaagttctgaacagagctttgacattgagacatgatacaggcttgtcttccatgaatggcaagcagatggcgaggaaatcgctggtctgtaggctgctttaaatttaatgttgatggtgcattaatgctgtttcaggacgtgcaggcattggagtcatcatacgagcatacagtacgagactggaccagaaatgtggagctagcagtttggatggccatcttccatgcgcgggatcgcatcgcatgccgaggaggtcgaggctacggtgtgccattccagctggggacggcgtggtataggacaagggtcatacttgatacttgttccttcaacagccgctgaaccaggtatcaagtctggcaccaaatgatcagagaggcgaaggaagcttggctagactatagatggccatttgacactaacatgatggtcagcccaatcacgacacgaaaaagcacggttcagacacgacctggcctgactagtagtgccggcacgaacacgacacgattacattntctattttaaaaataatagtttacatatatttagtataagaattcaacatataatacaacaaaatcgtagtcgtaatggctagatgagtgcgtttaagtctttcatacactagattgnnngtgtcaaacccccgcagctacacattttttgctgacgggngtcgtgccctgggtcgcta

SEQ ID NO: 56561 - DNA, 499 bp, Zea mays
  unsure (1)..(499): unsure at all n locations
  Clone ID: MRT4577_151574C.1
aataacatcatatttaatataatatagataagtacaattcaatgtctcgtaaataagcattgtcaaataaatcatacataagtgtactctaaatccaaattaaaatactaactgaaaaacttatcatcagccgtttgcgctaacattgaatctaactaagcatactagaatagaaggcgtgctatcaccgcgcccccgtcagaaagcgttcgttacagatgcagagctttagctggattcatcagacatccatcatgacacagcatggccagggacccgtaggtaaacatcctggtagaatggtagctatatgattcaaacaataccatttcacatcattaccctgattgtatcttgtagtccctccaaaataaaactatttggctcatagtgtaagggtgcagttgactccctgttaatcgattgctagacttcatcagttgacatttgatctacantggttttccaacacatgcttaccaagaattactttagatgc

SEQ ID NO: 56562 - DNA, 312 bp, Zea mays
  unsure (1)..(312): unsure at all n locations
  Clone ID: MRT4577_151575C.1
gagcgctttgaggtacaagggctgcagcctaatggtgaggagatgaccctcaaacagttcctcgactattttagtacagagcacagattagagatcaccatgctgtcccagggcgtgtccatactctattccttcttcatgccagctgccaagctacaatgaacggttggatcagccgatgacagagattgtgagccgtatgtcgaagcgaaagctgggtcgccacgtgcgggcgctggtgcttgacttgtggtgtggtgaggagancggcgatgatgtcgatgttccctatatccgatacaccaggcgatg

SEQ ID NO: 56563 - DNA, 219 bp, Zea mays
  Clone ID: MRT4577_151576C.1
agccttccatcgttcgcgcgggagacgtaaattgcggcttcggaagcggcagcagcggcggcaacacccgtgactccctcagaggggaccgtgattcccatccacaagctggaggagtggagcattcaaatcgaggaggcccacaggaccaagaaaatgggggcgaacgacttcactggaacattgtgtgcttccttccagggcattgcctcaattttt

SEQ ID NO: 56564 - DNA, 279 bp, Zea mays
  Clone ID: MRT4577_151577C.1
acgacatagatagcgcactattgtaccattaattgccagccaaatggttttcgctaaggataggcatgcttctctctgggggtgactatacggcgagcatattacgtaaatgctcacaagctactacagcttcccttattagctcataattctcaccatcgatgtcttcagtatgtgaaaatccaatgcttctaccctacaggatccaacatgcaatcacagcatgcatcttacctttatcacgcttgttcctccaacagtcatggatcctattacagc

SEQ ID NO: 56565 - DNA, 173 bp, Zea mays
  unsure (1)..(173): unsure at all n locations
  Clone ID: MRT4577_151578C.1
ggggcgacggggcactttaggagaaagggacagaaatctatccccctcacaaaatgtgaattgttcgcttactaacgtacaaactgaattcatatggtgaagaggttcacaaatcatttactacttcgngggcttaatttcatccaatcatgctggaagatctttgttcttct

SEQ ID NO: 56566 - DNA, 413 bp, Zea mays
  Clone ID: MRT4577_151579C.1
cgggccgaccgaacgtgctgggtttattggaaatatacaagcgtccccaaagattgtatcccaaaaacgaggaaacccctgggggtgagatctacggctagctcaaacggctaacttaaggattaaagaaaaactaccatcctggacgggactaactactaaaaaagctttttttttattcaaaaagggaaaagggaaaaatgccatcacacaaagggcccctcgccattcaaatcaaaataagccccataccgtccgtgctcaggcaaaaaacaaccttaacggggctggaagcgccttcctgaacagggactaccccaatgtgcataaacaggttggttctagaataaccaggcgtccaacaattggtccgcaaagtaggaacctttttgggaagaattcccaggttcccc

SEQ ID NO: 56567 - DNA, 989 bp, Zea mays
  Clone ID: MRT4577_15157C.1
cagaaacccgcaggcgaggacgaggagcccgatgcagccaattgcggtaccaaacgcaattgcaaacttatggcttttggacattgccggaggcagtgagctgttgaggttgtatggcggcattggggcagtcccatagcaatctctctcgggtgttggtgccgcagatgagaggattcccaactatgttgaatgttcttgccaaagatcccggcactggaccactcagactattatatgacaagtctaggaaaacgagctgggacaaattagctgatgctgaagggaatgggccagacagggtgttgttgttgagcctcaagtactgcaggctctcaaggttgcctacagaagcggggattccgccgtacaggtggttgctggagagatcaagtgtcttgagctttgtaagcttgccaatctctgctgggattgggccggtgatgttgttgttctgcatgagaacagtctcaaggttggtcaggttccctatgctcggggagagcaagccagagaggttctgtcctgggacctccagtccggtgacgaaattctctggcgagcagctgacggtggtccagctgcagggatccacggagtcctggtcccagttcttgaggacgccacgggggtccttgagcatgctcttgatcgtcatcagagcttgcacttcagggttgacgcccttgggggagaggaaagcgctggaagggggagagatgatgagcagcagcagcagcaagagtagcaccagggagggtggagaagttggaggcgccgcctccattgccgaagggaggcagagccgcagaggtgggcggagccaagggaagagaagagaagagaacgaggtggaagggtggcggttccaagggcaagggaggagatggtgtgcgcctgcgtcctgcctgcgtgcaatgtgtcctcagacatggaacaagcatgaggccaagaaagacatcaaacgcagagcaggtgtagtctgcagc

SEQ ID NO: 56568 - DNA, 1366 bp, Zea mays
  Clone ID: MRT4577_151580C.1
catctccgttgactcgagcccggccgggatcgcatcgcatcgatcctcccatctgcgcacccgcaagcctattcgccgcacctcctcaggtgaccgggaagatgatgccgttgagccaaaccgacttctcgccgtcgcagttcacctcctcccagaatgccgccgccgactccaccacgccttccaagatgcgcggcgcgtccagcaccatgccgctcaccgtgaagcaggtcgtcgacgcgcagcagtctggcacgggcgagaagggcgctccgttcatcgtcaatggcgtcgagatggctaacattcgacttgtggggatggtcaatgccaaggtggagcggacgaccgatgtgaccttcacgctcgacgatggcaccggccgcctcgatttcatcagatgggtgaatgatgcttcagattcttttgaaactgctgctattcagaatggtatgtacattgcggtcattggaagcctcaagggactgcaagagaggaagcgtgctactgctttctcaatcaggcctataaccgatttcaatgaggttacgctgcatttcattcagtgtgttcggatgcatatagagaacactgaattaaaggctggcagtcctgcacgaatcagttcttctatgggagtgtcattctcaaatggattcagtgaatcaagcacaccgacatctttgaaatccagtcccgcaccggtgaccagcgggtcatccgatactgatctgcacacgcaggtcctgaatttttttaatgaaccagcgaacctcgagagtgagcatggggtgcacgttgatgaagtactcaagcggttcaaacttttgccgaagaagcagatcacggatgctattgattacaatatggactcggggcgtctttactcaacaattgatgaattccactacaaggcaacttaaccgatttgaaggtcagcctgctggaaatggcagaggactaagtatcacttgtactaaaccaaagtctggaaatgtcatgttgtgtcatgaaatgcatggttggtttatggaaacatttatatcttgtatcaactagttgatttgtatctcgtgtcaacttaatgactgagccaagaaaaggaagatgtagaggcagacagacatttgtagattggctgatagctgattcgggtagctggtccaatcgcaatctggggcccaataattcagatgcaaaagcagaaagatatttcactgtcgtttcttttgatgcaaaagaaattaaattataaggaaatgaagactgttccattatttcccattaaaatatgcagtcatgatgtatttcatagttttaaatttaataaaagcgtgtacatttatccatttaaaaaaaaaaaaaa

SEQ ID NO: 56569 - DNA, 643 bp, Zea mays
  Clone ID: MRT4577_151581C.1
ctctcatcgcatcgcatcgatcctcccatctgcgcacccgcaagcctattcgccgcacctcctcaggtgaccgggaagatgatgccgttgagccaaaccgacttctcgccgtcgcagttcacctcctcccagaatgccgccgccgactccaccacgccttccaagatgcgcggcgcgtccagcaccatgccgctcaccgtgaagcaggtcgtcgacgcgcagcagtctggcacgggcgagaagggcgctccgttcatcgtcaatggcgtcgagatggctaacattcgacttgtggggatggtcaatgccaaggtggagcggacgaccgatgtgaccttcacgctcgacgatggcaccggccgcctcgatttcatcagatgggtgaatgatgcttcagattcttttgaaactgctgctattcagtaagtataaactataatgtatacattgtccctaaagcattccagtagtaccttttctgtaggaaagtcaccatgcttttgtgcggatgtacattggttatcaaggaatggtatgtacattgcggtcattggaagcctcaagggactgcaagagaggaagcgtgctactgctttctcaatcaggcctataaccgatttcaatgaggttacgctgcatttca

SEQ ID NO: 56570 - DNA, 1413 bp, Zea mays
  unsure (1)..(1413): unsure at all n locations
  Clone ID: MRT4577_151582C.1
tcgcatcgcatcgatcctcccatctgcgcacccgcaagcctattcgccgcacctcctcaggtgaccgggaagatgatgccgttgagccaaaccgacttctcgccgtcgcagttcacctcctcccagaatgccgccgccgactccaccacgccttccaaggtcctctgagactcccttcttttgttttcttcgacctcaaaccgttggcccccttacccacggactgagtgttcggtggatctgcagatgcgcggcgcgtccagcaccatgccgctcaccgtgaagcaggtcgtcgacgcgcagcagtctggcacgggcgacaagggcgctccgttcatcgtcaatggcgtcgagatggctaacgtaccgataatcctcttgttcgtcctttggtccgttgatatgcagatgttctcggcgttaattcatctgccgcggttcccttttcagattcgacttgtggggatggtcaatgccaaggtggagcggacgaccgatgtgaccttcacgctcgacgatggcaccggccgcctcgatttcatcagatggtgagcctactgcaacaatgcttgtttggttctctcatagtcaatcctatcaccgtttatttactctaaacatcaaagcgtgacatccacatcgggttataaccagaaaaccacactggtgcctgtgaagttcttttcagttctccccaaatgtactcatggtgcgcttcagtgaagttctttttccccttttaaaaagaaatggctggcttgccaggaatatactgataaggagatctttgtcttgttttatacataacaaaatatagtcataatcctacattcaaccaagttatctatggcatatcatgttggttgtctgtgataagtaataggttcccttgcgcacagttatgttatttatgtttcttgtgtttcacagggtgaatgatgcttcagattcttttgaaactgctgctattcagtaagtataaactataatgtatacattgtccctaaagcattccagtagtaccttttctgtaggaaagtcaccatgcttttgtgcggatgtacattggttatcaaggaatggttcgtacattgcggtcattggaagcctcaagggactgcaagagaggaagcgtgctactgctttctcaatcaggtaccctagcagtaacttttgtttaagctgaacgattcttgcaatacaaataatatattgattttctttcaggcctataaccgatttcaatgaggttacgctgcatttcattcagtgtgttcggatgcatatagagaacactgaattaaaggtgacacccttttctgtactaaggtcattgaaatacgaccattctatctttgttttacaaggcttctttctggtttatctcatangctggcagtcctgcacgaatca

SEQ ID NO: 56571 - DNA, 868 bp, Zea mays
  Clone ID: MRT4577_151583C.1
cattgggtacctcgaggccggccggggtgaactttttcttaatcaatcgatcaatcacgcgcacaagaaccggcaataaatcgcggaattcccaacgccgcaccttcaccgccgggctccccagtccaatccaacccaaccccagtccggcgacggttccgggcagcgcgcgatcggatcgtcgcgggttcggcttctcgtcgaacggcgcggattcctgcccccgatcggagggcgtcggctgcggcgcctcggcgtctgatctgctgcggtcggcttcttcttgggagaggagtgggatggacggggaagcgatccggatgggtggcggcaacttggcgcccgcctacctctccggcgccgccaccgccaccgccatcaccatgcaggatccgaaccagaaccagaaccagaaccagaaccagaaccaaagccagttcctgttcagcgccaactccacggcgctgcagctgttcggaagcgccgcggtccccacggttggtcctgctggttatataaattacactggaaacacccaccttcctgttatgaaccaagcaagtacttcaaacatcggcgcagggaatgagaacttgctgaagcttcaggtgccattgagcgactatcaccaacagagtgctggccggttagcacgtgttggcaatccgggtgctgtatcgactggtctaaggctgtcttacgaggacgatgagcgcaattcgtccatcacatctggcagcggtagcatggcctcgttgcctgccacgatgtcctgtgtcgatggtttcatggctgaactgggacagggaagcaagagattaacttctacttgagaccccaggcagccaaatctgcaagcggatgaagg

SEQ ID NO: 56572 - DNA, 224 bp, Zea mays
  Clone ID: MRT4577_151584C.1
gctggaaggaaatgtactcaatatttcagtatcggtccagatcatacataatccatttacagataatctatagtattatatacccttgcagactattccagactggttccatatttcatcatcggtggcacagtgctgaaccttgatcgccagatatgcatatttttgaatatttatacatatgttctggggggaggggatgttttatatcgtatcatatattt

SEQ ID NO: 56573 - DNA, 689 bp, Zea mays
  unsure (1)..(689): unsure at all n locations
  Clone ID: MRT4577_151585C.1
aattcggcacgaggccagccttcgagaggtcgccgccgccggtcgctgctccgccgactcggggatgccaccggcggtagcgcccgcctcgccgcgccaagaccctagcggctccagtctttccgccgcagccgccgcggcttccatggcgaacccggtcctagggcttggcctcgcgccaccgggcgctgagccctccgccggaacgccaccgtcttcacgccgcgcgccgcgcttggccaagcggcgccacgcgcccgcctcctcccgtttccgcgcggcgcaggcctcagtcggaacatggaacccgtttggcggtggcggcggtacggatggacagaatcgaggttttgtgtttggtgctgcttcgccagtgagccagcagccttcggagccagcagtggagatatcttcatccagtgaggcgcccttcgtgtttcagagtgtgagggagaaccttcctcggtttgaggagggattgtctggttcatcaatgctccctgataagatggggaagctgaacctgcgcacataggtgaggttggcgatggtctcggtcaggggagggatcgaaagaagggaagttcncatttgggggttgaatatctgggtttgttttctaacaaggaaagatatgggctccaggagaagcttacacagtttgaatttaggccacagagaacccttgc

SEQ ID NO: 56574 - DNA, 396 bp, Zea mays
  unsure (1)..(396): unsure at all n locations
  Clone ID: MRT4577_151586C.1
gtctctccccaagatgctcgcagcaccactgggtaaaacccactccccagtgcccgtcccgtccaattgagttccgacggctaggtacaccgcttacacccaagaaggccacttggggtcccaacccctgtggtccctaccagaactgagttcaccgctttggaaagtaccatacccctggaaaataagtaatataccgagagtattaaccctcaccataccttaccgagagcaagggccctcacaaaggcattactaattttaagtaatatacctattagggtacctggcaaaaccaagaggtttcccaaggaagaacttaagtgggtggcctggcttggcaccttccncaaaccaagaagaggtgccattaaattggcgacctaaaccggtcac

SEQ ID NO: 56575 - DNA, 300 bp, Zea mays
  Clone ID: MRT4577_151587C.1
atcaggacttgtgataattaccattttttatgtggtaaaacttgagctttggaaatagaaaatatgtgtttgtgggggagggaaaaaaaaaaaaaaaaaaaaaaaaaaaaaaaaaaaatgggcggccgttttaggggttcctgctttcctgccccggccttgcgcctccttccctttctcttagggccccctatttcctttcccctggcctccgtttaccacctgctgttctggaacacccctgccgttcccccccttattttccttcccttttttccccctttagcccatttgggttat

SEQ ID NO: 56576 - DNA, 382 bp, Zea mays
  Clone ID: MRT4577_151588C.1
cgcgagtgagcaactgcacccccacatggtgccaccgtttctgacccttttatccccgtccctggagggcccgccaacggcggcttggctgcacaggtcctctacccaaagcccgtactccgcacccccggtgcctccactccctcgcgaggcaactccttacaagttccggattgacagccccaaaccggcaccggcaaggaaaaacaccaaaacagcagcctagccccttactgtcggagttcccgggggcctgacccaccgagcggtcctcggcatcattcggggcgtccgctccctcgagctttacgatgcttcgagtccgaattcccgccacaaccaacaacatcgggggccccgcccgctcatttccaacttacca

SEQ ID NO: 56577 - DNA, 285 bp, Zea mays
  Clone ID: MRT4577_151589C.1
ctacctcggcatggggctgctcgtggtgtccgccggcggcacgagcccgactggcctgcccttcggcgcggaccagttcgacgagaggaaagagcagcacagtaagcagggaggcctcgcgcgcttctactgcgcgcagggcatcagcagctaccttgccacactcgtggtcaacatcgtcaacgccaggacgaggcgacacggtgggtctgcgggctgggtcaccgacgacatcaacgccgggaggatcgactacttctactatgccatggcggtgctctctgg

SEQ ID NO: 56578 - DNA, 311 bp, Zea mays
  unsure (1)..(311): unsure at all n locations
  Clone ID: MRT4577_15158C.1
aggaccttttgtacctcatgcagttagggaacccgtccgtcgacaacgggcccaaggacggcgacgacgggcccgtcagaaccctggcgtacggcgtgtcggtgtacaacatgacgactggcgagtggcgagctgagcncttctctacccctgtggtgccggggtttgcgcagggcgcgggggtagggacccgggtggccgtgctgggctggctgggacccgcacaccttagagcccgtgggggacgatcacatactgtacgccgctaaaaggcgagggtgccgacccgatcctatttattaggggcacta

SEQ ID NO: 56579 - DNA, 286 bp, Zea mays
  Clone ID: MRT4577_151590C.1
cacatttagttagatgtgaagcatttaattcattgggagctaggtcagctgccagatgagttgcaaaaacagaaaaaaacctacccattgaataacttctttgaatttggagataagttttcttttacttaaaatgaatatattaattctagaggggcaaaactagcaatgcttatgcaagtgacggtgctgctcttgttccacccccacccagatggtctctgagtgcgccgtcctgggcagggcacacggtctggagctgagagggtggagcaagagtgcactg

SEQ ID NO: 56580 - DNA, 166 bp, Zea mays
  Clone ID: MRT4577_151591C.1
tttgaggtggagtagatacatctgaattaggctcgagaggcggagaagccatcctcagctactgctctatcctaattgctcgcgatgttaggtagaaggtttacctggcgctgtacgctgcgggcttcgttgcgggtgtcctcggcgtctacgccgtcttcaagtt

SEQ ID NO: 56581 - DNA, 426 bp, Zea mays
  Clone ID: MRT4577_151592C.1
gcggctgaaaattcgatggagggaaacgccttggctctcgggatgcccgcggatgctacttgtgcgggcatgcgttgcaactctggcaccgattccgttccttccttgcggcggcggcggaaaaacaggagcttctccatccttcccttcgttcgtgctcttcttcttgttattccgtttatcggtctggcgcagaaagaaacaagagatgcgatctagtctgctaccggagtccccgtacgtacccagtgctccgcggcttcggcaggggtgctgctggctgcagacgctgatctgtatccacccggcaaccgccgtccgggttcttcattgtaaccggggaagaatttggggctggtggcttgtggtttcaatgggcttcaccagaaaccagaacctttttggcaatttccttggggttcaaaa

SEQ ID NO: 56582 - DNA, 644 bp, Zea mays
  Clone ID: MRT4577_151593C.1
tacatcttccttgattagttttgtaaggcttaatcagcgatggagtactcgccgaagctagcagtagtggtgctcttagctctcgcgtccgccatggcggtcacgggccagaactcggagcaggacttcgtggacgcccacaacgcggcgcgcgccgacgtgggccttggggaggtgacatgggacgctacggtggcagcctttgcgcaggactacgcggatcagcgccgcggcgactgccagctgatccatactcctgatggccggccgtacggggagaacctctacggaggcggcggcggcgggaccgagtggacggcgacggacgccgtgaattcgtgggtgtcggagaagcagtactacgaccacgacagcaacacctgctcggcgccggagggtgagtcgtgcgggcactacacgcaggtggtgtggcgcgactcgacggccatcggttgcgcccgcgtcgtctgcgacagcggcgacggtgtgttcatcatctgcagctacaacccgccaggcaacttccccggggtgagcccgtactaggctatatgcatcatgcatgcacgcatgcgagcgtgcatgtacgtacgtagcagtcgtattgcataaataaaatgattaagctgggatgaccaaagtgt

SEQ ID NO: 56583 - DNA, 356 bp, Zea mays
  Clone ID: MRT4577_151594C.1
gaggtcttgcaacttctcttttgagcagactaagatcaagttgtcctagtcaagtttggatacaacagggacttgtgaagcagcgtacaaacttgacactctacaggtatgaatccaactgaagacaatgatcatggtagtaggcacttgcttcagcaggacaccctcattagggttttctttcctgtccaaaactaaaggtctggtgcaggctccttgaggatggatcgatcaactttgatttcagcagtatgtccccatccgtatgcatatctgcctgcaggcgtaatgattttgttcgaaatgggaatacttgaggcctatagcaaagaagcccaattttccaacaacaatat

SEQ ID NO: 56584 - DNA, 435 bp, Zea mays
  Clone ID: MRT4577_151595C.1
gccaacaaaatgcaagaacattacctatttcccggggggcaaaacattagaacaacattggggcaatatgccaaaacaaggagaagcgcctagaaaaaaaatttcccaaacacaaaataaactcccgggccaaggcttgcataaggccccgggaataacatctgctatgggagcaaacaaggggaccaacacccgcgggacaagccaaaaacaactgggcaggtagcaaagaacaaacgagccccctgagaaaacctgggaggggtgcctaccttcaaaggaagaatcccagtaaccctcaaaaaaccgaaagaccccgatgcaaaaaaaccaacggagagggggaaaaacaatgatggggcagctgggggaacaacaaattccatggaaccaccgcgattcgactgaaccataaggagaaaagaccattccaac

SEQ ID NO: 56585 - DNA, 375 bp, Zea mays
  Clone ID: MRT4577_151596C.1
acccgagcgacacaatgagggaggagcaagatgccctcgctgtcctgactctcgctgcgagcgccacctccacgcatacaagcggggggtgcggcagacagccacagccgacggatcatctaccgccgccggtgcatatgccacaatccggttcacctgacagctgcggtgcatatcccaccgacagaacaactgccgccaccggaccaactgccaccgccgatccatgagccgcagacggaacatctgccgccgccaccatgccactaccatactaaaccgcaccggcctgagcctcatccacagccacacccatgcccgcgccaacagccgcatccaatcccgcgccagctgcaggaaaccagcggcaaaggc

SEQ ID NO: 56586 - DNA, 337 bp, Zea mays
  Clone ID: MRT4577_151597C.1
acgcccacgcgttcgctgcaacagcagttaccattcatgttcaacccaagggccattacgattccacccatgttcttacagcaacaagtttgttggtgctgcattctacatagaaatatttgtgatgtaccgaataatgagttgacatgccatcgcgtgtgactcattattaacaataaaacaagtttgctcttattatcttttaaaaaaatacaactgacaccgacagaacatgtgccgacaacggttcaatctgccgtcgtcaccatgccactactctacttaaccgtcccggccttaacctcattcttcagtcacacccatgcccgttgccaac

SEQ ID NO: 56587 - DNA, 458 bp, Zea mays
  Clone ID: MRT4577_151598C.1
caaacagcccatccgtgctgtattcgcaaactggatcacgcaaagttgacctggacatatacacaaacgcttgttgcctctccacaaccatctacatattgtcctaacaaagacggatagaccaaaagccacacatatgtacagggcatggaggcgccgtagccagaccccaaatcctataataagtcgtggccctgaatcgtctgctatacaaggaccctcgatggtcgcttgcctgcctgcttctcaatctcgacagttagcgatgagctactactgaactatgattcctacataaaagactgtccctgaacgctagctatactataccggcatgctggcttatagatctctggagcgcatacctgaccgccgtgatggtgtacttcaccgagaggaacacacactccatccctatgattgtcttgagagaccaagacagctccatctcatccgtc

SEQ ID NO: 56588 - DNA, 260 bp, Zea mays
  Clone ID: MRT4577_151599C.1
ggcctttgtcgcttgtgtctccctttcttccggagcgaaaccaaatatcggccagagcgctagcgtctacgagatggtgctgcaaaacaacatttactcactcgatccaccgggcgagcttgagaatctattgctcaagatgaagcggctagcccattccaacaacttcttcttcatggatgttaagtgccagcgctgtttaatcataaccactgtgtacagccactcccatactgggggggtgtgcccaggctttcaaa

SEQ ID NO: 56589 - DNA, 1037 bp, Zea mays
  Clone ID: MRT4577_15159C.1
cgggtccgcccacgcgtccggtggagtgaaagtaaacgtggaggtccgcttaccgtcgacgtcgaaaaggatctgccggtttctacggtgcctccaccagaacaggaatccggcagcgagggagaggatgctgatgcaaccaattgctgcaccgaatgcaactgcaacaaacttgtggcttttggattttgcctgtggcggagcaccctgcgagctattgagcttgtaggacatcggcattggggcagtcccgtagcaatcttcctcggtgttggtgccgcagatgagaggattcccaactatgttgaatgttcttgccaaagatcccggtattggaccactcaggttattatatgacaagtctaggaaaacgagctgggacaagttagctgatgctgaagggaatggaccagaaagggtgttgttgttgagcctcaagtactgcaggctctcaaggtggcctacagaagcggggattccaccgtacaggtggttgctggagagatcgagtgtcttgagctttgtaagcttgccgatctctgctgggattaggccggtgatgttgttgttctgcaggagaatagtctcaagattcgtcaggttccctatgcttggggagagcaggccagagaggttctgacctgggacctccagtccggtgacgaagttctctagcgagcagctgactgtggtccagctgcagggatccacggagtcctggtcccagttcttgagcacgccgtgggggtccttgagcgtgttcttgatcgtcatcagagcttgcacttcagggttgacgcccttgggggagaggagggcactagagctagaaggggaggagacgataagcagcagcagcaagagtagcatcacaggaggggaggggggagaagaagatggtggcgcctcctccattgccgaagggaggcagaggtgggtggagctggagccaagagaagagaagagagcgagaaagagtggcggccggtcctcctgcgtgcaatgtggtgtttcaatgaacccggcccggccggcct

SEQ ID NO: 56590 - DNA, 259 bp, Zea mays
  unsure (1)..(259): unsure at all n locations
  Clone ID: MRT4577_1515C.1
gggaaacaacgaagagacagggnngccannannggcnggngcagcaggngcnnnnggaggancananccacccnananngcccnnganccgagcnnnnacnccagancnncaggacagacancancancagnnccanccagggaaccnagnacnaanagagggngagaaaggccgcaaanagananngnngaagaggagcnngangagcgccagaacaagccnnagaagaaccccagagagaaccccagccagggaagc

SEQ ID NO: 56591 - DNA, 186 bp, Zea mays
  Clone ID: MRT4577_151600C.1
gtctgttgctagctttcttcgtcatcgagagcccgagcccgccagtccgcgccggccccgaagaaggctccaagaagcggtgaccaaggcgcagaagaagacggcaataagcgcaagcgcagccgcaaggagagctactcggtgtacgtgtacaaggtgctgaagcaggtgcaccccgacacgggc

SEQ ID NO: 56592 - DNA, 331 bp, Zea mays
  Clone ID: MRT4577_151601C.1
aatggggaacacaaaggctggtcgaaattcatttttgcttttcaaaattcagattcctaccttcaagggttcataaatatagcgggggtttagcaaagcaatatttgtttataactatcagcttttaaacccccaaccaattaaaccaagcaagtttgacaacaactaatttcacaaacccggggatacaaaacaaaacgcttgcccagggggccccaacatacaaagggggctgtttacccccagaagacttaggtcccataaaaaaaaacgtcgcaggcaaatttgccccacaattttgagaaaagacgggggcaaaacttgggacttg

SEQ ID NO: 56593 - DNA, 142 bp, Zea mays
  Clone ID: MRT4577_151602C.1
cccaattctgaattccaccacaggcttccgccaacccttccgccaacccttccgcccaccctttcgttttttcaaatttaacaccatttgcatacggtcttctttcccatgaaggcggctaactactctacctttctaatct

SEQ ID NO: 56594 - DNA, 441 bp, Zea mays
  Clone ID: MRT4577_151603C.1
aaggggccaaccccaagatccattttcacttttaaaacgttcaccaaaattaaaattttgttcggggttggacatggaactattctaattttacctctacctctttataggcaaatgatctttcctgacccgaacccctaatgtttttccttgaccccgccgcctgagcttattccatcctaaaacttaaagcggctcggtcttgggctggtaccctttccgtttcgttttattaccatttaaacaccaattcttggaggggacagggactccattcctggaattggaacccctaaatccatgttgttgaacatgaacctggggcttcatcatcaagattcaagctcacggtacgggaaggggacaggctcaactgttctggactttcacgtgtcaggaaagggctaatcctccaccctgaaaaagtttaagtgcccttgc

SEQ ID NO: 56595 - DNA, 297 bp, Zea mays
  Clone ID: MRT4577_151604C.1
acccacgagtcaacccttccgtcagctcttttctgctactgcctctggtccaaacctttctacaccgccttaacgccgtctatcgaatccgtaccgctgggaaggatcactggggagcggagccaggctgccgacccactgttttgtcgacccgatggcagcggaccagggagactggcggcggttgaggcccggttttgggatgtagaagatctgcgatgtctgcgagatcgtaccggcggttctcttcagtgcggtggatcaggctgtgttttgccggctttgcgaccattaggt

SEQ ID NO: 56596 - DNA, 581 bp, Zea mays
  unsure (1)..(581): unsure at all n locations
  Clone ID: MRT4577_151605C.1
ccggccgggaagcggcactcgcacgatcaatgaacacattgcacgtccgtgccaccacatgacagtatcgtcaacagactgggcaaccgcgcgcagaactccttctccgactgcagcttcgtgcgcctcatgcccaaggttatcaggaacgccctctccttggccaacctggacatcgcggagtgaacgggacggcgcacagatgaggagcgaaacgatgagaaagaacgtgagagaaagggaggacatgcaagacgcccgaggacagataagagggaaggagagatagggcagataagaggaagaggagaagaggagcaagatgaccttctgcatatcgagtacaagaaaagaaggagtggccagcgaaggagaagtcgtgcacagatacccccacctcgtcactccttcagaaccagaagtggtcacaagctccatctgctgccttcaaggcttactccaagggcatggaccccaccgtcgagcgcttgaagagcggggtccagaagttcaagaccgaggtctatgacaagaagcggnagctgttcgagcctctcaagtccggccagagccccaggtac

SEQ ID NO: 56597 - DNA, 747 bp, Zea mays
  unsure (1)..(747): unsure at all n locations
  Clone ID: MRT4577_151606C.1
gccggccggcatgtaaacttcttccactccagcactgaacacttgattgattcanctgcgtagctacttagctgaatcacatggattctatctagctccgtcgcgtccagtagccccgaaacgacggtgacgacgacgatcgctgtcttcctgtgtggaacgataataaggcgctgactgtgagccacctgcgtgcccctcctggtggagnactcctcctgttcaccaacgtgggtacttcgtgtccgtgcgcaantcgaagcgcttggtcaacacacccgacgccccccccaccaacttcacctactgcatcgccaaactctacgaatcctccgccttcgtagtcaagttctcccacaactacttcaaccacatgctgctgaacatcctgaagcagaacaacgtgaacgcgtaagggtgcctgttcgacaagcacgctcggcacggcgctgcccttcgtgacgctcaagcaccaccgctagcgcccagttcatgttctacaggaacccgatcgcggacatgctgctgacggaagcccagctggacctgggcctggtgcgccgctgccatggtgctccactacgactccatctccctcattctccgagccggtgccgcttcagcgcacattggccgccatgtcccacacccaataccctcgatacgtgctcctgctcctaccaaacccaacgtgcccctcccccctctgggccctcacccaccccccatcccaggtatctccaccac

SEQ ID NO: 56598 - DNA, 338 bp, Zea mays
  Clone ID: MRT4577_151607C.1
tcctgtataaggggaccaacgcgtccggtcggaaggggcagcgcatcctcgggcaccacacgaatggatcgcaattctcttcccgaacctctgcggggatgcctggtcgtcaatggtgccgtgcgccaagcccgcggcgaccagtccagtaaaaataggcgttgtgttgtcccggggacaggcgccgttcgggcaacaatgccttttgaggcatatttgactatttacgggagcgggcaaagggcaccaccttgtatggatgtaagggaggccaagctgggatcatgaagtgaacgttggtacaactcactaaagactttgtgtgtccctactgaaat

SEQ ID NO: 56599 - DNA, 281 bp, Zea mays
  Clone ID: MRT4577_151608C.1
cccatttcttaatcagtgtagccccaagaaggctggggctatttaccagggtagaaaaaggagcttacctcccacctttggtcctaagtccctgccccctccccttcacaccataactaggtaacagtttgataactagggaagaaagcagaacagttaagcagccgccacatccccgctggctgggggcctcactccaggaaggggctggactggctgtcctttccagtggcctggctccgctgtgtggatggggagatcggggccagaggcagaaccct

SEQ ID NO: 56600 - DNA, 387 bp, Zea mays
  unsure (1)..(387): unsure at all n locations
  Clone ID: MRT4577_151609C.1
gaaatcaaaacaagaattttaacgtaaaacgggcgttgggaacagacacacaaagcgtgggaaccaagggttaattaccagaagggggactactgttcgaaggaggtaaggtcgttggccccggccggtttcggccgcaacggggggggggtcaagaagaacgtggtaaaggaaaagttcagggaggtcaaaacggtttaacgcgcgggggcaaacaacaacaacaacaatggtaacaacgggggcaacggtttggtggggcgcaagacaaggttnaaaaaggaaataaacacttgaaccggcaaggtcaacaagcgcagggaaagtttcttggccagggttaactgagccgcccgggggccggaatcaacgcccgttcgggcttgc

SEQ ID NO: 56601 - DNA, 524 bp, Zea mays
  Clone ID: MRT4577_15160C.1
ccggttcgacccagcgtccgttagagtcagaatttggaactaggcagagcagcgataaatctattataactcgaccagactactattatgatatggaattaggtggagtgtacgtgttaggttcattctgtgtgaattcaggcagaagcttgaaaacgaaatgaccaatcatggtcacttgtggaaatgtaaactacttcgtagattctttattaaaaaaaaaaaaaaaaaaaaaaaaaaaaaaaaaaaaaaaaaaaaaaaaaaaaaaaaaaaaaaaaaaaaaaaaaaaaaaaaaaaaaaaaaaaaaaaaaaaaaaaaaaaaaaaaaaaaaaaaaaaaaaaaaaaaaaaaaaaaaaaaaaggggggggccttttgaagaaccaaattttacgcccccggtttggaaggataaaattttttttttgggtccccaaaattaattacaccgggccgctttttaaaacctgggtgttggaaaaacccgggggttaccaaaattaattctttttagaaaaaatcccttt

SEQ ID NO: 56602 - DNA, 1164 bp, Zea mays
  Clone ID: MRT4577_151610C.1
gtcagggctcggcgggcaacacgccagggccaggcaaacagcagcgtagagctgggcctgggcagagcccccgagccgagcagttggtttggtggcgcgcctttactgccgctgccgctcactttcccagggaggggttaattgcctccgcgggcctcgctctcgcgtcgcgtccttcggatgccgcactgaccgccaccaagtcacgcagctcagccgcgcggcgcgatgggcgagaggaggaggcgtgcgagcactgcttccctcgggggtggaggtggaggcggagctggaggtagcggtgttgcgcccgcgcggaacgaggaggacaaggccgcggagcagcctccaccgacgttgtggttcgcgctcaagcggtcgctgcactgccgctccgagctgtcggaggtccacgtgccgcgcgccaacaaggccgccggtcccgtcgtcgcgggcagcggcggcggccacctgtcgtcgttcgtcggcacgctccgccccggcacgccgggccccgcgtgggccggagccgggcacggcctgccgtgcagcggctccgtgcggggcggtgtgcgctgcacgccgccgaggtccccgtgcgtgctgctcgagaggaacggttctgtggtcagcggccaccgcgcgtcctcctgcgaggagaccgcaaaggacggcggcgccggcaagggttccggcgggctcagctgccacaggtgcggcgagcagttcagcaagtgggaggcgctggaggagcaccacctctccaggcatgcagtgacggagctggtggaaggggactcgtcgcggaagatcgtggagatcatctgccggacgagcctgctaaagtcggagagcagctgcgtccggatcgagcgggtgttcaaggtgcacaacacgcagcggacgctgtcccgcttcgaggagtaccgcgaggccgtgaagctgagggcgagcaagctgcccaagaagcacccgcgctgcctcgccgacggcaacgagctgctgcgcttccacggcgccacgctctcgtgcgcgctcggcggcggcggctcttcgtcccgcctctgcgcctccgacaagtgcgccgtgtgccgcatcatccggcacggcttctccggcaggaaggagggcaagaccggcgtgggcgtgttcaccacgtccacc

SEQ ID NO: 56603 - DNA, 967 bp, Zea mays
  Clone ID: MRT4577_151611C.1
gcgcgcgcgtgggcggatcccgcactgaccgcgaccaactcacgcagctcagccgcgcgccgcgatgggcgagaggaggaggcgtgcgagcactgcttccctcgggggtggaggtggagctggaggtagcggtgctgtgcccgcgcggaacgaggaggacaaggccgcggagccgcctccaccgacgttgtggttcgcgctcaagcggtcgctgcactgccgctccgagctgtcggaggtccacgtgccgcgcgccaacaaggcctccggtccagtcgtcgcgagcggtggccacctgtcgtcgatcgtcaccaagcgcgcctccgcgcggtcggggtgctcgcgctccatcgccaacctgcgggacgtcatccacgggagcaagcgccacccggggcagccgcccagctgcagcccgcggtccatcggcagcagcgagttcctcaaccccatcgcgcacgaggtcgtgctcagcaccaactcccgctgcgagctcaagatcaccggcttcgggggctgcggcgggctggcggccgtggggaccggcgccgcggccgcgcacgacgcctgcggcgggggcgacggcggcgtggtgtcgtcgttcgtcggcacgctccgccccggcacgccgggccccgcgtgggccggagccgggcacggcctgccgtgcagcggctccgtgcggggcggggtgcgctgcacgccgccgcggtccccgtgcgtgctgctcgagaggaacggttccgtggtcagcggccaccgcgcgtcctcctgcgaggagaccgcaaaggacggcggcgccggcaagggttccggcgggctcagctgccacaggtgcggcgagcagttcagcaagtgggaggcgctggaggagcaccacctctccaggcatgcaggtgaggaggctgctgcttgcatttgcatctaccaccgtccagactccagaccagcgagcttttcctggtag

SEQ ID NO: 56604 - DNA, 281 bp, Zea mays
  Clone ID: MRT4577_151612C.1
agtcgggtctaatggctctttgcctccttgttctctttagcataggcatgggcatggccaccgctgctgcaaaccgcaaactgggttatggccccgggggaggaggtggcggtagtggtagcggttgcggtggatgctgtggttacggaggaccaggctatgggtcagggccatggtatggtgacggcggtggcagcgtccgtgttgctggagggtatggacatagtggtcgccgtcgcggcggtggtggtgagggtgcgggagctaggtggctctgggta

SEQ ID NO: 56605 - DNA, 532 bp, Zea mays
  unsure (1)..(532): unsure at all n locations
  Clone ID: MRT4577_151613C.1
gtaccctccgnggtttggccgggnaaaaaaaaaagtagtcatgtcgggacagataatattcttgacagtgacctttcatggtccatactgagatgcaacaatgacgggcagaagctacattctgttcagaagattgcctgtttggcagaatgtaatatgaaattagcagtggctcttaccctattggaggaatgtttcattcgtatggtggatcctagaactggtgtggacatgataccccatgttttatacaacaagggatcaaactttgctcgtgtggattatcagggattctatactgtaatcctggagaaaggtgatgaaatattatgtgtggcttctatcagactttcgacggcaaggaatgtgccgaattctaatgagcatcattgaaaagatgctctgttcatttaatgtnaagaatgttggtcctttctgccatcccagagttggttagcacatgggtgtcaggatttggcttcaacctatcgaagatgctgaaaggaaacaactcataatgtaaacttgatgt

SEQ ID NO: 56606 - DNA, 144 bp, Zea mays
  Clone ID: MRT4577_151614C.1
accctccctgtcacgaaccattaagcgctgcacgtgcggtgcttacgcgcaaagctgaccatgcacttgccagatcacgtacgcccgctcctttcgatttcttcccatccattgtcacactttcgccggtgtttcccgtcaagc

SEQ ID NO: 56607 - DNA, 2255 bp, Zea mays
  unsure (1)..(2255): unsure at all n locations
  Clone ID: MRT4577_151615C.1
atgatacatacccttaagaagcattataaaggatgggatggttacctgggaaggtattgtttgcaattgctgcaaaaaaaacttatccgtatctgatttcatggctcatgctggtcgtagtcacccacagtcctcattgggcctctttctagagtctggcaagtcatacactttgtgcctggttgaggcttggtctgctgaatctatgagcaggagaagcaatgcatggggtagaaaagttgaggcaatagatgaaagtgatgacacctgtggtttctgtggagatggtggtgaattactttgctgtgacaattgcccatcgacatatcatcaagcttgcttgtctgctaaggagcttccagaaggtagttggtactgccataattgcacttgtcaggtttgtggggggccatttagtgaaaaggaggtttcaacattctcggcgattttcaaatgtttccaatgcggagatgcataccatgacacttgcattgaacaagagaagctacctcttgaggatcaaatatctcagacatggttttgtgggaaatactgtaaagagatattcatagggctgcgtagtcatgtcgggacagataatattcttgacagtgacctttcatggtccatactgagatgcaacaatgacgggcagaagctacattctgttcagaagattgcctgtttggcagaatgtaatatgaaattagcagtggctcttactctattggaggaatgtttcattcgtatggtggatcctagaactggtgtggacatgataccccatgttttatacaacaagggatcaaactttgctcgtgtggattatcagggattctatactgtaatcctggagaaaggtgatgaaatattatgtgtggcttctatcagagtacatggaactaaagccggggagcttccttttattgctacttctgtagactttcgacggcaaggaatgtgccgaattctaatgagcatcattgaaaagatgctctgttcatttaatgttaagatgttggtcctttctgccatcccagagttggttagcacatgggtgtcaggatttggcttcaaacctatcgaagatgctgaaaggaaacaacttcataatgtaaacttgatgttgtttcctggaacatccttactaacaaagagattggatggatttattatggccacaaaaccaggcgaggaaaaggatatacatgaagtttctggagtgcctaatcttaagcgtatgcctaatgggaaagcaaatgagcatttcaaactccatgaccttgatttgtccgggacagagtttaaagctgaggtttccgtgaatggtccattcagaacactgaaacatgaatgtggttcagcagcatggtttcagtctactaagttagctgttggggaagtgtgatattcttacacaaattatctgggctcatgctctgcatcgatactagctgctttgtgttggccaatttcgtcttcccacttcatggctcaaattaatttgcagcagcaaaatcattcgaacacttgctgctgcatgaactcatccttttcaagtaaagttctcacaagactactgggaaatggttgggatgacgcaggcatccatgaatttgggttgagcaaagttgaagaaaccacagattggtgtggtctgttctgcatcgagaaaatggaaattataactgtctctcctgggtgaagtgctctcctgagactgggtaaagtacgcaacacctgagttgatattgcttgcacgttgaacaaagaggatgtatttgcactccaacgtacaaagtgtaacgcattcggccccttttcaaagtaagccatgataggaattaatctaagctgtttggtatatacatcaaaagggtactgcagtaacatgtttggtaccttctcttgcgagttttattttgatatatgtgttttatatgtgtctagattaatcatcatctatttaaatatagacataaaaagaattatattctggaacggagtgagtattattttgccatatgtgctgttaggttgaggcccaaatggcaatgcaatgcatctgtcggcagttgattttcctgagtgccagattggttttgtaatccttgcggctatggaacgattgttcgtcaagtccttaagttattttggtttgtattaaaaaaaagagcaaaaaaaaaatggtgggaggcgtcccctcttcctccaaaaaaacaacaaggggggggtttttnaaaaaaaatngaagg

SEQ ID NO: 56608 - DNA, 339 bp, Zea mays
  unsure (1)..(339): unsure at all n locations
  Clone ID: MRT4577_151616C.1
cctctatagcgcccgcccccttttttttttattcctcctaaccaaaaanatctatatttttttctgaggagtttttttaattttttttggggcctaaaccctcatttaacaacaacaccaacctttcaaggccaaaaaagaaccaaatatccttttttttggtgtgcaaaccaacttttttggggccccacccaggaaaaaccccaaaggcctttaagctggggaatacctcccccaccgccatgcaaaaaacccgataacatctagaaccttccccacaatgaccccacaagctaagctggctttttttttggcccccaaggccttaaccccgcccat

SEQ ID NO: 56609 - DNA, 790 bp, Zea mays
  unsure (1)..(790): unsure at all n locations
  Clone ID: MRT4577_151617C.1
gtcgcgcccgagcgcctcctcgtgcccttgtcgaggaagcaggcaaccttcgaggcgcccctctcccacagctcgaacccgagtagctcgagccagtcatccccgccggcgatctgcaacaacagtagcaggaccccgccgaagaactcaaacaacaacaatggcgccgccaccatggagcccagaactccgccatcacactcgcatcaagtcgcccgaacctacacaccgacgccctccgctgcgacccagcatgcccgcgtcagcaggaggatctccgacactggcctcgaccgcctccctctattcgataaccccgattcagaccgcccagaagcctccaatccatcagaagcaatcgctgctttaggccaactccactgcacgaccccaaacggacgtctgttttgtctggattctgtccgtttgggtagggatttggggtcgtgtccggacgtgtcctgggatgcggtgggcatgtgcccagcgcgcggacgcatcccgaccgtatcctgtccgcgtatttttctttgcaagtccttaacttttttttatcattcatttttggtacatgacaatacatcatcacattttgactagtaaagcaaggccaaagaaaataagaacaacaagaatacattttagaagatagccaacttccataactgccctcttgagttgngttagggccttcttgatgcactcattgttgatctgtggaggaggctcgatctgggatcctcctttcttctttcagccagatgtagatgttgcttcgtgtctagcctcc

SEQ ID NO: 56610 - DNA, 1715 bp, Zea mays
  unsure (1)..(1715): unsure at all n locations
  Clone ID: MRT4577_151618C.1
cgtcgcgctgccctccgccttcctctacctcacctcctccgcggccacccgcgccaccctcctcgacctcaagcccttctccgccaggtgcgcgcccgcagtcgcgccgctccgcgtcttcatgtacgacctgcctgcgcgcttccacgtcgccatgatgggggccgccgccggcgcggggttccccgcgtggccgccgtccgcgggcgggatcaggcgccagcacagcgtggagtactggatgatggcgtcgctccaggatgggggcgcgggaccggagcggggaagggaggccgtcagggtgcgggatcctgacgccgccgacgccttcttcgtgcccttcttctcctcgctcagcttcaacgtgcacggtcgcaacatgaccgaccctgacaccgaggccgaccgcctcctgcaggttgaacttgtggatattctctggaagtctaaatattggcaacgttctgcgggccgtgaccatgtcattcctatgcatcaccctaatgctttcagattcctgcgagcaatggtgaatgcatctattcttatagtttcagactttgggagatacacaaaggaactggcttccctgaggaaagatgttgtggcaccatatgtgcatgttgtgggttccttccttgatgacgatccacctgatccatttgaggctcgccatacactgcttttctttcgaggccgtactgtcaggaaagatgaagggaaaatccggtcaaaacttgagaagatattaaaaggcaaggaaggggtgcgctttgaggatagcattgccacgggcgacggcattaacatatctacagaaggtatgcggtcatcaaagttttgtctccaccctgctggggacactccttcctcatgccgcctgtttgatgccatagtcagtcattgtgttcctgtgatagtcagcagtcgaatcgagctcccttttgaagatgagattgattacagtgagttctcccttttcttctccgttgaagaggctctaagacctgattacttgctgaacgagctcagacaggtccccaaaaggaagtgggttgatatgtggttgaagcttaagaatgtctcccatcattatgaattccagtatccccccaggaagggcgacgcggtgaacatgatatggaggcaggtgaggcacaagatccccgcagttaaccttgctattcacaggaacagaagactgaaaattccagactggtggggataatgattggtggtgaatcgtgtacatattaccatatccactgttagtcctggttattttcggtgcgttatgatggaaacattgctcaccgtcctttgtgaaccaaagtgttcatcttaagatccaaggaccgagtccacaactatttgctgacaggaactgagattatcacctcttttttggtcgatttttgtgacggcttcctatttccccccctgatgctacaaaatagaggggacaaataaacttacagtaacattatagaggagtcatgcctgacaaataggatctgtagcttctttgtgctcccacactggaagtttaaatatataattcatatatgtctggtgctggactgccggtagatacggtttttctcntgtgtttgctactttgaaatctgctgactcgaataacgtaggtttcaatatgttgggtgtgtactaaaccatatcagtatgtgctgtcagctgtcttgtagcgtgatggc

SEQ ID NO: 56611 - DNA, 745 bp, Zea mays
  Clone ID: MRT4577_151619C.1
gggcgattgggttcctcgaggccggccgggaaacagatcttcactttagctttacttcctttttccatacccatacaatactactgtcacctgctaggcagtcgtacctacatcatgttgggtcaaaagtccatcaaggtcaatggcgccgactgcggtgtcgaagccatcctcctgggtgtgattacgtccattggaggctttctctttggctacgatacaggtcaaattagttctatgctcctgttctcagacttcaaggagcgatttgcccaaggccctgcgggtgataaagaatggaacccttacatccagtctattcttgttagtctcatgagtattggaagtttgattggtgctctctctggtgcttataccgctgattggtggggtcgacgaaagagtatgacattcggagtcgccgttttcattatcggtaatatcattcagatttcggcgatggagtcgtgggttcatatgatgatgggtcgattcatcgctggtctcggtgtcggtaacctttccgtcggtgttcccatgttccagtccgaatgcgcccctcgagagatccgtggtgccgttgtcgcctcgtaccagctcatgatcaccatcggtatccttatttccaacatcgcatgttttggtttcaagaagatggataccagcagcgcctcgtggagaatcgtcatcggcctcggtatccttttctctctttctcttggcatcggtattctcatcgtccccg

SEQ ID NO: 56612 - DNA, 439 bp, Zea mays
  Clone ID: MRT4577_15161C.1
ggctgaacaagtagggggctcgaagcaacccgcaccgggggccacacatacataatatagagtcctacagtgcagtttatatatagaccgatactgcatgctgctcctggcaaaacagcgggtttattttatttcttccctggcttaaaaactcgggcaacgcgcgggacgtacgtgtaccttcggtaggcttattaacctgggcctcgtaacttaactgaacttgttgcagtcgggggacatgctgatggggaaaccgacggaaaccccccacttgccggggatgggggccaccgggcccatattgaccctcttgacccttttggcgaggcttttgaggcaacggcaccccccctggcggcccccgctggtccgcgcccagctggtgaaggttttaaccccctttcaacacaacccggggagccccctggccctcccc

SEQ ID NO: 56613 - DNA, 410 bp, Zea mays
  Clone ID: MRT4577_151620C.1
ccggccgggactatctattctgatacaataattttgacaacgatccgaataaacatcactagttcatcgatcgctttgcgccatagtatcacgtagtgtagtatctgcattacaactcacactcgctcactcccatgacaatgctgatagctggtgcaatatccgaacttgacattgacatacacacctgatggggacacaactgtaaaccgtccacttcaccacagcacagccgatgaagtcaacatatataataaatacagtatcagtgacgatacgataataaactccgccagaaagtcggtatacgatcccgtcacttttctgagagcatatgataaatatgctggaacatggatgacaataaaacatctctttgcgtcacaaaaaaaaaaaaaaaaaacccgagc

SEQ ID NO: 56614 - DNA, 923 bp, Zea mays
  unsure (1)..(923): unsure at all n locations
  Clone ID: MRT4577_151623C.1
ggccggccgggagatagagagagagagagatagacaggagagagagagagaggggaagagagagagagagagagagagagatagatgtggtaactcaagaactgttcttatgcatgcagcagccataagcattgctactaggtgccgattcccctcttctttgttttttattcccctcttgctcttctttgatgatgattggctgggaactacatcttggaattccttttttttctctctctcactcgatttctttgtttgattattggccatggtgggtgattcctcgcctgttttatctcgaaactggattagctgcgagtttttttttcttctttcaaccagctgcgttattctaagctcggtctactcgttgcatcaggccaacaatggcaagtggcttccatgaacatggctgtccatgaaaaatcccccgtatgcatgctcggtctaatctcctcaagctagcgaaacgaaatttcctaaaagccggtctggtcctcgaatacagcttgttgcctgagccgctgggagtcctatggagtagtagagttcttcaccttcttctgcgcgcgattactgttagccggcttgaggagaagctggaacgatcttgacgtgcattcagagaatcgatttttccccgtctcccaaggactcctcgtccattagtaatcgattttactgctactgaacagctctttgcgtgcattttctccgagatttctgtggatttcaaatttcaatgcaactgaagccactctgtctctctccctcgctctgtttcgtcagcgtctcctgcacgtgctgtgtcgtttccagggtttcatgcggngcgaagcagctggtctctgccgcctgaacgccgccggaatctgcgaggcctccccgagctgcgtgcgtcgtcggaataaggcagccgg

SEQ ID NO: 56615 - DNA, 2316 bp, Zea mays
  unsure (1)..(2316): unsure at all n locations
  Clone ID: MRT4577_151625C.1
ggagggtcacggcggacgggacggtctgctgttcttccctataaattcgtcgacctcggccgggagagagagagagagagagagatagacaggaggagagagagagaggggaagagagagagagagagagagagagagagatagatgtggtaactcaagaactgttcttatgcatgcagcagccataagcattgctactagggtttcatgcggggcgaagcagctggtctctgccgcctgaacgccgccggaatctgcgaggcctccccgagctgcgtgcgtcgtcagataaggcagccggcacggcaatgccggttccgcttgctccgtacccagctcctccggcgccattcacgccgcccaatggggcccagagccagctcgtctgcaccgggtgcgggaacccccgcatggtcctctccgccctgccggaacctcctcatgtacccagctggtgcgacgtcggtctgctgcgccgtctgcagcaccgtcaccgccgtgccggctccaggtacgccgtacgcgcatggcatgaatcaatatcaccttcgtcaagaacttgcgagcaaataaacacggcgccgtggagccacatttgtgtgtgcagagctagcagtgcaacactgtccctttcgtctctctgttctttttaaccagttaagaagtagcatttgctgcatccataaagttttgtttgcctttttttttgagatgaaggctttcattcgctacagagacctagctgtaggttccatgatagttcaaggggacaactttggtggtttccctctgaacctcttgcagttctggtgctgtagcagtagttggttactggcctctgaaacgtgaagctgccgcgtgaatcttctgcaggaactgagatggcgcagctagtgtgcggaggatgccacaccctcctcatgtacatacgcggcgcgacgagcgtgcagtgttcttgctgccacactgtgaacctggctatggaaggtaaatcctgtgacttcgattcctgtacgaaagaagaagaagaagaaaaaaaaatcctgctttctgtatattgtgtggtctggaaagctcagcaaccttccaatagcattttaacgtcgtagaattggcctatcttggagtcgtaatcgttgaaattggctattatccagagagatggaaaagcttgacagggatgtcctagagtcactggactggagctgaatgaatatctcgtagagatgcttcagtgtgccgagcacagcatttactggaactttcctacaaggaaggattttagtcccatgaccatgaccacccgttgaattcatcaagttgcgaactttgtcaaaaagaaagggaaaaataaacatcacgttcagagattgtgtatttgtccagggttcagaaatcaagtgctctgctcattcctaacatctccagtgacgaacggtcttcttgttttttttcttcttcttccgtcgcagcaaatcaagtcgcgcatgtgaactgcgggaactgccgcatgctgctcatgtaccagtacggggctcggtccgtgaagtgcgcggtctgcagttttgtgacatcggttggagtaagtactcaaagcatcctttttcagaaaaggatgcaattaacaaataatgtttgttgttgtagaagactaccatcatttcgctgctattcttactgtaaaacaacttgtgtttctcatgagaaacagaaaactaaccgccgagtttcactctactcagacctcacctggtgcagagcagaagcccagcagctgagctgatagtgtccctgaaagtgctgtgagaccacctatgaaaaggatgctttgagtgcacatgtatagagttcttccctgaagcgattctttcactttcttttcttttgttttcttttcttttttggttcctcctcaccatctccaccccacccgtccacttctgcgttccttcgatggatctggcgagcccgcggaataaatgagagttttggatatatagctagggcttaacctcgtcgacttgtctgtaaaatcgaatgagacacatatataaacctatgttgttttccttgtttcaggtaaatcctgtgacttcgattcctgtgcgaaagaagaagaagaagaaaaaaaaatcctgctttctgtatanttgtgtgggctgggaaagctcancaaccttccaatagcattttaacgtcgtagaattggcctatcttggagtcgtaatcgttgaaattggctattatccagagagatggaaaagcttgacagggatgtcctagagtcactggactggagctgaatgaatatctcgt

SEQ ID NO: 56616 - DNA, 275 bp, Zea mays
  Clone ID: MRT4577_151626C.1
taccacactactttctaatacaggactgcgagagcctcaccgccgcacgcgtctactattgtcttgctatgtcctcaagccttttcagtattttcttcgtatccggtctcaacgacggtgacggattacagcaggccgtcgcctgttcgaagtaggcgtccaggcggccctccatcccggagtccttgctccgcttcagaagaagctcggagccgacagcttctgagatcttcctctccaggaccaggtctctgaaggaggcggcaggtggatgc

SEQ ID NO: 56617 - DNA, 544 bp, Zea mays
  Clone ID: MRT4577_151627C.1
cactagaccggcaatatgtccgccagcatccttacattctgtttgtgctactacttaccatagttgcatctcaggaacttgtaccaggatgattgactggagttccctgcatactatagcattaagtggcacagccctgagctattgagctaggcccatacctgcaccactactagtaaaatctacttctcgagcacttgactgagtatcctgaagcatgacatggctgctcttaggactatgattgcaaccattttctgagagcataatatgagtaaccagctgattgatctgtcggacctctgaaggggatgaattataccacgtctctatcactgacacagagggctaatgaaacaaactataattcatcgattataggaactacgcactgaccatatgatgcatgtctcgatatacatgtatctatccataatggagtcagtgatcatgttgctgcaccatctaaaagaccatgcagtgtgaatgtcaggtgaactacgctatctaagaataaagatgttgaggaacaactagcatgttg

SEQ ID NO: 56618 - DNA, 245 bp, Zea mays
  Clone ID: MRT4577_151628C.1
tgggaccctcgaggccggccgggccgggctgcagaatctcctttcagatggccgcgcttcacctgacttgagtcgccgctttcatgtttcaccgggttgtcaagttcatgtttcactgtaaaccggcgattgtattagtatcttgtccactgttcgctggaaaaaaaaaaaaaaaaaaaaaaaaaaaaaaaaaaaaaaaaaaaaaaaaaaaaacaaaaaaaaaaaaaaaaaaggcccctagggcc

SEQ ID NO: 56619 - DNA, 417 bp, Zea mays
  Clone ID: MRT4577_151629C.1
aaaaaaaaaaaaaaaaaaaaaaaaaaaaaaaaaaaaaaaaaaaaaaaaaaagagggcgggggttataagatgaaggatgcttacctccacttgcctgcgccgtaataactcttttgtggagccaaatatttttaattggctggccggtgttcaacttctgtggttgctggaacaaccctggtgtcacccaaattagtgtgcttgcaaacaatcctcttttcagcggtcggcgtacaaatgaggacgccgcctatggtcgtcctttccaacagttgagcatgcttgatgactagtgggaccccccttgtggcgtatcattcaccgcggggggggtggttgatacccgcaggattactgatttagttgccagcgtattagcccctgctcctttctttttatttcctttttttggcggga

SEQ ID NO: 56620 - DNA, 301 bp, Zea mays
  unsure (1)..(301): unsure at all n locations
  Clone ID: MRT4577_15162C.1
cttccgacaaccacaggcaangaaacaacggggtgcgaccctgaagaggaccgccgggcccacaccgcacgaaggggaagcgagcgcacagcgaagaaaagcccaaactcgcgcaagacagcggggccaggaagcgaaggccgggaagcacgcacgaaaggaaggaggagcacaggggcacaccatggacaagacacaacacacaacgaaaggggagagaacaagcaggcagagaacgagccagcactaccaaaggctgatcggcagaagaaacaggaaaagccaaaactcggcacgaaag

SEQ ID NO: 56621 - DNA, 239 bp, Zea mays
  Clone ID: MRT4577_151630C.1
caaaaacagaaatgaaccggacaggccagggtttcaatgattcatccactgttaaccatacatgcgtctgcgcttagattacatggaccgcttacagaaagcacccattggcattgattgatgagcacacatataccatgagcattcgccggatggtgcgcttactacacgcctacaaactgcacaagttgagttccgagaagaccacactgtttactttacggggggacgaaccaagg

SEQ ID NO: 56622 - DNA, 659 bp, Zea mays
  unsure (1)..(659): unsure at all n locations
  Clone ID: MRT4577_151631C.1
caggctaaacaaagatttcgacaacgtctcctgctagccgccggtggtttcgtccaggaggctgttggatttggggttcaggttctggcacgacgtgtaggacgtggtgaaagacattgttgcgcagtgtcttgcccatgggttcctggagcatcctaagacctaaatgcggcagagctgcaattcctagttggtttcaggcgttcagcaaatcagcggcgatctgaaggagaaggatgaatgcatggttgggctggggcctgggcccttaggctatccacatgttactctatatttactctacagactataccactattcctagcttaatcaccaaaattccttactctaaattactcaccaaaatttgtagcctcatatacctctatatatcaactactactacatagtctattttattctatttcattctaactacttttttctctaaaaaaataatttttaataannnnnnnnnnnnnnnnnnnnnnnnnnnnnnnnnnnnnnnnnnnnnnnnnnnnnnnnnnnnnnnnnnnnnnnnnnnnnnnnnnnnnnnnnnnnnnnnnnnnnnnnnnnnnnnnnnnnnnnnnnnnnnnnnnnnnnnnnnnnnnnnnnnnnnnnnnnnnnnnnnnnnnnnnnnnnnnnnnnnnnnnnnnnnn

SEQ ID NO: 56623 - DNA, 562 bp, Zea mays
  Clone ID: MRT4577_151632C.1
actccatagggcgattgggactctcgaggccggccgggatacctcaatctaccagtttccgacgactgttactcctcaacccaaccgtttcttctctaattaaataaacaaaatgttcggaggattcgccccccctcagcaatcacaggaggagatccgcgccctcgaggccgatgctgcctttactgtccagggtgccatcaccaccgctgttcttctgtacctctctcccttcgctctcgaccttgtcggcaagatcctctagactacgatcatccgttgtgtaaacgtagagcggttcatgcgaagacagtgaaaggcattatgattcttgcggacgatggctttgccagcacgccatgtacgataaaaccggtttagatggaacggacggaagactcatgattaatctgtaccaatatatttttcaagacgcggggaaaagccgcgcaataacatgactctcggcaataacacatggccttggcatttttttgctaactctactttttaaaaaaaacccgttgttggtgggaaaaaaaaaaaaaaaaaacccgcggcc

SEQ ID NO: 56624 - DNA, 331 bp, Zea mays
  Clone ID: MRT4577_151633C.1
ttttaacgcagataaacacaaactcatgcattttaatattaaatggggcacgagacggacatgaccgcgagcacgtgacacagatgaacatgaaccctaggagcgaccatggatcgataatggtgggtgcagttgataggatctttattagacgctgctataaattattattattcgcctcgtcgtggtttgtctcttgactctcgtgctccatcgccgggccgggcgggccggtttatttgtagctgcagcaggagcagccgcagttggcgccgcatatgcaggtgttgaaatctcagtcgtctgcctctgtggcccgcctataagaccg

SEQ ID NO: 56625 - DNA, 325 bp, Zea mays
  Clone ID: MRT4577_151634C.1
cccacgcgtccgcttgccttcactcctgcagcgaggacgggagtgaagatctctttgtgcacactagtgcagccgctgcccaccggtgcagaggtgatcaccgtccccggcggggctgatgtggtcgcttccactggtgaggctacccacagcagaggtggttgcctccgctggcgagaccgttagtgccacctgctggcggtccttcggctctttggctttaatggcctcactgttaccccccataggaggatgggggcgaggtcctatttatagcagcgcttgacctggggtgatcgctgctgctgtctaagcgccccggggc

SEQ ID NO: 56626 - DNA, 287 bp, Zea mays
  Clone ID: MRT4577_151635C.1
ctaaaaaaaaaagcgcccttttttggggggggataaaaatacagggcattgcccggggggaaacccaattcccggttttttccacgcacccttgacaaaaacccaaacagggaccccgggccggggtatcagttgcccatggggacccccggccactggaaaggggcccccccccgggtgagctggtgtttgggcctcccctttttgaggggggggaagaggatccccttggaccaggggtcccgttgcggggggggggagccaataaaggggcccttccccccccc

SEQ ID NO: 56627 - DNA, 227 bp, Zea mays
  Clone ID: MRT4577_151636C.1
cattacgatccagctgtttgaaagagcatacgcggcgcgaaggctcaaccccgcggagtatatggaaacacggtgcacgtaacgatagcggtcccaaagaactctagagcgagagcagcgcgaaagtcctggagccaggctctgggcaagccgtacgctgccacaccaacaaatctcaagactattgacctctaccagggctgtgcaggtgccacagcccttattca

SEQ ID NO: 56628 - DNA, 116 bp, Zea mays
  Clone ID: MRT4577_151637C.1
aacagatccaccagagtggttgccatatagctctgctaatgtgcgcctacagtgcaacttgcctttaacggttctgactcgggaaaggcaccatttgtcggttctgaggagggata

SEQ ID NO: 56629 - DNA, 442 bp, Zea mays
  Clone ID: MRT4577_151638C.1
tagggacctctatcaatcgaggagcacatcggaggcctttaacaagaagggcggggacgctgaagtggcatcatacctaactaccgatcgctaatagcattggacgtgcctatagctgcacctactctggagttgctcgactatatagaatatacagagctaaagagtacttcagagacttcaatagatcgacatcaatgaatatgcatgctttctgacgagaactggctacaccggcgaacaatggctctagatctctgttccatcagagaatgcacggatcttgcacaggccattctacagagatctgaaggcaacgtgcggctgaccggctcgtgcgcccgtgacagtctacgactggaggcaggcctgtacctgtacggtaacgacttggagcatcacatgacgccggtggaagccggactttaatgggcgaccagta

SEQ ID NO: 56630 - DNA, 583 bp, Zea mays
  Clone ID: MRT4577_151639C.1
cggccgcgtgggcgccacttcgccagcgccagcgaccgacaccttctctaggcccattccaaggctctcctcaccgctgctagctcccaggctgctcagagcgccggccgacgagcgtagcgctccgtggtccgtgcggcgctcgaggacgtacggtacgagatcgacgacgcgggtggttccgactcggtcgtcatggggctgagggagagcttgttcgggtgcttcggggccggcggccaggagcaggggcaggagcccgcggcggcggggccggcgagcaggcgccccggcggcgttgggaagcggacgctgcggcggctgagcacggccaacctgcggtccctgtcgctgcaggacctgtcgcggaagctggagacgacgaagctgcacgccttcacgctggacgagctcaaggccgccacgaagaacttctccaccaccaacttcctcggcgagggcggcttcggccccgtctacaagggcttcgtggacggccgcctccgcccgggcctccagccgcagcacgtcgccgtgaagtacctcgacagcgacggcgtccaggggcaccgcgagtggctgg

SEQ ID NO: 56631 - DNA, 309 bp, Zea mays
  Clone ID: MRT4577_15163C.1
ttcacaacgatactatcatgctactccgggcgcttaaatatggggtgaggggatgtcatactacaacatgggcggcaaggtgctgtataagggcggaaccaaacgccacctcaaggttctgcgctacatcatacaaaagatgacgaatgcgtggatccgctgtctagccatgaagcactgagataatcgcatttatgatctcatatactaggagacccgtgacgggctcaagatctttcctgagaacgtcatacgcgactccgatacctacactaagcacggacgcaagatgaccgttaccgccatgga

SEQ ID NO: 56632 - DNA, 467 bp, Zea mays
  Clone ID: MRT4577_151640C.1
ccggccggggagagccccatcgccgctgtagtcaatcccgcgcatccgtcgcagcttcaacctcggcacatggtgcatcgcctgttggtaccgcacccatccatggtctcgccgtgtccggatggcgtgaagtgtgacctgaagtcctcgccggggcaaggaaatcaccatcgtgtcgcaccgcaatgtgggcagcaacacagacgccaccgtttcggcttggtggacctggtggtggtggaggaggttgttgttgtcgttgtctttccaactgtgcttgccttatttcttgacgtatctccagccggtcctgacgtatttcctcgcgttcttgtcttacctagttttgcaattcggtcaccatgtttgccatttgttgtattaccatcatttgggtggtaatcacttgatcgattccaactggtggaggattcaaaaaaaagaaaaaaaaaaaaaaaaaagcggcc

SEQ ID NO: 56633 - DNA, 522 bp, Zea mays
  Clone ID: MRT4577_151641C.1
ataaaaaacaaaaaaaaaaaaaaaaaaaaaaaaaaaaaaaaaaaaaaaaaaaaaaaaaaaaaaaaaaaaaaaaaaaaaaaaaaaaaaaaaaattaaaaaaaaaaaaaaaaaaaaaaaaaagtttttacttgggccggaccccccttaggggcgatttttggggttttttttcacattggcggccgttttggcttccttttagggggcccttttggccttttagtgggcctttttacaattcattggccatttttttacacctttttttttgggaaaaaccttggggttacccattttattccctttgtaaaacatccccttttccccccctgttttaatagcgaaagggcccgcacagatgccctttccaaacatttttccaacctttttggcaattggactcccctttggccgcccctttaaccccgccgtttgtgggggttacccccagggtaacccttacatttgccgttccctttgcccccgctttttccccttttttcctttcttttttcccccctt

SEQ ID NO: 56634 - DNA, 273 bp, Zea mays
  unsure (1)..(273): unsure at all n locations
  Clone ID: MRT4577_151642C.1
cgcgttgnccatcttncagganaggggantgcatnttgtgatcntccggnaganaccatgctaccaggagaagtgtagtttagttacagaagcancagcagtggnatgcatnttgccaatacattagctgagacttgaaacatcngcntgcgagatgcagcaactacttatntatangtgtatattcaatanttatgccacncgaatttgactaanaagnagnagngggnggganggnggggntgngagagntgntgggnnggcnggntgggg

SEQ ID NO: 56635 - DNA, 276 bp, Zea mays
  Clone ID: MRT4577_151643C.1
ctttctttaaaaccgtaagataggcagagcttggcaatggagctcccgtggagaatgctgctgccgatgctgctggaactgtcattcgaaaccagactcgtggtaatgtgcaggcacgctcgctgacacctgttggaacggactgtctattcgttcttctcggaatgctcaagacgccaaacgtttgctcatcaacgactgcttcgaaactgacacgcgagggatgaaaaagaccgtcatcgttgaacgacaatcactgacggttgtcacgatgca

SEQ ID NO: 56636 - DNA, 600 bp, Zea mays
  Clone ID: MRT4577_151644C.1
ctgcgaatcatgtcgagcatcgtttaccttacagtgtctctacgtaagcttgtaatagaaaaagcagacgttatgtagagcttgatgatgtgcctctcctccacgaccttcaccgcaatgacgtgaacgtgccgtatgtcatcctccttcggagaagccctggtgacgatgcgctagacggcgttatacgtcatgccggcggaagataccgataattccgagttacggcccccatcgttggctgtacctgggcccactgtccggcgagccgccgagctacctgacgggcgagttcccggagcgactacggctgggacacctcggggctgtcgcggtacccaaatacggtctccaacaaccgggagctgtaggtgatccactccctctgtaccatgctgctcgcgctcggctgcgtcttcccgtagctgctctaccgcaacggattcaagttcgtcgaggccgtgtggttcaaggccggctcccagatcttcaccgagggtggactggactacctcggtaacccgagcctcatctacgcgcagatgatcctctacatctgaggctgccaggtattgctcatgccagccgtcgagggctacc

SEQ ID NO: 56637 - DNA, 202 bp, Zea mays
  Clone ID: MRT4577_151645C.1
gggggtttaccagaatgcactggaccgcgcctattttgtgtggactagggttatttaccagttgccctttcagtgaaaggaactagacaccgcgtgttgaggaccgggtaccaggggctcaccccccacatgaagagaacgctgttcacatagagagagagaatgtgtaccggaccccatctgggcctgggttggggagcgc

SEQ ID NO: 56638 - DNA, 243 bp, Zea mays
  Clone ID: MRT4577_151646C.1
tgtatataagtcctcgggggtcaatataagcctagatgcaccatgtgctggacagacactatgaataacttgcagttcttttagtatttggttcacaaaccatgtcatcaattgaaatagctggttcacccgtgacttgggtttgaatatcgtgcatgtatgattatgaggtaagttgggctaccgaaactgatggtatcgtataagcttagctgtactagtgagtggtaggcctaactgttg

SEQ ID NO: 56639 - DNA, 545 bp, Zea mays
  Clone ID: MRT4577_151647C.1
cgggctcccccctcgagttttttttttttttttttttttttttttttttttttttttttttttttttttttttttttttttttttaaaaacacaaaggaggggggccccccaaagggaagttttgccccctgttttaatataaaaaaagtttttttttggaccgcaaataaaaaacccaaccaacaatcatgagtcatgaccctaaaagggaaggggagggggttcggccataacccgtgggaaagctggggggggggtatggggttgtaaaaaaaggccttaatttcctgcaacaccttggaaccctgggggagccccggaaacccgaaaaacccgggaaacatgctggggtactgggccacaaaaacttttttccctttcgggggaaaaacgtgggggaagcgtctttgccaacccatgagcgggtaaaaccccccaaaaatgaccatgggggggggaaagtccccggaaaggccggcgttgtcctcggaaacccccccggccggggggccccggggggccccttcgggaaaaaacccggccc

SEQ ID NO: 56640 - DNA, 371 bp, Zea mays
  Clone ID: MRT4577_151648C.1
cccacgcgtacgagtcaagttaccgtttcaaaggatgtttcttctagggaagcttcaaaggacgtcacatggatgggagcttcatggaaatgccaacgaagtctgaagcactacaaatctttctgccgtacaggaattactatctcggtgcatagctttgtatacattatgggtgaagagatgaacagacttattgcttatgtggaagatctctatgaggatacaaattcctgcaacatggtcaaggtacaatggtttggcaaagctgatgaagttggtgttctgttgcccatggattttgatgacagggagattttcttttctctgggacggcaagatctcaatgtaatatgtattgacggattggctgc

SEQ ID NO: 56641 - DNA, 834 bp, Zea mays
  Clone ID: MRT4577_151649C.1
cctcgaggccggccgggaaggagaagagggagagagagagagtggtggggattcggcatggacatcatcacgcagctgcaggaccagctcgacgagatggccgtgctggccgtcaacaccttcggcacgctgcagagggacgcgccgccggaccgcctctccagcagctaccctgacccgctcaaccccaaccctaagcccgaggacgactccaaaccccaggtccaggcccagcccggcgcgccgccgccgccaccggcgcaggcgcaggcgcaggcgcagccgcccgcgcctgacctcaccgagcaacccaaggctatgagccgcgccctcgtcctcgcggccaagaagtttgatgcacttgttgcagcagtgccactatcatcagaagaggatcaagtgaaaagaatccaagagctacaggcagagaatgaagtcgtgggactggagctccagaagcaacttgaagctgccgaaagggagttgaagcaggttgaggtgctgtttaatgaagcaacagacaattgcataaattttaagaagctagattaattacgttaatgtttgctgaaaagaaactgttcctgtggatggagtgtggaggatgaatgccagtaagaactttatattccgtcttttcagattctctactagtgaacaataattgcacttagcttttgtgtactggcattctgatctgccggattaggattgacctttggttgtaaggtgcaatgtttttagtatgaactgacgcttgaactgtggtggtctttttaatggatctggcacctggcttcctctgggatttcttctatattttggtatttgttc

SEQ ID NO: 56642 - DNA, 353 bp, Zea mays
  Clone ID: MRT4577_15164C.1
cctatggggatcttttttttttttttggggcgctcaatcacgttcaatgaaccttattcgtcagccgaaaaaactaaacaaggggggaaaaaacagctcttaaatccggatggacatcaccacaacactcttgccaaaacgcgagcccccgtaaacacgataacctacttgtggagcacttaacgggcccctggttctcaatgacaaccaattttattggtccgaaacaactttttgctctccttgggggcgagattcatcgacctctcccctggcttacaaccaggccggcaccccttaggtgggttctccctgacctaccgaaatgcctaaagggtgcccatggtctcatt

SEQ ID NO: 56643 - DNA, 431 bp, Zea mays
  Clone ID: MRT4577_151650C.1
gttaagacaaaccaaaatgctggaaatgccaaagacaaaaggcatacctcgatgtgctggtgagttcgagctaggtgcttgcaaacataaattattgtaatgtccattctaagaactacatatagaccaaaattggacacaggtgtgccagtgtttacaatgtaagccacttacaatgagggtaaagcttctagacaacattagcctaaaatccattgaggttacattaccattgctacttcgtccatgagaccaggggttttgatgttgttgctccatttacatccaaggaaatagtcaacgactccaatggccacctgaacctgtttatgggtatgctaggaaaaaatctgaatacaagtaattgtactcaaaaaactgtttgccatacttgttcctattgaacatatactatgcattggcatgatcgt

SEQ ID NO: 56644 - DNA, 1054 bp, Zea mays
  Clone ID: MRT4577_151651C.1
caccaactcaaaatttgcgatttcggaagtgctaaagtattggtcagaggagagccggacatctcctacatatgctcaaggtattatcgagcaccagagctcatatttggtgcaacggaatatactactgctattgatttgtggtcaacaggctgtgtcatggcagagctgcttctaggacaggctctgtttcctggagaaagtggagtcgaccaactagttgagatcatcaaggttttgggtactccaacaagggaagagatcaagtgcatgaacccaaactatacggagttcaagttcccacaaattaaagctcatccgtggcacaaggtttttcaaagaaggcttccacctgaagcagtggaccttgttagcaggtttctacaatactcaccaaatctacggtgcactgctttggaggcctgtatgcaccctttcttcgatgagctgagagacccaaacactcgtctacccaatggtcggcctctgccgcctctcttcaacttcagatctcaagagctaaaaggcgttcccccagaagtcatcgatcgccttgtcccagagcactcaagaaggcagagtttgttcatggcgctaaggacctagtttttgccgttctttttgcccccttttttcccaccgtttgccaccttgagggaagcttgtaaagctatagcttctcctttcccctcgtccttactttcctcccctctctttcttccgagctttgtgtggatgagagatccttgagatacactgctagagctgtgagttccaggatgtgaggttcgagtgtgtgtgatgtgcagttgtcgcctttgaggtcggagatttcagttgcagtgttgtgagaggcttgtgaagcttttttgtctacttttcagtgcttctctggcttgaagttttccttcaattctaaaaaaaaaaaaaaaaaaaaaggcttcaaaaaaaaaaaaagcgtgtaaaagtactggttggatgctgctgcaccaattctggaaaaaaaaagcctcacaactaaacccctaaaaaaaaaaaaaaaaaaaaaaaaaaa

SEQ ID NO: 56645 - DNA, 169 bp, Zea mays
  Clone ID: MRT4577_151652C.1
acccctgcacctccggtcccgaatccccaatacccggcccgacccacgcgaccgtaaaaactctgcctttttcgtgccagcgggccaagccaacagatctgagggtgaacctcacattcggaagcgtcgctcacccctcccgcgacacctccactaaggcctaccctgc

SEQ ID NO: 56646 - DNA, 1011 bp, Zea mays
  Clone ID: MRT4577_151653C.1
caacggaatatactactgctattgatttgtggtcaacaggctgtgtcatggcagagctgcttctaggacaggctctgtttcctggagaaagtggagtcgaccaactcagttgagatcatcaaggttttgggtactccaacaagggaagagatcaagtgcatgaacccaaactatacggagttcaagttcccacaaattaaagctcatccgtggcacaaggtttttcaaagaaggcttccacctgaagcagtggaccttgttagcaggtttctacaatactcaccaaatctacggtgcactgctttggaggcctgtatgcaccctttcttcgatgagctgagagacccaaacactcgtctacccaagtggtcggcctctgccgcctctcttcaacttcagatctcaagagctaaaaggcgttcccccagaagtcatcgatcgccttgtcccagagcactcaagaaggcagagtttgttcatggcgctaaggacctagtttttgccgttctttttgcccccttttttcccaccgtttgccaccttgagggaagcttgtaaagctatagcttctcctttcccctcgtccttactttcctcccctctctttcttccgagctttgtgtggatgagagatccttgagatacactgctagagctgtgagttccaggatgtgaggttcgagtgtgtgtgatgtgcagttgtcgcctttgaggtcggagatttcagttgcagtgttgtgagaggcttgtgaagcttttttgtctacttttcagtgcttctctggcttgaagttttccttcaattcttgtgaactggcttcaagatttggcttcgtgaaccctgtgtgcgtgtaaaagtactggttggatgctgctgcaccaattctggaaaaaaaagctttcaactaaacccctacttatgttttgtttagcccaaaaaaaaaaaaaaagggcggccgcctcgctagagaggatcgccagcgtacgcgcgcgtgcgccgtcaatgatctt

SEQ ID NO: 56647 - DNA, 316 bp, Zea mays
  Clone ID: MRT4577_151654C.1
ggggggaaaacaattttaattttcgggaggaggaaggggaaaaggagcaccaaaacccttggagaattaaaaataggaccccggtaacccatataaaaaaacagggaaatcccggtcaaatttggaaaccccaatcttttttgggagttccaaaacttttttggggggggaaaaatggggggggttggaaaaaggggcaagattcggggccgcggtccccttgaaaattgggacaaaagaatgggtttcctttggtccccggcctttaaaaaaaaaaacttccaaacaaaacccaccgggggggggaaaaacagga

SEQ ID NO: 56648 - DNA, 141 bp, Zea mays
  unsure (1)..(141): unsure at all n locations
  Clone ID: MRT4577_151655C.1
ctagnacgcgngcggccgccctttttttttttcagggtgtagaatgcgtttaacagaggtggtcttctagtacattagtgtacgcgttactatctctcggtgttgcggttgccttgtgctagaataaatatggttgccatc

SEQ ID NO: 56649 - DNA, 754 bp, Zea mays
  Clone ID: MRT4577_151656C.1
aatgcgccgccgccttctgcggcgctgccgctaactcctccactttgggctcatcacttgcaagtttaatctctcccctccatgccatgcgtaagcgagcaagcctcgcatcaaaattgtggttcataggatcacgtacgactactaggtgagatcacaaccaccggccacctgtatctactagcttgctacgattaaccagtccgaagtactcgcagaatcttgagaaagatgccgctgcaaatgaacaagactaccatcttctaatgcttggactgcttgacaagctctaggtgtgagcgcgagatgagcatcaccattgatattgctctgagtacagtctgagagcaccaaatactatcgcaccgccattgatgcccctggacacccagcatctatcaagaacgtgatcattgctacctcccactttgactgagctgtgcttattgtcgactccaccactgacgggttcgaggttggtatctccaaggatggccagatgcaggagcatgcatctccttgatatcactgtaggagtgcaatctatgacttgctgctgatatccgagggatgacaccactccccaatactcctaggtgctgctatgatagacaatgagaatgaatgctcatcctacctcaagaaaggtgctgaccaccctgatgagatagcatttgttcgcatctctgaggttcattgcgagaacatggttgagaggtccagcaacacttgactggtacaaagacccaaccct

SEQ ID NO: 56650 - DNA, 597 bp, Zea mays
  Clone ID: MRT4577_151657C.1
gaaggaagacgacgacgacaatatagaaaagaagcaggacaaggaaaggctattcttatgtggcggctgggtttcgcagcgtccagaggaactcctcaacctggtagtttgtgtcggcggagaagaccctgaggcacatgggcgggttgacgttgatcagggagaggatggacgacggcagcgaccagatcccgtcgccgcagatgagccccgacgcgacggccggcgcgaacatgtgcgccctcacccggtccgacttgctccacaggtacagcacgatgcttccgacgcacatgtcgatggtgaagaacgagccgaggaagaagggcaccgccattcccagcgcgctcgggatgtagtcctgcacccaccaccgccgcgccttggccacctccttgagcgcgcagatggcgacggcgagcaggaagaaggcgaggcagaagcggaggcagtacttgggcagctggttccagccgttgacgcctagcagcgcgatgccccggtagatcttggcgtacggcgccgggtagccttcctccatcccgatgtcgtacgccttgtagaagatccagaagacgacggggctgatgacgcagc

SEQ ID NO: 56651 - DNA, 558 bp, Zea mays
  Clone ID: MRT4577_151658C.1
ccttatctgcttcgatcctatacgcccctctgattcggagtggacatgctcgttattgtgctttgctcgtgctccacctaccctgcatgcagcatgggcgcccagcaagcatccgggcccgtggagccgtgcccaagcatggggatgccccaaatgccggttggtctaccccaagggcgagatacactcctactacgtcatgattatggtccaggaccgtaaaacgggtttcgcacccctggatcctgccccactgttgtggcgacgtctgtgggcgacgactagatgcaaatgtagaatacggctgtgagcatatctgcctggtggtggggcacccatggctgtgaacgccatgccacgttgttgatcttaaagcgacgtgatcatgcggagtgaccggcagccactctgctgaggacataaccggtactcttgtggggggaaatgcaaaagacgtattagctgcggactgcaccactgcacagacaattgccatgatggcccttgtccgacgggtgcagtgttgagtaggcacaaatgtgagtgtgcagagatata

SEQ ID NO: 56652 - DNA, 450 bp, Zea mays
  Clone ID: MRT4577_151659C.1
gtccgggcattgacatacagctgccgcctacacgggcggcggctgacaaagcatgatgatgggcgacctcctcttctacggcgggactacggaggccgccgcgactgccaccagcggcggcggcatggaccagttctcggcgttccaacaacaggagccgctgcaggtgcaggcgcccccggaccctcactcgcacgaggagttgaacttcgactgcctcagcgagggttgcaacccgtacaggggcgggggggtcgccgtaataacgggggccgaggccgccggggcgcccggaagggcgctcggcgctcttcacgacaccatgggggaggacaagaccagcggccacctgcaggggcagcaatatggagccgggggctccacgacgttcgtgttccgcggtgccgccggcgagagctccgagcagacgcccgtcgggataaagggtgc

SEQ ID NO: 56653 - DNA, 361 bp, Zea mays
  Clone ID: MRT4577_15165C.1
gggaaggggaataaccaatttttgggataaaaaagaaagggggtgttttcaaagggggggtacaaaaaccttttgggggaagaaaactgggggtccaaagtaaatccctggaaccagaaaatgcaaaagagtttttcgggcccaaagtagttttgccactacgggacttaaataccacctttttttaaaataatccaatttgttttgttttccgaaaaggggggggtcgttttaaattaaaagaactggggggccgggggttgggaatattacctttacaaaaagaattttgaaagaatgttctttttaaagaagaattaattaactttggaagggatgtttgattttttcaagagggggg

SEQ ID NO: 56654 - DNA, 1840 bp, Zea mays
  Clone ID: MRT4577_151660C.1
cggcatcgtgggctctttggacgacggaaacgaggcacgatcacacgctgaacgcttccgccccgccgccaccttccccgctctcctccctccgctcgcctccgcttccgttccgcgccctgcccccggaaggcaagcaaagccctcgctacttgcggagcgtcgttggtcaaaccctagcacacgtacgagcaggccagccccgcccgctcccattcccaggccctcatccatggcggcgctctccgtgcccctccacgccgccgccggatcccgcgccgccgcggccgaccccgtcaaggttccgtgcgtgaggagcactggttcagcccatttcggccgcgccttcccctccgtcgcggtctcctctttggctgcgaggcacatcgagccgatgagagcgatagctacacaggcgccccctgccgtgccacaatatttgagtggcgagaagacaaagatcggcatcaacggctttgggcggattggcaggttggtcctgcgaattgcaactagcagagacgatattgaagttgtggctgtgaatgaccctttcgttgatgctaagtacatggcctatatgttcaagtatgactctactcatggcccgtttaaaggttctatttgtgttgtggatgattcaaccctggagatcaatgggaagaaggtcacaattacaagcaaaagagatcctgcagagattccatggggtaactttggggctgaatatgttgttgaatcttctggtgtctttacaacgactgataaagcatcagcacacttaaagggtggtgctaagaaagtggtgatatctgcaccatcagcagatgctcccatgtttgtagttggagttaatgagaatagctatgattcgaagatgaatgttgtttctaatgcaagttgcaccaccaactgccttgctccacttgccaaggttgtacatgaggaatttggcatcgtggagggccttatgacaactgttcatgccacaacagccacccagaagaccgttgatggtccttcaatgaaggattggagaggaggacgtggtgctggccaaaacataattcctagctccactggtgcagcaaaggctgttggaaaagttctgcctgagctgaatggagagctcactggcatggccttccgagttccaacaccaaatgtctctgttgtggacttgacatgccggattgagaaaaacgcctcctatgatgatgtgaaagcagccatcaaggcggcatcagagggtgcactcaaaggtattcttggctacacagacgaggacgttgtttccaatgattttgttggtgattctaggtcaagcatctttgatgccaaggctggtatcggactgagctcttctttcatgaagctcgtgtcttggtatgacaacgagtggggctacagcaaccgggttctggatctgatcgcccacatggccctcgtcagcgccgccgccaagctctgacgtccgtgctcgttcctccagtagtagcctaggaaaaaagactgcaattttgacggccattttctgttagctgttgtttggaataaagatcaaatgctggaacacttcgaactcgcgcgagactggactcagatccatggcctgtattttagttgtagaagtgggcaaatttgcaccgtagtaccctggcatggttatatgcggaattgttgattgatgagtcgttgtacggtttgtcgacttgatgatatgttgatgtgggagcccctgaatgaggcggtattaatggaaatataggatggcaatggcaatccgtcgacttgcaccctatttttctttgtttgcacaattaaatataattataagagg

SEQ ID NO: 56655 - DNA, 740 bp, Zea mays
  Clone ID: MRT4577_151661C.1
ccggccgggagtagcatccgaatccatcttccaccttttgcctaaactcgcacatccggcaagatggtcgctcgcaaccgagtcaggaagctgacaccttcacaacgctgttcttcgctgcaacagcaatgtcaacagccatccgcactccggtttcaagtcgttcaacatacccacggatgacatcacgatcaacagaaatggactccgcaccataccgggatgcatcgctgtcggtggatgagcgtgtggaggacctcattcagcgcatgaacatggaagagaaggccggacaactcttccagcaaatcaccttcccgggtcccaatggaactgtgacgaactctagttcatcatcaatccaagggttgcacatgacacatttcaaccttaacagtgcgatcaccgatgtacgccaaactgcacaatattacaacagtctccagcagttggctttggactccaggctcggcatcccaatcacactctcctcagatcctcgacacacattcgttgatgccactggtagtcagattgcggcgatcaagttctcgcagtggccaggtagcttaggcttggcagcaatccgtgatgctgagctcgtacacacctttgcggatatcgcacgacgagaatacaaggctgtcggtatcaggtctgcgctgcatcctcaaatcgatgtagcaaccgaaccccagtgggctaggatcaccaccacgatgggcgagaacgccacattg

SEQ ID NO: 56656 - DNA, 786 bp, Zea mays
  Clone ID: MRT4577_151662C.1
ttggagaggagggccgtggcgagtgcccaagggtttttaatccagcttccttatttctaatgactttattgtgatccaaaaaaaaaaaaaaaaaaaaaaaaaaaaaaaaaaaaaaaaaaaaacgcttccgcggcgccaccaccttccgccctccgctgcccgctcgcctccgcgcccgaaaggcaaagcctcctcgctcctgccccgccccctcctcgcggcgtcggtcaaaccctagcacaccgtacgcgcaggcccgcccgctcccattccccacctccacccatgggggcgctctccgcgcccctccgcgccgtcgccgccggatcccgcgtcgccgcgtccgaccccgtcaaggtctcgtgcgtgaggagcactggctcagctcacttcggctgcgccttcccctacatcagggcctcctcttcggctgcgaggaacctcgagccgctgagggcgatagccacgcaggcgccccctgccatgccacaatattcgagtggggagaagacaaagattggcatcaacgggtttgggcggattggcaggttggtcctgcgaattgcaaccagcagagatgatattgaagttgtggctgtgaatgaccctttcattgatgctaagtacatggcctatatgttcaagtatgattccactcatggcccgtttaaaggttctattcgtgtcgtggatgattcaaccctcgagatcaatgggaagaaggtcacaatttacagcaaaagagatcctgcagagattccatggggtaactttggggctgaatat

SEQ ID NO: 56657 - DNA, 195 bp, Zea mays
  Clone ID: MRT4577_151663C.1
cgcgtctgtctggaggggatgcgacgccctaccgtatctgactgcttctaacagggacggagagacccactttagggcgccacacacgctgaagactctatgccctatgccactgaacaaggcgaactcaatacaaggatcgctcactccgtgcgcctctggtgattcttacgcatgcatgcttgtcatgagaaa

SEQ ID NO: 56658 - DNA, 2230 bp, Zea mays
  Clone ID: MRT4577_151664C.1
cggacgcgtgggaagcaaactgcacaggcgcagcaggacgcgagaagagaacgtgaagggccccacgactagccgaacgcagcgcggtcgcacggacaaccgccaccgccacctacccacccgggccggcggggggcgttgcacgttccgctgcgcaggccacttttttttaaaaatattttattacattttcctcttcctttttatacgaacgaggaacggtcgcccgcagacacgcttccgcggcgccaccaccttccgccctccgctgcccgctcgcctccgcgcccgaaaggcaaagcctcctcgctcctgccccgccccctcctcgcggcgtcggtcaaaccctagcacaccgtacgcgcaggcccgcccgctcccattccccacctccacccatggcggcgctctccgcgcccctccgcgccgtcgccgccggatcccgcgtcgccgcgtccgaccccgtcaaggtctcgtgcgtgaggagcactggctcagctcacttcggctgcgccttcccctacatcagggcctcctcttcggctgcgaggaacctcgagccgctgagggcgatagccacgcaggcgccccctgccatgccacaatattcgagtggggagaagacaaagattggcatcaacgggtttgggcggattggcaggttggtcctgcgaattgcaaccagcagagatgatattgaagttgtggctgtgaatgaccctttcattgatgctaagtacatggcctatatgttcaagtatgattccactcatggcccgtttaaaggttctattcgtgtcgtggatgattcaaccctcgagatcaatgggaagaaggtcacaattacaagcaaaagagatcctgcagagattccatggggtaactttggggctgaatatgttgttgaatcttctggtgtcttcacgacgactgataaagcatcagcacacttaaagggtggtgcaaagaaagtggtgatatctgcaccatcagctgatgctcccatgtttgtagttggagttaatgagaatagctatgatccaaagatgaatgttgtttctaatgcaagttgcactaccaactgccttgctccacttgccaaggttgtccatgaggaatttggcatcgtggagggccttatgacaactgttcatgcaacaacagctacccagaagaccgtcgatggtccttcgatgaaggattggagaggaggacgtggtgctgcccaaaacataattcccagctccactggtgcagcaaaggctgttggaaaagtcctgcctgagctgaatggaaaactcactggtatggccttccgagttccaacaccaaatgtctctgttgtggatttgacatgccggattgagaaaagcgcctcctatgatgatgtgaaagcagccatcaagacggcatcagagggtgcactcaaaggtattcttggctacacagacgaggatgttgtttccaatgattttgttggtgattcaaggtcaagcatctttgatgccaaggctggtattggactgagctcttccttcatgaagctcgtgtcttggtatgacaacgagtggggctacagcaaccgggttctggatctgatcgctcacatggctcttgtgagcgccaagcactgatgttcgtactcgttcctccagtaccagtagtagcctagataagaggctgcagttttgacggccattttcttttagctgttgtttggaataaaagaccaaatgttggaacacttggaactcgcgcaaaactggaatccgattcatgacctgtgttttagttgtagagggggcaaatttgcatcgtactatatgcgggattgttgatcggatgtcgtatggttcaaaaaaaaaaaaaaaaaaaaaaaaaaaaaaaaaaaaaaaaaaaaaaaaaaaaaaaaaaaaaaaaaaaaaaaaaatcttgtcgacttgatgatatgttgatgtgggagccctgaatgaggcggtggaaaaataggatggcaatggaaaaaaaaaaaaaaaaaaaaaagagtcccatggcatggttatacccggaattgttgattgatgagtcgttgtacggtttgtcgacttaataataagttgatgtgggagccccttaattaggcggtattaatggaaatatataggatggcaatggccaaaaaaccccaaaaaaaaaaaaaaatacacccaaaaaaaaaaaaaaaaaagggcggcaaccgactagtgagctc

SEQ ID NO: 56659 - DNA, 585 bp, Zea mays
  Clone ID: MRT4577_151665C.1
cattgggtacctcgaggccggccgggacggctccgcactcgtcctcccccaccccggcagatctccccgtgaccaccggcggcagccccagcacctcccccacctcccgcacccacaacgtcggtggtccgcgcccctcccttccttccctgccgcgcccgacgccagtggtccgcgcccctccctagccacgccgagatctccgtcgattcgagatgcccgcgtgcagccccctacctgagatcgacgtcgatttggcatgtcggggaggtccgctccccacccaacccccgagatcgctgtcattgtcccccctccctactccaaccccacgctcccaccatcacttgtctcgcgttgcgctccgccgaggtgatatacaaaaagctgcgcgacgacgcagacaaagaaagcgtggtggtccagggcggcgagcatcgtcgggatgaacgagcgatgggagctcctgccgctgacgcgcatacgagtccaccaacacggaggggtccatgttcacacatgccgcgtagatgtgtttctgcaaagccgattacgtctccaccctgcctcgggtgagcgatatgc

SEQ ID NO: 56660 - DNA, 461 bp, Zea mays
  Clone ID: MRT4577_151666C.1
aacttgcattctatcttgtttacaccccataagtatactattaggcgttggtcgctacattcggtacgtgaatgatgaagagctggagcagaagtctgttggtgatcctatttttgcatgcccttttgttctctgcgagtgtgacaaaaggatctgatcggacggagagctagtggttgttctgattacgcaccagctgttcggtcgggtggacctgtgattagcttctagcgatgaggacgaccacctgcaagagatggttgctgatgtgcacggacaagggcgccatctagtaatgatgcctggacttgctgaccgaaaactggggattggacatccactagagactgatgcagtcaaccatagcctcagccgatggacccttcttacatatgcatgctatgctgcgtccgtactcctagcttgctacctgctggcgctaataggctatcaagctgttg

SEQ ID NO: 56661 - DNA, 325 bp, Zea mays
  Clone ID: MRT4577_151667C.1
ggaagggaaacaattttgaattataaatgtccctttggtttggagggaaatgaaaatacaagggggacgcaaaagcaaattccaattccccgggaacagaacgggggaactgttaacctatttataggcacgggggccaacccatacaaaaaaaatacaggcccttaaaattgggggataattttaaggccttttaccggggtttaaagggcctttatattttaaagggggggcccttttctgaaaaaaaaccaaaatttttttggttaaaagttttgggactggggaacaccttagatctttggaacattttcctttccaaaaa

SEQ ID NO: 56662 - DNA, 413 bp, Zea mays
  Clone ID: MRT4577_151668C.1
ccccttagggagaaggttcttgaaggaggagggagatgaagggggccagtcacatgctcctggaggagcccttccacctggcgtccggccttgtgccacgccaagttttatggaattcccatcactcaccaaaattagttgggacggctggggcccaatcgacactcggctggcattactcaggaatgcctcattgctggaatgtcagtagcacggtttgatttctcatggatggatgctgggtataaccagaagacccttgataatttgcggaaagctggccagaaagggaaaaagttgtgccctgtaatgttggatactcttgcgccagaaattcaggttcacaattccagtggggagccaattgagttgaaagctgcgaatgatgttatcataactgcagaaatttataa

SEQ ID NO: 56663 - DNA, 278 bp, Zea mays
  Clone ID: MRT4577_151669C.1
gggggaacaaacaaatttttatttttaaaacccaattccggtccaaaaaaacataggtgggctcttttaaaaaatcataccaatcagtttgtttgctctggactggttaaaaacagcgggggccttttttaaggtttgtgtttagaacaccaaaagggccgcttttttgaattaaatccccgaataggggccgggccagggaaaaccggcgaggggggggcaaagaacccccctaaattgggggaacctacaagaacaagcccatgttttttatttaa

SEQ ID NO: 56664 - DNA, 350 bp, Zea mays
  Clone ID: MRT4577_15166C.1
gtgttgggtttttcttttttttttttgttcttttttcttttgggggctaccaaaaaggtttttttcgggcccgggttttttgggcgtattttccccggggccgggggggtgccccttccaaagcccagttcgatgaccctgcgccaccggtgatcccccgaccttcttttggggccccgggcaaccccaacggggtgggattcccgcccccgggggggtttattaacccgggggggggaaccctccccgggcctgggggccctcccgggggcggggggggaggcccttttcgccctggggtcgccccccccaaaacccggggccccggggggaccaaagggggggggggg

SEQ ID NO: 56665 - DNA, 508 bp, Zea mays
  Clone ID: MRT4577_151670C.1
caggtcaggttttcactaagctggttggaagtccatagaccctgtagtacagaacagtcatccgaacatgatcacgcgttagaattattggagtggagcagctcactcgacaaaaatgtgtcaccaaccgatgatttattgcatggtcaactgcacttaatgttcttagttgttgggggtcttcttctccgccgaaggtttttaagtcataaacaccttcgataaaatgccacaagaggtctgccccacttccgccgaaggttctcaagacgaagatctcggaaagaggcagcaatgcagaacgacgaagctagcttcgactcaaatcaagcaaaggaaaagactagatagaccttgttggtttaaattgcttatagacaaatgttcaagggcatgtatgtaattttacctgggctgcgtcccgtacctagaaatagatgaacagtatcaccgtactggttaagctggattgtaattactctctcgcattcacgccttcgagcaagtc

SEQ ID NO: 56666 - DNA, 1503 bp, Zea mays
  Clone ID: MRT4577_151671C.1
gttggaacagctctgtccactatgtattcgaagtgtggaaaccttgaagatagcatggttgtcttcagaaggatgcctgatagggatgttatttcatggaactcaattatttctgttttttcacaacatgggcgtggaagtgatgcacttgacatgtttgaggagatgaagctagagggaacggcaccagatcatataacattcattaatttgctatctgcttgtagccacatgggcttagttgacagaggctggttttattttagggcaatgaccaaagactataatttaattcctacacttgatcactatgcttgcatggttgatattcttagccgtgcaggccagttaaaagaagcaaaggacttcatagattcgataactattgaccatggtacatgcctatggcgtatagtcctaggggcatgtcgcagtttacgtgattttgatgttggagcatatgcaggtgagcagctgatggagttaggtactgaggactcatctgcttatatactgttatcaaacatctatgcccccccgtgcaagtggacttaggttgagcgggtgagacatttgatgagactccgaggtgttagcaaagatctggggtgtagctgggttgagctctacaaccgagttcatgtgtttgttgttggggaacaacaacatcctgaagcggaaaatataaatgtagagttgataaggctagcgaagcatatgaaggacgaagagtgtttcctgtttgatgacgaaaaggatgaactaggagattctcatgaaggtgaacaaatggaattgatatcaacaacatattactgagttcgcaagagattgatcccatgatgtcagacaaacaccctgttaaagcaatgtgtgacatccgtgatttggggttattttatgttgtattttcttttcctgacaaatccaaccctcctgtttttgacaagtgtgattggcactgtgtttcacatattgaagcagcttgggatcttgcatattctattgcatctgtgtgttcggcgatggttctgatcccaagtcacagatccattggtaagccatctacagaaaatgtgctaaccgtgctggcaagaggaaggagttctacacaaaattagaggagaaacataaagctttggaagcaaagaaggacaaggctgatgccaggaaaaaggagttgcattcatgaaacatttgatccatctacatgcatatcaaccgccagatgagacgcaacatgttctaaagattgaggctcattctggtggcctaaatgatatagcagtctctcgaccaaataagcaaccttttgatgtcacctgggagatgataaactgattaagaaattatttacactcgaaggacacaaggtgactgtgtattctatatcccagtgtaatctttattctaaacaagatcgatgttattacaatgaatcagaattgctgaatcaagagtttgtataacctataaacctttatgaattgctgaatttttttc

SEQ ID NO: 56667 - DNA, 382 bp, Zea mays
  Clone ID: MRT4577_151672C.1
aaacccgggggaaaaaaaacccccccttttggcacaaacaggggttattttgggggccaaccccaactaaaaatttcgacttgcctatgcaagggaacgggaaaaaaaaaacccacatgcttttgggagcataaaaaaatcccggggcgccccccctttccgatccaaaagaaaaggaagttgcataacaaacccgtggggcttaattgccggggacaaaattgggggggaacccccacgccttgttgttgcccgggccaacgaaggggccaggggggtttttggggggccccttgccggggacaatggcctggacaaaaaaccccaacatggaaaacatggggggggggccgtttttgagctccttcaacttgggcccggg

SEQ ID NO: 56668 - DNA, 163 bp, Zea mays
  Clone ID: MRT4577_151673C.1
ggtgggtgctcgtgcaagctagggtagggcgactcgtaggcgccgcacctgcgaactggatggagcaggcgctggcgccttccctgacctaagtggtagattctgatacccctcttcttggggacgtgcggcacctttttttttatgggcacgcgacggcgct

SEQ ID NO: 56669 - DNA, 298 bp, Zea mays
  Clone ID: MRT4577_151674C.1
gcctgtgcaatttctatctttaatagtgcccggtgagattacaactacatgcatggtacaatttgccttgaaagcgtaacacatacacacagagaggggagggagagagatatacagacacacaggaggaactcggataagacacagacaaatggcggttaggaaaacgagagaaagagaaacaggagatcacatgatctaacactgcgtgatactattggataacgccgcttctgcacagcggccacaacttgccgaacatccgactcgaattcccggcgtggatggggcggaacgc

SEQ ID NO: 56670 - DNA, 428 bp, Zea mays
  Clone ID: MRT4577_151675C.1
cacacacgtctgctcacgcgtccggagccaccaagcgacgtgagaggaacgtttagggaaagagagaaataactaaccttaatttttgcctatgtataccatcttacgaattgcactctatgaggactctaggcccaaatatatacatcgatgcaggatagaggatagagagacagaccgtgtacaacaaagactatatgagaccaaatacaacaaggatacatgcatagacatctaataattaacagtgtatacttgcaaaaaaaggtgtcaacactttatattatccttgtcttaatcatattgattatgacaaaaggttgattgtaacactatcttgagttgtttttcgcagtggcatatgaatttggggtgcctgtgttatttgagccagtctcagtggtgaagtgtcgaataattgcaccagt

SEQ ID NO: 56671 - DNA, 333 bp, Zea mays
  Clone ID: MRT4577_151676C.1
cccacgcgtccggccacacgtgcgcccacgcgtccgcgcacacgtccgtacacgcgtgcggggtattctccctcttgccggttcccaataaagatcagctgctcatgatgtcctgcagagcgagaagaaggcaatggcgtgtcgacagctttcttttcacctctgagtccacgaactaggggcaccctgacaagctgtgcgactcagtgtcagacgccgtgcttgacgcatgccttgcgcaagacccttacagaatggtcgcctgctagacctgcaccaagaccaacatgatgatggttgtctgctagatcacgaccaacgcgaccgtggact

SEQ ID NO: 56672 - DNA, 369 bp, Zea mays
  Clone ID: MRT4577_151677C.1
cccacgcgtccggtattggatactgtacaaaacccaatgcaaaatccattatcaggttatgggtagattctgagattctggcacacaatccaatgcagaatttaagaggtgtttggttcataatgggattctagaatgaaattctgaaaatgaagtacgaaacaaacagggcttaagttggccaagtttgcaactgctttaggtggccatctgaagcataaattaggaagttccttaaagtgcatgtaaattttctaggtgaatacgatattacacaacaaaattaattcgcaaaatggtccagcaatgtgttgcaattgatggcattcacatttttttcttgttccttggcccatttagttgactaca

SEQ ID NO: 56673 - DNA, 799 bp, Zea mays
  unsure (1)..(799): unsure at all n locations
  Clone ID: MRT4577_151678C.1
ctcgggcggcggatccaggcgtgccggccgctccggagcttcgattgggccgtcccttttccggtcccggccagtagctccgggtcggcgtccgcagcctgggcgggctcctcggcacccacctgacagaaaggcgagtcccgctgaggggagtcgtggttggtgcgtgcggagttgggggagcccgaagcggaggtggaggatcgaacggccttgtgcgcctcccagtcggccagcgggatggcgaagtcgtcgggtccggagaggccgagactttcgcacaggaagcgaaggtccctgcccccgtcgccgttgccgccgatgcgaaagctgttgacgacgtcgatggagcaggcaagggagccggcgagcgaggcccgcccggaccccggcgcggaggcgacctgcggggacggcgggtactggcagtagttggtggcgttgtagctgatgttcttggacgcgttgcggcggtcgagccggcggaggcggcgcctggatgatccggagccggagccgcccgacggcgacggcgcggggtcctgcgctgagaagggcgggcccatcggtggcggcctcagctcatgggcgccctggagaacgcaggggcgaggatcgaggggagaacaccgaaagcgagaggccgagagctcggcttggggacgcggggagacggcaagcggcaagcggggggaagtttttttttttgtgagtggccgcggctgaggcttttgggtttttcgtcggtggcgtgaggtggtggaggntggccgagcgtcnnccggaaaagcctcgaggg

SEQ ID NO: 56674 - DNA, 777 bp, Zea mays
  Clone ID: MRT4577_151679C.1
atttttcggatgcagcagacctaacccaatagtcttctccatatactgtattattatcggccttcaccaagaggtgggtagcgcaggatggccgatgatgatccagtgagattcaacatctcgtcgcctaccgacacacagcgcttccggcaattcatcgatgacctgcgcgtgaggctccgagacgagagccggccgtacgttatgcaggacgccatgaggctccgacagcaggaggacgacccaactggatggctgaatctggagctgagcacctccgaacacaccatcaccctgaggctgcggaccgacaacctctacgtcgtcggcttccgcaacggtgctgggacgtggtttgagctccggcacaacgatggccatgcctccaggataccgggatcgaccgccctccgcgtcagcgagggctacaccggcggtgacaacaccttggaactagatgagagcgttcaaatcgggcgtggggctgtggaggaggccatcaatgccctagctgcttacgacggaacagcggcagacaaggacctcaaggtctggcttgtcaggctgctcgtcaggttcgtcgagtccatccgcctgaacgccatcgcggatcggcccttggacgggccggataccggcctcacatcgcagctggtctccctgatcaagaagtggcagaagctctgcaacctccctgctggcggtggccaatgacgtcgtgcaggacccggagacgatggctcggcgcttcaagcatacgcccccggcgtcggcgtg

SEQ ID NO: 56675 - DNA, 190 bp, Zea mays
  Clone ID: MRT4577_15167C.1
cttcttataagggactccgctacgatcctaagatgtagcttagggacgcgaatgttgagacataccaaagagcgctaatacatacacacaggcatggtggccatatgctccccaaccgagtcaagagccggagaactctaccagccaacgagcaccagggtgcaatcgtctccacggggctggctaaaca

SEQ ID NO: 56676 - DNA, 215 bp, Zea mays
  Clone ID: MRT4577_151680C.1
ttataaaagcgggcgcccgggcacacaagtctgtctacactgcacacacacaccacacgccggcgagccatccatgcacacacgtacagagcctgatagctcgggcgcacatccatccaatagccgggctttttttaggggtgggcatgaaccgaagaccgacggcgctggaggccctggtgttcttccaggaccaggcggaggtgggccacttt

SEQ ID NO: 56677 - DNA, 509 bp, Zea mays
  Clone ID: MRT4577_151681C.1
agtgaggttacaggatcggatcctacagcatagtctaccatgcccaatacgtgtaggacgctacggctactgctggtaaacgccgaggtcgaacgcctccttgtagacaagcagcgagagcagtcgctgcagacagtagactactgcatgaacttgcggataaagcataccaagcgcgctttgaccccactgatgcgcgtccgcgcgagacacgacagcgttcgacctcgcacttgttgatgccagggtcactgcaggtggccctggacgcgctcaacgtcacaccggctccggacgaagggcgccaccatgaagcttatccttgagaacatgggtagacgggcgggctagaggaacgtaaccttcaagttcgccaacacgtaagcgttacaggccaacagagccgaggcgaaccaggacggacgacacacgcgacagaccacctgcgagagccggacacgggacatattgctcctcctgatagcggtgaagatgacgactttgcctga

SEQ ID NO: 56678 - DNA, 953 bp, Zea mays
  Clone ID: MRT4577_151682C.1
ataagatgctttatcttctttagatttatgtctagatatatatcatgtaatagtgatgcggataattgcagtttagcgaacattgtgggcacccgggcaccgcatttggagccacattagctcacaagtctaatcaatacttacatatatgctgtgtctcctattctaaaaccacaagttttgttgggccttgcgcaaaacaaacaaggtccacaaatcccgaagtctgtgtcctcccattcgttcggtttcgttcttcatttcatcagcgagcacgagaaaagatcaaggacgtggcgggctggacttgggaccggcccaggcgcactcgtcccagccctccgccgcggcgtccgtgtcggcctcgtccccccgcccgcgcgcgcgcgccatggacttggccaccgccaccacgagccccgccggcacgtgcgcgcacgcctccagccgccgcagcgcctcgccgtgaccgtggccgccgccgccggtcccgccgcgcaccgccacctcccgccacagcgcggcggccatggcgacgcgcgcggaggcgaggccgtgggcgtgggcccggagcgcccgcgccgccgagtcgaccgccgtggacacgcaggagctcgccccggactcgtacccgcactcgtccggcgccgcgaggaggaggcgcgtgcggcggtggcgcgacgcgaggaagttggcgccgtgcaccttggcgtcgcaggcggcgcagaggaaggccgcgtccgccgcgcagtgcacggccgcgggcgcgccgcagagctcgcagcggcagccgccgcggtggtgacccatcggcgggtcttcctcctgtccgcctatatatatatgatttggctcctgcaccgacggctcgatggagcgcttgacgagcgagccgctctcgatctttggaggtgatcgatggagggcggaagcgaagcgattaagcgtcggaa

SEQ ID NO: 56679 - DNA, 519 bp, Zea mays
  Clone ID: MRT4577_151683C.1
ctccagccctagcgcctccgctcctctcccccgccgccaccccttccccgcatcgtctcccacgccaagaccgccgccgttcgtcaagatggtgctgcagaacgacatcgacctcctcaacccgccggcggagctcgagaagctcaagcacaagaagaagcgcctcgtgcagtcccccaactccttcttcatggatgtcaagtgccagggctgcttcaacataacgactgtgttcagccactctcagaccgtggtggtgtgccctggctgccagacggtgctctgccaacccaccggaggaaaggcgaggctcaccgagggatgctccttccgccggaagggcgactaagctgcacgcctgtttatgggaaaaatgaagccccgctgaaccttacttttcaagtaactagttatccccgatgtgtactggtcaattttttgttaattatgctgcccgtttgccagcctgaacgttgtagcaacgtgttctatgtcatgcacttttgagtcgcctgttgt

SEQ ID NO: 56680 - DNA, 173 bp, Zea mays
  Clone ID: MRT4577_151684C.1
tacgaggacgaagaggaggcccaggtcggtgtcgcccatgtacgagggcgcgcgcgccttggagggcttcaccttggccttggacggcgccgccgacttggaggacttgggcttcgccgcgggggcgttcatggtggttttcatggcggacaccgacgtaagtttttcctttt

SEQ ID NO: 56681 - DNA, 217 bp, Zea mays
  Clone ID: MRT4577_151685C.1
gggggctaaatacatttgacacgggatacatgcacgcatcttactgatgtacaaaccaaaaccgactagatctgacgacctgacgagatgatcagacgatggactgactagctagctactatgttcacacgtacgcattcatacgtgggaccccaacacacaccataaatatacatatggggaccacctattacgtcatgacactccagcagggcct

SEQ ID NO: 56682 - DNA, 1694 bp, Zea mays
  Clone ID: MRT4577_151686C.1
tggtggctccacaactagcagattccctgtgctgtgaagaaggaagcgtctgtcgcggagctaaccgacgagcagaggccagatgcagagtcgcacgcttccataaagtctagaaggagcgtccgccgaaggcaagagctagaggcagaggttgtggtcaagaccaccttccacggcaaggaggagaaggactaccagggacgctcctggatcacgccgcccaaggacgccaaggccaccaacgaccactgctacatcccaaagagtgtgtccacgagtgggtcggccacaccaaggggtctcggccatcaggtttttttccaaagtatggacatttgctgctgtctgcaagtatggattgcaagattaaaatctgggatgtgcttgggtcacggacatgtatgcggacttatatggggcactcaaaggccgtaagggatatatcattctctaatgatgggactaaattcttgagtgctgggtatgacaggaatatacagtactgggatactgagacagggcaggtgatctcgaccttttcaactgggaaggtcccatatgttgtgaagctcaatcctgatgaggataagcagcatattctccttgccggaatgagcgataagaagattgtgcaatgggatatgaagtcagggcagattacacaagagtatgatcagcatttaggggctgtgaacaccataacttttgtggataacaacaggagatttgtgacctcaagtgatgacaagtctcttcgtgtgtgggagtttggcatccctgtggtgattaagtatatcagtgagccgcacatgcattcaatgccatcaatggcactgcatcccaactcaaattggctggcagcacagagcttggacaatcagatactgatatacagcaccaaggagaggtttcagcttaataagaagaagagatttgccggacatattgtggcaggttatgcttgtcaagtgaacttctcacctgatgggaggtttgtgatgtctggtgatggtgagggtagctgctggttctgggactggaaaagctgcaggagatttaagactttgaagtgccacaacggggtttgcattggatgtgagtggcatccgttggaaactagcaaggttgcaacctgtggatgggatggtgtaattaaatactgggactgaactttggcagagatattggttgagctcctgggaaaggttttgtaacaatccgattcacgccgaatgtcatggcatactgtaagtcacatgctcgacaagagaatcccggaggaaaaaacatgttgtgttttttgaggttacatatatgggagaaaaaggtggggttttgctgctacctttgtgttggttctgccctgttagatgtccaaatgtacaatattcgcaccatattcaaatttttagttgtatctctgccactagcaacttgtttgcggtttctggtaatcctgttccttcgaacgtttgtaccatctgaggaagtgtctgttgtgtagtatccccctccggtctgttttataacttaggggttgtttgtttgggattataatctgtccagatcaaaataagttaagattatataatttgggcagattataatcacaaacaaacaggcccttagatagctccctattttaatagctggggccaagtgaacaggaaataaatagagattgagttgagacc

SEQ ID NO: 56683 - DNA, 241 bp, Zea mays
  Clone ID: MRT4577_151687C.1
ggcgtccctgtggtccaacgtacgctgtacatggcgcaacacgtaagcttgaacgcgacattctatggcttgatcataaagggcgaatgcatagggcggaacgatactcaagagctagacgacgggcatctaatgcacgatccaggagtgtcgtcgatcaacacgatctatacgaactggaatgattgcatgcatatgaggattatgacgaacgacgttcagtgcctgtctaaagagatac

SEQ ID NO: 56684 - DNA, 478 bp, Zea mays
  Clone ID: MRT4577_151688C.1
gagctcactattttgcggccgcccttactatcactatcaccacgagcttatcctcccgccgtacggcaagggcacgccaaggtcgcgggcggtgccgttcgataccattcagatcgttcaggggcccgtatgcgtccaccgacgacgaacaggaggaagacgactacgacgaagacgcgtactaggtgtagcggtagctgcgcttttgccaggtcagctttgccgacggagcctactctgaggagcacccgttgtttctggccaggggcctcggcatataccggctcagctcgggcctgctcaccgccgactgctgcagatgtttcggaggcagcaaccgcatcgcgagcggcggtagctgcggtaatttggtgacatcggcgaacggaggggaccgctccggcatatagacgcactacaggaagatgatcgaggaggacccctgcagcggggtttttataaggaactacgcacagtt

SEQ ID NO: 56685 - DNA, 480 bp, Zea mays
  Clone ID: MRT4577_151689C.1
aaccagcgaaactgcaacatgattattatctttagcacaaaaagtactcccataccttttggttttgcacatgatcacgttaatagattatgacgggcatcaaaaaggccctccatgcctgactaaacggtgaaacaaaggggggccgttgaaagaggcaaagactcaccacacgaggcgagcattctggggttgcacccccacacgcctaactaattctttggcccctcggttgggtcatcttgcccggactcctgccactggctgtcctacaacgtgaactcggccatgagcttcttgagcgactacacgtccttggtcttactgaccaggaacgcgccggcgaccgtgaccaacaggagggtgttgaccaagaagtggcccatctggtcgacgaggcccacgcccgtcaagctgtacaccaactacgccatgaagataccaaccatggtggcccgacctgcacaccggacgcgtggg

SEQ ID NO: 56686 - DNA, 264 bp, Zea mays
  Clone ID: MRT4577_15168C.1
gcttaaaaaaccatgagaggccacggtcattcgtgaacagatcgctctgtgtataactgcatttatgcatcatcacatgcaaggtacagcgggtgggcgcgaatgtttctatccgtgactatgactggcagaaaggatcaaagggatggggggatcatgctgttacagggcctctaatctatggcgcgctgtgtgctgctcccaaacactagctacgcttaaaccgacttgcaggtgtcgaactcggggagggactcggccaca

SEQ ID NO: 56687 - DNA, 1049 bp, Zea mays
  Clone ID: MRT4577_151690C.1
gcacgaggtgtcgcggtccgacgaccggtgtcgccgccgtcgccgccgccgccgctctaacgccaggtgctgaggccttcgccagcctctttgccggcgacgaaaacccaccagatcttacagtcctttcaggatgaccaagtatacgaggaacaaaaaaagttcatcttctcacagtagttccagattcaaaagagtttccagaaaggagatgtcatttgcagtggagaaatacgcatggacaaatgcaacttgtccagtatgcatggaattcccacacagcgctgttcttctactctaaaagaagcctctgaggacccagatgcaatagagcttatgtgtcccctatgccgtggcgaggtcaagggatataccttggttgagcctgctcggaagcagctgaatcgcaagaggaggagctgcatggaagacggctgttcgtacatgggcacatacagagagctctgcaagcatgtccaaaagaagcaccctactgcaaacccacgagctgtggaccccttgcatgcttacagatggaagcggcttctatttcgaagttcattgcatgatatgatttgttcaactacttcagaggctatgcgaaggttttgttctcacatgctgcagattgaagaggttgtggctgctttgcgagagggtggtgatcatcgtggcgctaccaatgacgatcaactgatccatgatctcttgacctctcgctgaaatgtgagaacctgtgttgatcctgcaggcaatctttgcatgaatccccaacttggcacccctgccgattcacattttctgacccgacaaagcaaactagtcttcatctgtcctcaatgaaacagactgttaaagctttgatggatttattcattcacagtgataatggctggttgaatggcacggggctttttttcgtactcatctagcctctagtgtgtcatgcgatgcactgttcctgtgcacctcccactgtatgactatgacataactgtttcttatggaacgcaatgtgttcctgttcaaaagaaaaaaaaaaaaaaaaa

SEQ ID NO: 56688 - DNA, 1277 bp, Zea mays
  Clone ID: MRT4577_151691C.1
cccacgcgtccgctctccgcgggccgaacaaccccagactgggccggccggccggccgtcgcattttccttccttttgggaaaatccttccgcacgaccccgcgttccgccttcgtttctctgcctctcgcctagtgtcgcggtccgacgaccggtgtcgccgccgtcgccgccgccgccgctctaacgccaggtgctgaggccttcgccagcctctttgccggcgacgaaaacccaccagatcttacagtcctttcaggatgaccaagtatacgaggaacaaaaaaagttcatcttctcacagtagttccagattcaaaagagtttccagaaaggagatgtcatttgcagtggagaaatacgcatggacaaatgcaacttgtccagtatgcatggaattcccacacagcgctgttcttctactctgttcgtcacatggcaatggctgccgtccatatatttgtgcgtccagctaccagcactcaaattgtcttgatcagcttgtaatgtcatgcagaaaagaagcctctgaggacccagatgcaatagagcttatgtgtcccctatgccgtggcgaggtcaagggatataccttggttgagcctgctcggaagcagctgaatcgcaagaggaggagctgcatggaagacggctgttcgtacatgggcacatacagagagctctgcaagcatgtccaaaagaagcaccctactgcaaacccacgagctgtggaccccttgcatgcttacagatggaagcggcttctatttcgaagttcattgcatgatatgatttgttcaactacttcagaggctatgcgaaggttttgttctcacatgctgcagattgaggaggttgtggctgctttgcgagagggtggtgatcatcgtggcgctaccgatgacgatccactgatccatgatctcttgacctctcgctgaaatgtgagaacctgtgttgatcctgcaggcaatctttgcatgaatccccaacttggcacccctgccggttcacaatttctgacccgacaaagcaaactagtcttcatctgtcctcaatgaaacagactgttaaagctttgatggatttattcattcacagtgataatggctggttgaatggcacggggcttttttttctactcatctagcctctagtgtgtcatgcgatgcactgttcctgtgcaccctcccactgtatgactatgacataactgtttcttatggaacgcaatgtgttcctgttcataaaacgaaatcttgccccctcgttcccgg

SEQ ID NO: 56689 - DNA, 849 bp, Zea mays
  Clone ID: MRT4577_151692C.1
aacattattcctttttcgaaccattggagtcactcttagtcaacggcttcctttcgttctccgttccctatcggcactctttggtgcgcccggcgcttctccgttcgttcgccggcgttcgtggcttcgcgacctccgtctgatcgtctgcacccatggccgctgaaggcgaggcgtcaatgtactacacgacggacgacgcgctctcgctcgtcggcttcggccgtttccagaccctcgtgctagcttactccggcctgggctggatcgcggaggcgttcgagatcatgctgctctccttcgttgggcctgccgtggaggcggattgggggatatcaggagcggagcagggcctcatcagcagcgccgtcttcgccgggatgctcatcgggtccatcgccggaggcctcatcgcggacagatacggcaggaggctatcatgccagtacttggatggaggtggctgcttgcattgtcctcagcgccatgctttgttcttctcattttcttccctctaacacctgaatcaccaaggtatctttgctcgagaggtaggactatggatgctacagttatcttggaaagaatagcaaggatgaacaaagggactctccctcctggcgtactaattttcagaccagaaaagcatgttgacaacaaccttgggacttctgagacagcacttctaattgcagaagataatactggcattgaagaggacacaagttccaagtccagtggcattgtcgcatttcaggcactctggtcatatgatctgataagatcaacctttcttctatgggtcatctatcttgcaaattattttacttattatggggcaatattgct

SEQ ID NO: 56690 - DNA, 533 bp, Zea mays
  unsure (1)..(533): unsure at all n locations
  Clone ID: MRT4577_151693C.1
aaaaaaaaaaaaaaaaaaaanaaaannannntntaatttnntaaataaaaataaacgatgggtacctcgagccggccggggaatatttccatactcgctcgtcgacgatcgagactttgtcctcgtgaatacaggggcgtgatcgagtcgtcatccagtctcgctgcctcctgaaacgcaagcaggcggcgactaggacacctatgttgtctaccaggctcgctacgcctcggacggtagcagccggagcgaagaattcggccgccgctctccacgtataaccgagacatagagacagtgaaagtgaaggatgagctactatacgcggaatgagggacctaatgttaagtggctgatgccttagtggtgatcaaaatgtttacctatagtgctactgaacatgctggtattcgaaagaaggtatatgaggttacaatgtgccccataaggcatgatgagggaggagagtgattgctggagtcgcagaagatgtgatagcatctgcgggcatcgctcccggcccaaaagagaaa

SEQ ID NO: 56691 - DNA, 816 bp, Zea mays
  Clone ID: MRT4577_151694C.1
actcttagtcaacggcttcctttcggtggccggccgggatcggcactctttggtgcgcccggcgcttctccgttcgttcgccggcgttcgtggcttcgcgacctccgtctgaccgtctgcacccatggccgctgaaggcgaggcgtcaatgtactacacgacggacgacgcgctctcgctcgtcggcttcggccgtttccagaccctcgtgctagcttactccggcctgggctggatcgcggaggcgttcgagatcatgctgctctccttcgttgggcctgccgtggaggcggattgggggatatcaggagcggagcagggcctcatcagcagcgccgtcttcgccgggatgctcatcgggtccatcgccggaggcctcatcgcggacagatacggcaggaggaccggtttccttttcactgcagtggtcactgccgtatttggtttgcttagcgccttctcgcccaactacgcatccttactcacccttcgctttgttgttggtctgggattgggtgctggccatgtgctatctacttggttcatagagtttgtccctgctgccaaaagaggtacctggatggttgttttccatgcttgttggactgtgggaacaatattggaggctcttcttgcgtgggctatcatgccagtacttggatggaggtggttgcttgcattgtcctcagcgccatgctttggtcttctcattttcttccctctaacacctgaatcaccaaggtatctttgctcgagaggtaagactatggatgctacagttatcttggaaagaatagcaaggatgaacaaagggac

SEQ ID NO: 56692 - DNA, 392 bp, Zea mays
  Clone ID: MRT4577_151695C.1
cagcccaaaatgggcgcgaggtgggactgtcattacattaaaaaggccaacaccctccaaggttccaatacaatgcctgacccctgacatgggggaaaggacctcacggtacggtattgcgatgtaaaaaaacaccataacgccctgctttatggaataattttactgtgctctaaaccagctgggaaggagtactaacgcccaaatttttttgtatgctccaccattaatataaccgcccgcgttctgtccatgtatttttatataaaagaaacatggtgcttgggtggaacccaatataagtttgacaactgaaacggaaaaagaatccgtgcaactgcagagtcttgtatcatacgaggcattctagggcctgaaaccttcccttgggg

SEQ ID NO: 56693 - DNA, 348 bp, Zea mays
  Clone ID: MRT4577_151696C.1
agaaatgatcgacagctacacagtgaatactactgtagtttgcaagaagtacacaaggcgccactgatggcacggggcataggcataatatcttgtttagacgtgtcaaagactgctcgaatattttaaacctgaagcacgactgtacatgtattcatacgtggaaccagtgcgctcacctgtaagcctcatacactaggaacgttgcacatcttattcgcaacgaatatcgttcagcctggtatctatagagcctaactctgtagaagagatcgttagctaaacattatgtctgttgtaactcagataaggatctccacttctgatattgagtactgatattttttc

SEQ ID NO: 56694 - DNA, 423 bp, Zea mays
  Clone ID: MRT4577_151697C.1
cctgaactgatccttgggttcaacgctttattgcctaagggctatgcgatcaggctgggagaagagaataaacgtggcgattttgcgcaagctatcaatttcctgaacatgatatccaatcggcttcagcatgatgaacaagttcacaaggcattcttggacattctgaacatgtaccgcacggataataagtgtatccaagacgtttaccatgacgatgctatgctgttcaaagaccataaagatctgcttgaacagttccagcacttactgcctgatactccagtgggtccacaagcagttgtctcaatgggtggtttggttcaacaggaggacacgagcgttatagagcctcctgcagctaagctccttcacagtgataacaaggacatagtttacctgtcacatgctgaccgcgatttt

SEQ ID NO: 56695 - DNA, 889 bp, Zea mays
  Clone ID: MRT4577_151698C.1
cattgttcttctcgtgaccggccggggactgtggatgcttgctgctgccatcttgcatgctcttgtttattaccggggccataattttacttgcgaaaggcataatttttcctgttcgtatcaccgctggaggcagttgtagtatcaccggctgacaggtttgatatggaagcccttcctcctaccttgacatctgcttctgagcagccacctctctatgatggcacaaccagattgtatatgtcctacgtttgcccgtatgcgcaacgggcatggatcacgaggaattacaagggtttgcaggagaagatcaagctagtccctatgaacatggcagataagcctggatggtataaggaggtttaccccaacaatcaggtgccttcgttggagcacaacaagagggtcataggagagagcttggatctgataaagtacatcgatagcaacttcgacggacccaaacttaccatcaccgacgatcctgaaaggcaaaggttcgcagaagagctgctggggtattcagacgctttcaaccgggcgtttctcgacgcgcttagatctgagggggccatgaccactgaagctgttgctgctctggacaaaatcgacagcgccctgttaaaattcgatgatggccctttcttccttggccaacttaatctggtggacattgcatacgcaccattcatcgaaggttttcagatattttttgctggcatgaagaattgtgacatcacccgaagggagagttcacatacagaaattcatcgaggaaatgaacaagattgacgcgtgcacgcagaccaagcaggaccctcaagtgctgcttgctctcccaagaaaaaagttggggatttaaggatgcatgaagcacctgatctgagct

SEQ ID NO: 56696 - DNA, 460 bp, Zea mays
  Clone ID: MRT4577_151699C.1
aaaaaccaaactttataaagagccaaaaataagggggcaccccccccaaaaaaaggggggccgtctaacgggaaaaaaacaaaaagaaaaaaaaagggaggggggggggggaccccccaaagaaaaaaaaaaaaaaaaagggggggggggggggggaaaccccccccgggtgggggcggaaccggggcggggggaaccggcccgggcgcccccccaggggggggaagcccaacacacggggggccccccccggggggcccgcgccaggaaccaaacttggcaaaacggggggcaaagctgttgccgggggaaaatggcaacccccccacaagaacaaaaaaaaaaaaaaccggaggggaaaaaagaaaaccccggggacccaaaagagggaacaaacccacataaatgggggggggcacacggcccgccccccagggggaaaacccgacaagcaaagggg

SEQ ID NO: 56697 - DNA, 112 bp, Zea mays
  unsure (1)..(112): unsure at all n locations
  Clone ID: MRT4577_15169C.1
gggaatgcagcccaaatcgggcggtaaantccgtccaaggntacaanttcttcacgggcnanccgccggcgtgcacacacatcgtgccgcgggacagcnaccgcagcaantt

SEQ ID NO: 56698 - DNA, 444 bp, Zea mays
  Clone ID: MRT4577_1516C.1
tcgttcatctcaacacacaaatggacaacagaggggtgagttggaggacgctggagaatatgaagacgaacagggccgacctgaggaagacgacggtgtgtgtgagcatgcgggaacgggaccataagatacgagctcatcaagatgctgctggtggacggatacggctgataagacgacatgtcaggaactgagggaacatggacaagaacttatacctgacggtgctgctgcagtgtgaggccgttgacggctctccgtgccggcatggaccaggagggtatcttccacgacagctggggcggatgtgattactccttcatgggcagccaccctgagaacctgtcgtgacaggatccagagaatgagcatatcgagccggccaggcgatgcacgctgaacgctaagcgatgttgcacgaaggcacgaacaacgcgactcgtg

SEQ ID NO: 56699 - DNA, 131 bp, Zea mays
  Clone ID: MRT4577_151700C.1
gaccaacatccagcgcagcccgctcagttgtatcccaccaacgtccgcgtgcatgcgatggcacctcatgctcctagtgccacctgaatgcactgcaccggccaccattttacagcaacgcgactgagcta

SEQ ID NO: 56700 - DNA, 787 bp, Zea mays
  Clone ID: MRT4577_151701C.1
gtccgcctcctcctccccgtttcccctctctccgagctgcagcccgcctcgccatcgttacctcccacgcaaaccctaagcctaggcaccgccgccgccatggccagcggcaacgtgtccaccgtctacatctccgtcatcgacgacgtggtcgccaaggttcgtgaggacttcattacctacggcgttggtgatgccgtcctcaacgagctccaggctctctgggaaatgaagatgctgcactgtggcgcaatctcagggaacatcgaccgcaacagggctccccccgcttccgctggaggcgctcctggtgccggcgcgaccccacccgtgcacgacctcaacgtgccctacgaggccacgtccgaggagtacgccaccccaaccgccgacatgctgttcccaccgacgccgctgcagaccccgatccagacaccacttccagggattgatacagggatgtataacatacccacggggccgtcggactatgccccatcgccgatcagtgacatgagaaacgggatggggatgaatgggtctgatccaaaaactggccgtccaagcccttacatgcaacctccatcgccctggatgaatcagagaccactggggggttgatgtgaacgttgcttacgaggagagccgtgaggacccagaccggatgatgcaacctcagccactgactaaggattttctgatgatgtcttctggaaaacggaagagggatgaatatcctggtcagcttccttctggttcatttgtgccacaacaggatggatgtgca

SEQ ID NO: 56701 - DNA, 595 bp, Zea mays
  unsure (1)..(595): unsure at all n locations
  Clone ID: MRT4577_151702C.1
aaancggccgctcgtcgtattctagttattttttattcttttatttcgacttgcggtaagaatcttactcagctggaaagacgaaacatcccactccaggacatcaggcacgtatgtctagcagcttgtgcacatgcccgataacacatcatctcacacaccaacatgctatcatacacatctcaaatgaccacacctactttgtaagccttctcgggggtactgggcgcccttcttgagggacttgagcgtccttgctgccgtcgctgtccgtcttgatccgcgccttgttgaccaggagcacggtagcggatgtcggagaggaccccacccaactccatgttgacgccaacctgcagcttcacctagctcctcgccggttttgcgatcgccaccagcacgtgaagcaacaatgatgctgcgcattcttgctgtcctttcgcgcgcgattccctgccaacttcaaaacctcggtggcgaggcactccacaacggccaccaggtacacggcagcgccagtgcccacgctctgcagcgtaccggaccttcttgaggtagcgcccgatccagtccacgtggaactggaccccggtct

SEQ ID NO: 56702 - DNA, 367 bp, Zea mays
  Clone ID: MRT4577_151703C.1
ctagctattcagctcgcgtccgaccctaaaaactcggccgacacaaaccggggggacaataaatgggtatgggggccctaaccactccgacgaatcatacgagggccgcacatgcccggcgaggctatatcttaagcaaccgtcgcctccctgaaacccttcccctggtgatacaactcaggccgttcattccgtctttccgtacggatatgagggccgatactaccaatccgaccacggggcccgggaaatcaatgctggagccggttgacgatcaccagcttctgcgcatctcaccaacggaccgtctaccatcggcggcggcggaagataacgatgaagcggaaccgagcttcgtgtgcctgga

SEQ ID NO: 56703 - DNA, 618 bp, Zea mays
  Clone ID: MRT4577_151704C.1
ggaaaaaaaaattttggttaaaaaatcatttaaaaaaaaagaaaaattttttttttataaaaaaaaaaaaaataataattttccctttttaattccaacccccccgtgaaaaagggggagcgaaaccagtggcttgggaggccccggggaggatataaaaaaataaaggaaaacccgaaaccgcgggggcctttccttggggaaggaggggggggggaaaaaggacttggttaagggaaggccctttcttgggggacccaagaagggggtaaaggggggggccgttacccccaaaaaaaacaacccgggggagggcccccaaaaaaaaccggggaaaaaagaaaaaaaaaaccccggccccaactttggaaaccccttggggaaaagccgccccaaaaagggcctcaagggaaaaccccctaacccccccaggggggggggggctcccctgggggagggcccccccctggggcccggggggaaacaccccccaccccaggtggcccccccccataaaaaaaactttaacggtttcggccaagggggggggggaaatttaaggccccccggaaaaggggcccaaaaaaaaatccgaccggggggccccgccccccccaa

SEQ ID NO: 56704 - DNA, 590 bp, Zea mays
  Clone ID: MRT4577_151705C.1
tccgggatcctaatttcaacctcacgcgtactacaaagctgctaatcttaatcagaaggccgcacacccgccataccagccaactcctctccgaccgtctctcccccaagcttcaacggctgacactcctgcaacacaaaaagcatcctacaccactcagtcgggctatggttgatccattgatgcatggtcccgcgctgaatcgcgacatctccccgcttcatgaagcgcttctcgccgctgtcgagtagacattcgatctccccctcgagtacgcaaccgtagtccaagctcacggtccggtgcattgtgcattctgtggcgggaggaatatcaacgtgtcgtaagactgtcccaccagagactacaagtcctggtgcgtcattgaggtagtcgccatatacaccaaggtctttgtccttgttcatgtcgacagggaaccctttggtcgtgtaactgagggcgaatgcgataccgtcggagttgggcttcatcttgctctcatcgtcgaaggcattgctaaagatagctttgccttcatcgttgtggctggtaatataacggtggatcttgggcagtgcgccgacgcg

SEQ ID NO: 56705 - DNA, 136 bp, Zea mays
  Clone ID: MRT4577_151706C.1
taggtgaaagctctgacggctgcgggtccggattcctgaattgcaggatggacccacgcgatacaaagagaggcatggatggtttgccgacccatatgagcccgtacaaggaacaggctgttaggtggaggactac

SEQ ID NO: 56706 - DNA, 300 bp, Zea mays
  Clone ID: MRT4577_151707C.1
ggagggaaaaacaattttttttttatcccgggccaaactatattttttgtttcatgaagggaataaaacaaacggctccaagtccaaattataaaccttccccccgccctggggcactggcccccaaatgcaaaacctgttccacgttctggggggcaaaaacggccccagtttttaaaaaaacccaaactgttggggggaaagccgccccctttgtgttgtggaaaaacccaaaccaactgggcaaataaggaacatcctaattgggccctgttgtggaaaaaaaaaactaaactggcc

SEQ ID NO: 56707 - DNA, 311 bp, Zea mays
  Clone ID: MRT4577_151708C.1
gaaaatagccacaaacggtatatatgtttgtaacacttgtacaataatttgggatcaaatgtacactcgatggaccttcaccaatccatgtatacggaggagtctttctgagtagatgtacattgaacctattatgtccttgaggcagaagctcacacagagtagacgtacattgaacctataatgtccatgaggcagaagctcacacagagtagacatacattgaacctataatgtccttgaggctgaatgagagggtgtacgcgtcttcacgcttgtatatgaaatctgcaattcgtgcaacattgatc

SEQ ID NO: 56708 - DNA, 662 bp, Zea mays
  Clone ID: MRT4577_151709C.1
ccctcatagggggcccgccggagagcactctcagacggaatactcgatatgtcgtcctctaataaattcttactcgactcagccaaatatctcatgtccgaaccgaattcaaaactccgtatcgacaacgattttaaaatgccacgattcaccttttccgagtaaaaatccaaagccgatcaaatctcaggacgttttattttcaaatcacgcgtagggaattattttcgagcgaaataaaattagactctcggccgaagtaatcgctcaattgtccattcgtccgaactctatttcgctctgttctccatagagacgaaatccgctggagcatttttactctagaaataatttagcgcggcccggtttagggtttgggccaagcccattccagcccgacccagcccaccaagaaaccctaaccctagccattttcaataaataggggtgctctctcttgcccttggcaatttttcactcactcccctctcttttccctagccgccactttccttcttccttgtctcttcttccccacgacagctcatctccagctaaggtgtgggcgctatttcccctggccgagctcacctccctgccaggaacttgctagcgatttcccccacttggacctcaatttcccctagctgctgctcgccgcg

SEQ ID NO: 56709 - DNA, 288 bp, Zea mays
  unsure (1)..(288): unsure at all n locations
  Clone ID: MRT4577_15170C.1
ggggggggggtgttttttttttttttttttttttttttttttttttttaaacatagcaagggtcaaatcaaataataataatgggtaaacccccagacatgataatctggaacaattcctttttttatttttacttgaaaaacaacccctttgggggggggggggggcaanactaaaaattttttactatctccttgcaaggtgaacataaggcctccacatttcgcaaccaacacaacattttatctgactgctagnccaccaggtttagacttgtaaccacccttt

SEQ ID NO: 56710 - DNA, 483 bp, Zea mays
  Clone ID: MRT4577_151710C.1
gcagtggtaacaacgcagagtacttttttttttttttttttttttttttttaatttttttttttttttttttttttttcttttttttcacattgcattacattggtttcatggctaggctttaatgtctaaacattttggtaaagccgcggcaagccccccacccaaattcccacagccaaccgcggggccagggggcggcgaaaacccccaaccctcggggaaagcgcgatggagcaggcagccccccaacggcccaacccctggagcctggcgcgggcaccacgcccgccggacttcgtaaactcgcagggccgggggcccgcgcccaggggggcgcgttcggagcccggggggaggcccccgagccgcctaatggcttcctctttgacgcccggggggcccccgccgggaggccccccgcgcccgcccgacggaagccctcaacccccctcggggggccccccggccccgcccccggggc

SEQ ID NO: 56711 - DNA, 745 bp, Zea mays
  unsure (1)..(745): unsure at all n locations
  Clone ID: MRT4577_151711C.1
gaagcggaacccccaccccgcggatccaacgcgagaacccgtcaccaccctcgcatcacatgcgcgcataggccccggccgcagggtcgcaatcaccaccatgccgcccgcgctgctcgcttgtctcctcatcctgctcgtcgccgcgccgcggccgtggtctgtcgccggcgagcccgggcggggccaagcctcgcgcgttcccgctgcgctcgcggcaggtgccggtgggggcgctgccgcggccgccgagcaagctgcggttccaccacaacgtcagcctcaccgtctcgctcgccgtcggcacgccgccgcagaacgtcaccatggtgctcgacacgggcagcgagctctcctggctgctctgcgcgacggggcgcgccgcggccgctgctgccgactcgttccgccccagggcctcggccacgttcgccgccgtgccctgcggctccgcgcgctgcagctcccgggacctgccggcgccgccgtcctgcgacgccgcctcgcgccggtgcgncgtgtcgctgtcgtacgcggacgggtccgcctccgacggcgcgctcgccaccgacgtcttcgccgtcggcgacgcgccgccgctgcggtccgcgttcggctgcatgtccgccgcgtacgactcctcgcccgacgccgtcgccacggncgggctgctggggatgaacaggggcgcgctctccttcgtcacccaggccagcacgcgccgcttctcgtactgcatctccga

SEQ ID NO: 56712 - DNA, 377 bp, Zea mays
  Clone ID: MRT4577_151712C.1
cggacacatagacgttttgcggtgttatgccaagaaaggcgagacagaccctgtgacacataaaaatatgctcggttccaccaacatacacacacagctatatattgaccactcaattcaacccctgaccaatatctatccacacacatttcacttcaacttctactaataagcctaatactaccatcaaccggtaccttcctctacctacattcgaaaaacgacaacttcctattaacacaacccaaaacataccctatatacccagttcaccaaacaactacaacgtcatgaggacgtcctaataccaaaacccctcctatataaaactaaaatcctcacattacttttaacacaaaaccaccccatccatacct

SEQ ID NO: 56713 - DNA, 535 bp, Zea mays
  unsure (1)..(535): unsure at all n locations
  Clone ID: MRT4577_151713C.1
cggaaagaaaaatgcatggcgcgaggagaaggaactggtcagagaaaataataaagaaagtctgcgcgcgcagcagagctgatgtgaccagacaagaacaagaagaaaaaataaaataaaaaaaatttctgcatgcgcacccctgctgttgaccaaataaaagattttccacccgcatgtcgtcatgcaaagccaaaaagacaaaccagacgctgcatgtaaaaaaagattctgcagcacagcaaaaaaaatatctgcgcgcgcggcagggggaagtgaccagacgctgcgactgcatgcaaaaaaaaaagttctgtgcgccagggaagtgaccggacactgcgcgtctgcatgcaaagaaaaaaagacgcgcgctggcagactctgcatgcagaaaaagagctgtgcgccagggaagtgactgcacaggggcgcgtctgcatgcaaaaataaaaaaagagccctgcgcacgnccgcagggggaagtgaccggacgcttgactgctcagggaaaaagtnggcgcgcctgaccgca

SEQ ID NO: 56714 - DNA, 311 bp, Zea mays
  Clone ID: MRT4577_151714C.1
cttggttgtcgttttatagggttaatttcaacccactggggggcgttactagagaacccaagcccggccccagggaggggggaaaaaagggcaaagggggggccggcaagaaaggggaaaccggggacaaaaccgatagcagacgaaccggaaacccaggcccaaggccagaggggcccaaggagggagccaacacacaaaaaggggggggggctaaaggggcgattcccgggggggaaacggggggggccaaccgcaaaaaaaaaaggggcaaaacccggggagaggcgagtagaaaaaagggggccccc

SEQ ID NO: 56715 - DNA, 977 bp, Zea mays
  unsure (1)..(977): unsure at all n locations
  Clone ID: MRT4577_151715C.1
gattgggttcctcgccgccgggggccagctccgcgtgtccctcgcttcgtcaaggtgcatgccgcacgttcgccgggtaaccgccctccttgcatcccctaacgcacactgccgcgccgccctcggtctcccctctcctctccctcccttcctcttccacggacacgggaggagaagggttgatcacgaccggggaggacgcgtggccagagatgggtctccacggaggcgtcgtcgtgctccgcgcggccgtgctcgccgccgtcctcggcttcgtcgccgctgccgggttcatctcaaacgacgcgctgctggagcgcgggcacgacaccaccggccggagcctgctgcaggccaagaaagattgcccggtgagcttcgagggcgccaactacacggtgatcacgagccggtgtaagggcccgctgtaccagccgacgctgtgctgcggcgcgctcaaggacttcgcgtgcccttactccacctacatcaacgacgtgagcaccaactgcgccgccaccatgttcagctacatcaacctctacggcaagtacccgccgggcctcttcgccaatacctgccacgagggcgacaagggcctcacgtgccccgaggacaccccgcagatcgaacccgggcagaaggcctccggcgcggccgccgtcgccgcgccggncgcggccctggcggcggccnnnnnggccgtctcgttgctgctcatgtcttgctgagagacccgggttgcagatggccgtgacagcgcaaccaactgcgttgctgtaccnnnnnnnnnnnnnnnnnnnnnnnnnnnnnnnnnnnnnnnnnnnnnnnnnnnnnnnnnnatgtttacatctgnnnnnntgaattcagaaaagggtggtagacatgcaatgcaaaccagctaaagtctgctttcacttgttcaacgtggtaaaatttcttgaaatgcagtagtcgaaaattaaacatgcagtgct

SEQ ID NO: 56716 - DNA, 1263 bp, Zea mays
  Clone ID: MRT4577_151716C.1
ctcgctgaattgtggcatgcgtccgtgacattctgcaccgtccatagcactggctatttttgaacgatcccctcccgttttgactccggccccgcgcgccggcgcccacctccagctccgcgtgtccctcgcttcgtcaaggtgcatgccgcacgttcgccgggtaaccgccctccttgcatcccctaacgcacactgccgcgccgccctcggtctcccctctcctctccctcccttcctcttccacggacacgggaggagaagggttgatcacgaccggggaggacgcgtggccagagatgggtctccacggaggcgtcgtcgtgctccgcgcggccgtgctcgccgccgtcctcggcttcgtcgccgctgccgggttcatctcaagtcagttaccttctgatacgcacacgccgtcgtggatctggtggtctcgggttccttcctggttcgccttctaacgcccccgccgtttcgccgtggatgcagacgacgcgctgctggagcgcgggcacgacaccaccggccggagcctgctgcaggccaagaaaggtttaaatgagaaagcctgcgtttcccctcttttttcttgacctctgccaccgccggccgtctgatcatatctggcttgcgtcgtctcggacagattgcccggtgagcttcgagggcgccaactacacggtgatcacgagccggtgtaagggcccgctgtaccagccgacgctgtgctgcggcgcgctcaaggacttcgcgtgcccttactccacctacatcaacgacgtgagcaccaactgcgccgccaccatgttcagctacatcaacctctacggcaagtacccgccgggcctcttcgccaatacctgccacgagggcgacaagggcctcacgtgccccgaggacaccccgcagatcgaacccgggcagaaggcctccggcgcggccgccgtcgccgcgccggccgcggccctggcggcggccgcgttggccgtctcgttgctgctcatgtcttgctgagagacccgggttgcagatggccgtgacagcgcaaccaactgcgttgctgtaccgcttcttttgccacttctttttttctggatggatgatttccaagatgcatggatggatatgtttacatctgaaaaaatgaattcagaaaagggtggtagacatgcaatgcaaaccagctaaagtctgctttcacttgttcaacgtggtaaaatttcttgaaatgcagtagtcgaaaattaaacatgcagtgctgtc

SEQ ID NO: 56717 - DNA, 755 bp, Zea mays
  unsure (1)..(755): unsure at all n locations
  Clone ID: MRT4577_151717C.1
ccccgggcctgcagggctcgagtttttttttttttttttttttaatcctatatcagtaaaaaaaaaaaaaacccaaagtaggaaaatgtccaaaatcggggtcctaaacaaacccttttggtacaccgccgggaaccagaagtacttaaccgacaccaccacccttttaataatcaacctaatcctaatcggttgggccaagggcccccgttgggctaacataataaaccccggaagcgtaaacaccgaccccattttccccaaaaaaaagctaaccggcaccaacgtggggtaccctgggggcctttggtttaaccccctcggttggggcaacggttccccggaaaaaataaaggagctgccccccaaggaaataaaaaacggacccctcgccatgctccccgtaatgggcccctggttccaggccaagtacaccggcaccggcccaatcaacaaccttttcgcccacctggccaaccctggccacgccaccattttccaggccttaacccccaaaggaggagttgaacttattattaccattttgaggagggctaccacacatgcatcgtaaggttgatggccgatatatataaaacttcacattttttttggggggaaaggactgctgattaaactgtaaataatgaaatgctcgtggggcaagtgcaatccatggggaacttgaactatgttgaaaccagtgtaaaaaggggatactcggttagatgtaaaaaaaaaaannnaaaaaanaa

SEQ ID NO: 56718 - DNA, 981 bp, Zea mays
  Clone ID: MRT4577_151718C.1
ccggccgggcctgttcccagtaccaagatcgcaggcgtgaagggcgactgttaccagattatgatccgttttcgagcttcgaggaatcgacggtcaagcttcggtgaccaagtgacctggttcttcgagttctgcaaggttgaagaccctgagcatctatttggtgaagagcaaggacgcatcggtcgaggcattactagctcagcgggcggcggcaatggaggagtaccagcaggtgcatcagcagcagcagcagcagggtggccgtgggagcaacaagatccgggacatcgtgcggctgcagcagctgctgaagaagtggaagaagctggccacggtgacgccctcggcggcctccagcggcgggaggagcagcgtgccgaggggctccttcgcggtgtacgtcggcgaggagatgcggcgcttcgtcatccccaccgagtacctgggccactgggcgttcgcggacctgctccgcgaggccgaggaggagttcgggttccggcacgagggcgcgctccggatcccctgcgacgtcgactccttccagggcatcctccgcctcgtgcagcaggggcagggcggcaggaggaatgagcccgccgccatgtgcgactgcgactgctcctgctcctccgagaccgagatcctctgcagatgagatgacgactcgacgacggccgccacgaatcgaggcctcgctctcgtcgtctcgtctcagtgccctgctctgcatttctttctttgttttttttccctctctcctttctcgggttggttctttctttcttcgcggtttttttctgaagaaaggaggagaggttgcattgctctgcagtctgcagtctgcaccgataagatctgtaatctgtacaacaactatgggaggagataaaaggtctctttttttgggtctcctggtcagaacaaggatctaatgtaagacaaaccaaacaaagctttgatcttgcaaaaaaaaaa

SEQ ID NO: 56719 - DNA, 1072 bp, Zea mays
  Clone ID: MRT4577_151719C.1
ctctcttctctctctaccggccacctctctccacctcctctccccaagccgcgccaccaggagtgcagcagccgctagaagctgccatccgcccgccaggagttcagtcaatctcctgtctcctgagagccgccgcccgccgagtcccgctcgccgctcggtcgctcccgtgaggcgctcgatctcctcagcgccgcgcccacccagccacggtggagccacccttcgtcccgtcgtccggcggccggccctcaatccctcacgccctagcttctctgccatttccggtcagcccctcacgccctagctttcctatcaggcgctcggtcgctccctttgccacgcgctcctagcttctctggtcggctcttcctccgccatttccggttggatcctcctatggtatgtgcatcataatccgtcacttttactgtgtatgcaatctcgatctgcctagttcggataagaagaacctatccgaagagcgcccgttaatgtctactagtggccaacgcgcgcctacgcgcggtgtttttacccttttcttccaaaaatatatgagaattgagtctctcgcaaggaagcatcaggccaatgggatttagtggccaaaacacgatactacctgtagaggcagagaagacccaaaattaaggtgctgctaatgattccatgaatttagagaaaatgaaaaatgcaacgaaagcccctccaaaaaaattctaccattttcttttgattggccgagactgatgtgcatttgcctaaaagtctcacaaattcattcctcattcttcatgccgacattttaattgggaggacgttttgaattttggcgaatgggacttctccatccttgaaatccacccacacgccacaaaaccaaaacagaagtaagcaaaataaaaatttcgaagctagcatgccaaaaaagacgacgaagaaggacctgaatgatgccgtaggggtcaggccacgaacgatggttgcccgcgctccattgtggcaagcttctgttgctggcttggcgggtcgctggagcacgacctggagctcctcctcgacgatgtac

SEQ ID NO: 56720 - DNA, 830 bp, Zea mays
  Clone ID: MRT4577_15171C.1
gccggccgggctgggaccatagccctcctagtcctggcagcaccacactctcgcgctcctctcgggcaggaaaaaaaagaagaagatcggtgtggttgcgcctagcttcccgcgaagcgagacgtcacgggcgtagcgtagtagagctagcaagccataccataccatacatatcccaccgattccgatcggcatggccgggagcgcgaggtcggcggccgcgaagcacgcgtaccggatgttcgtcgcgccgtccaggggcggcgccgcggcgaggggccccggggccggcgccgcggaggagttcgacgagtcggacgtctggggctcgttcggcgcggactcccagtactccagccccggggccgagctgggcgccggctgggcgcgcccgatccccggctccggcgccaggcggaagaagcccgcgccgccgttgccggttgcatgatcgggtgtaggtatcggtaggttagaaaaacgagcagtgccgctaagtgctactaattgctttatctctcgatcgacttttcttttttttcttgcaatcacttttctttttccccttttgcgttgcatgcttaaaaggggagaaagtcggggtagtaagcttttttttttttcttcctgtttttcgttcgtgttggtgcgagctggagggtggggtgtgtgttcattcatggtgtgacagttttaagggcacctggaaaagagagagagaggacgaacaggacgatcgatcagatggttgatccattatattatgtttttttcttctttcgataatggaaaaattttcaattctacccacgcgtccgcccacgcgtccg

SEQ ID NO: 56721 - DNA, 357 bp, Zea mays
  Clone ID: MRT4577_151720C.1
gtctgtcttcttaggagcgtgctcccaaagccttttagctcttgagcttaataaagctctcactagtctatcgcctaattaatacccaggtttacttatcgcccctaagctttccacgtgaaaactagcgaatcatgctgcaagcctgatagtgatcgcaactccttatcgtaaaagtcgagtatgtttacaacaagaggctttgctgaatccatcgccacgatccatctaacaaggctgtgtaaattttccaagctcgttccacgaccaggacccaacctcaaattctgttgcggtcacaaaatgatcatccaacatgagacccagtccctccatcattttcgggatgaacgagct

SEQ ID NO: 56722 - DNA, 665 bp, Zea mays
  Clone ID: MRT4577_151721C.1
aagtggaactcaggcatgggtaaccaacttcatcttctgcaagtaaatattgcaatgcgtggtattgcgttacttaaagtgggtggaaggatggtctattcgacttgttcattggatcctgttgaacgtgattcggctcgagctgagctccttcgaagaagtggaaactctgttgaactccttgatgtttctagcgagctacctgaattggttcggcgtcctgggcttagcacttggaaggtacaagatcgagaatcttggtttcagagtcacgatgaagttccacacaataggaagaatgtagtatttccaagcatgtttcctgcaagtaatagaaccgaggaaagccataccgtgtgtggtgatgttgaagtgaacataaataatatgaacaacttctcaagaaatatcaacattgaagaaacaagcaaacttaatcaagatatggatggagtttctgttagtcccactaaaattttggaatgcacttctaacattgtgagttcaaagtttccactgcatcggtgcatgaggattgttcctcatgaccagaacagcggggcatttttcatcgctgttcttcacaaattatcgcccttgaatggcagtaagataaaggatactaaaattcagcacacacttgggacagacaggactattcagtt

SEQ ID NO: 56723 - DNA, 558 bp, Zea mays
  Clone ID: MRT4577_151722C.1
cacgcctgcgtgtaccgggctcctattacacggtcgacctacgcgttcggtgaaaacccaatgctctaacccttcaggtggccaacccgcaaactcatccgcatactaccttattgacccttgactcttcaacaaccgaaaagagtatccagcaatgaccggtggtgcattgaacggcacagaacatgaaagagcaagaactacaacagctagcgctaggaaaccttgctagatactgtcagcaacaggagcatcttgcatgcaaacaactggctgctttgaactctgctgcttgtttgcagcatcaactaccattcattgatgtaggtggtgactacccgcagcaattaattaccttcaacacaactgggctgacagaagtctgcttggtataaacaacagcggcaggtaccaccatatctgactgctagctgatgtgagccctgaagacttcttgacacaacaaccgttgatgtcgttctacctgacagctgcgcctaacgctggcaccctcttacgactgctacaacagctggcattcaaccaacttgctttgac

SEQ ID NO: 56724 - DNA, 3741 bp, Zea mays
  Clone ID: MRT4577_151723C.1
caccaccgcatcgtcgccggcggccaccgggggcgatgcgtcgggggcagccaaaggaggcgcggtggcgcgccgtgccgccagttcacccaggcgctccagagcctctggaggcacagtcccccgatccctcctcctgcgcctcccgctgccggcgctgccaccagcggcgaggccgaaccctcgcggcagccgccggtactcgagaacgctgccttcgaggagtactataaggttcagcaaattgtccgcgaggaggagtgggatgccttcatgagtgttctacggaaaccattaccagcgacttttagaatcaatgcctgttgccagttttataaagatatctgttcaaagttagaaaatgaatttaggcgatctttggagagtgagtcttgcatggcacctgaatttctcccggaaggaattgaggaaaaatcaggcactcgaaagttttcatgagtttctgaagcatgagagtgaggttggtaacataactagacaagaggctgttagcatggttccaccactgtttctgaatgtacaacctgatcaccatattcttgatatgtgtgctgctccaggctctaaaacttttcagttacttgagatgattcaccaatcaaaagaactaggtctacttccaggagcattggtacgtttctccctaagttgcatctggcactaaaactattgctcgtgtaactcttgatgatttttggagtcatgttagttgttagtattcaattttgttacatgtagctagtagaactagtcgttttataatttccaaagacttatgagaaattaatactttagttatattgatatggcctaggaccaacttggcccagtaaacggctcagtctggcctgtaggccgtggcgccggcatggtaaggactaaggaggacctagagcctaggtggctaggaggtctatctcctgtagtcctgtactacccctgtccctaagtcagtccctatatatagaggccccatgtacccttgcaacttaaggagaagtagatcaaagggacaaagggttagcccatcttttcttcccctgacttgggcgttgtcctactggtcactcttcctgtcctctcatttctccccaaatccccctccctaatctggggcaatctaagtactaacatatatattctcccttgttcttgtgagactggttaggtgatagccaacgatctcaatatgcgaagatgtgacctccttatccataatacaaagagaatgtgcaccgccaacctaatagtaacaaaccatggagcagaaaacttcccctattgttctcttgcaaaggattgttcaggttcatataaagatccctgcaaactacaaaagctagaattcgaccgcatactttgtgatgttccgtgtagtggtgatgggactattcgcaagggtcatgacatgtggagaaagtggtaataacaggatctttgttttgtctgctgttttatgcttccctgtatgtatcctcaggtcgcaatctgttattgttgttcaggaactcaggcatgggtaaccaacttcatcttctgcaagtaaatattgcaatgcgtggtattgcgttacttaaagtgggtggaaggatggtctattcgacttgttcattgaatcctgttgaaaatgaagctgtcatagctgaggtgctgactgcttcctactggctcggtcccatccgatgcgatgccataagaggggttcctggtgaccaaaaacgtgtgcgaggacaccactcagaatgaatgtgctcccctaatctaccaatcgagagggcatggcagtcaggtgaagaccgatgcacatggcactccactgcacatccctgccctaatgatctgctgctaattgagccattgagctccttcgaagaagtggaaactctgttgaactccttgatgtttctagcgagctacctgaattggttcggcgtcctgggcttagcacttggaaggtacaagatcgagaatcttggtttcagagtcacgatgaagttccacacaataggaagaatgtagtatttccaagcatgtttcctgcaagtaatagcaccgaggaaagccataccgtgtgtggtgatgttgaagtgaacataaataatatgaacagcttctcaagaaatatcaacattgaagaaacaagcaaacttaatcaagatatggatggagtttctgttagtcccactaaaattttggaatgcacttctaacattgtgagttcaaagtttccactgcatcggtgcatgaggattgttcctcatgaccagaacagcggggcatttttcatcgcagttcttcacaaattatcgcccttgaatggcagtcagataaaggatactaaaattcagcacagacttgggacagacagaactatacagttccagaaagagcccaagccagaaacacgaccctatgaaactactttgacacgccgtcagcacaatgtttctgaagttgatgatactgaagtgcttggtaggggacagaaattaggcacagacagccaaacttcaaaggataagaactcaagcgaggtcgaaatagttagcattctagcagagtcaggagatagaatggagttgcaaaagcaaagcaggtgggaaggggttgatcctgtcttagttttgaacgatgaagcggtgataaagagtatacaatccttctttggcatcaaggaatcattcccactcgaaggtcatctggtgactagaagtcctgataatgcaaggagaatatattacgtatcaaaatcagttaaagagattttggagctgaattcaaaagttgtcgggcagctgaagatagcttcacttggtgttaaaatgtttgaaaggcatagatcaaaggatccctgtccatgtgcatataggttgtcttatgatggattatcgctggtgcttccatccatcagcgagaggatactatatgcatccgcacttgagttccaccgcctcgtacagtaccgaagcataagctttgctcattttaccgacaccagattcggggagcaagctgcgtccttgacgcccggttgctgtgttgtagtgttactcgaagggaataggcgtgtagattccatttgtaaggatccctccacaattgccgttgtttgctggagagggaaggggaccattaacgttatggtttctccctcggataggaaggatctccttgaaaggatggcgtatcgatttggatgatggatgccctaacgacgactatggagcttgccttggcatcttgacaaggacctaccttcctatttggttggctgctaattaaaacttggtataccacattaattaattctaggcatgtgtgttttgtttcacattataaagtgggatttgtcaaactttgttacgaatagcaggttcttagtaatttacacgtcggttggttgggcctggacgaaggaaggatttgtacagatcagatgagagagttttgagtttgcaactatgaactatgtactatgtactatccctttcgaccgagagatgaaaagcaaaacataactaagctaaacttctagctcgtcgtcgtaactgtcgtaattgtcgtcgtcttcatcctccgtatcgaccgggagctgagggccaagatatggcgccccggcgaccgggaaaccctcgggcaggtccgttttttccaaaacagcgaaacccgggagggacgggacggggacctctgtgaagtaggtggaggggcggccctggt

SEQ ID NO: 56725 - DNA, 276 bp, Zea mays
  Clone ID: MRT4577_151724C.1
gggaaaaaaccacacataggggagggcccatgttttaccaaacacaacagggtgcttaggctccaacaaccccacataataataaacacacgaacggacagcataccactgccttacataaggacaccttcctatggacctgggggggggcctctccttgggcttccacaccaggcgtaaaggaaatatacatggccacccttttgaagccctccctgtataccaaccctttctctgggcacccgcttttattgaccattccagatctaaaactag

SEQ ID NO: 56726 - DNA, 349 bp, Zea mays
  Clone ID: MRT4577_151725C.1
acgcctcctctgggatccctctccgaccccctctgattatccctcatactttgccgcctagccagcggggagaacattccagctagcggtaggaatgtcgataccgactaccagaaacctgtactctttgacaacttcaggaactctggcccggtctacacaggcactctggataaagttggctgtgaaattaacaatgctattatggaactccttgtcttataactcaacagtaaggacattaccgaacttattgccaacggcctcattaaagatgttccaataccacgtgtcaacccacagacttttatgactgcaactgacgatactgactaaaaggttgcttcat

SEQ ID NO: 56727 - DNA, 452 bp, Zea mays
  Clone ID: MRT4577_151726C.1
ggctgggcggattgacacctgcgagccagactcgtgcggcctccgtgagcctggcgctttgaataactggggtaatactgtggaaggcatagaggatgcgtgacatagctgttgatgtgacgtctgagaaatatactgattactacgggccactatagaaaagcttgggcacatattgctgtaggaggacgtgcctgtcccatgtgaccgaacaactggactgctttaccacgcagagaccttctgtctatgcacatacggcgcctctacactgattgtacatgataatgaacgtcgactacacacgatgagacgtatccgaatacatttgggtgatagcgtcacattagaaagccacagaacaacgcttgcctatcatgctgcaacatgtgaacatacatatggttcttttgacttaacgaacactatgaatactatgacttccaacgttt

SEQ ID NO: 56728 - DNA, 299 bp, Zea mays
  Clone ID: MRT4577_151727C.1
cccactcgtgcgatctagctattcatgttactataatcttacctctaactataccaagggacaacgggccgagacagatagaggtacggtctacacaatgcttgactagctgatcatcttcaccaatggacagcctattctagcttcactatgacggccgctcggcgctcgagacgacacagactgacatatccacggcctgatgcactgctgactactagaggacctatccggatactcaagcttgtctcaggacaattacggtgttaaatctaccttacacaacgacctccgccttg

SEQ ID NO: 56729 - DNA, 665 bp, Zea mays
  Clone ID: MRT4577_151728C.1
cctcgaggccggccgggccgggatattgcctagctttctgtgtcggcagctaacgacctgcaaccaaccatctacgatcgactcaccgagcgacagtagtacacacgcagatagttaagagcagcatgagcgtaggcggcgatggcgggctccatgatctcgtcgacagctctggaggtggggcctcatggtctgccacccatcagccgccgcgcgtcctccttcaccgtcgtctgctccaagaagaagatcgagaccgacaaggcctacctgattgggagtggcccgaccgtcgacgtcaacgacagcgtcacaaaagtctaggccaagggcgtggaccattccgacgacaaggacggagcgaatggcgacggagacagcacaatctacaacgaggatgaatgtgtctcccacaggatgacttctacatggatagcaaccactgagcattccagaactgggacagtcacacctcgatgatatcctcgaagggcgacgacatcctgcgtctacaacaccagcgccacactccggctaatgatatcatatagtatgcgataattgtgatgctgcgaaccaaatcagggagtctgtctataatatagcctacatgggagctcaaccttctgcatgtaacaataaacaacgctactcttcattacgta

SEQ ID NO: 56730 - DNA, 466 bp, Zea mays
  Clone ID: MRT4577_151729C.1
tttgggctgatttatgtgcttggtaacatgaatgctgcatgagaattccctcctccttcttagtccctcttcccctccgttgtggtaaaatattcctgttggtgagagtacggtgacggtgcattgcgcttcggaggctatttcggcgctggtaaacgattctaagaaagcgctgtctcctctttggatctgtactcatgttgcggtccttactcttggacctgattcttgtactttcctttatagtatttaagtagattatagtaatggtcgtaattttcgtcggaatgttgcggcatatccttttactttggtcgttgtcgatatttgtggttctgtatcttatgcgaggtcttgtgtttagtgctcacattcgggtgactgtgatactggtgaggcgcccgcgtttactgatgattcttcggttggtgttgataagggcggtgacttgaggtttgcgagtcat

SEQ ID NO: 56731 - DNA, 910 bp, Zea mays
  Clone ID: MRT4577_15172C.1
gaagcacgcgtaccggatgttcgtcgcgccgtccaggggcggcgccgcggcgaggggccccggcgccggcgccgcggaggagttcgacgagtcggacgtctggggctcgttcggcgcggactcccagtactccagccccggggccgagctgggcgccggctgggcgcgcccgatccccggctccggcgccaggcggaagaagcccgtggacggcggcggcggcggcggcgcggcggggtcgctgccgatgaacataccggactggcagaagatcctcggggtggagtaccgggaccaccaccgcgcgggcgagtgggagcctggcgcggacgacgacgacgacgacgacggcagcagctacggcagggcgcgcggcggggcggagatggtgccgccgcacgagctggcgtggcgcagccgggcggcgtcgctgtcggtgcacgaggggatcggcaggacgctcaaggggcgcgacctcagccgggtccgggacgccgtctggaagaagaccggattcgaggactgagctagcgctgatccaccgccatgatcgggtgtaggtatcggtaggttagaaaaacgagcagtgctgctaagtgctactaattgctttatctctcgatcgacttctctttttttttcttgctatcacttttcctttttcccccttttgcgttgcatgcttaaaaggggagaaagtcgaggtagtaagcttttttttcttcttcctgtttttcgttcgtgttggtgcgagctggagggtgggggtgtgtgttcattcatggtgtgacagttttaagggcacctggaaaagagagagagagagaggacgaacagtacgatcgatcagatggttgatccattatattagtttttttcttctttcgataatggaaaaattttcaattct

SEQ ID NO: 56732 - DNA, 321 bp, Zea mays
  Clone ID: MRT4577_151730C.1
ataccagatagcaaggattcttccttacggggcacaatgctcagttcaaacattagcaacattggacggcgaccaaaaccgggccaggaggacctgttctaacctgacattagcaatgttcttaacacggcatactgcttatgtaccaaacttgacagttgccaagttcaaacaaaaataacgccactaatcaaatgactactgtgcatgttccaaacttggacattttaaagttcacaaataataccactgatcttgataaggagtagatggtacaggacatgctctacgcttcatgcttgtttgccttctgatgagact

SEQ ID NO: 56733 - DNA, 372 bp, Zea mays
  Clone ID: MRT4577_151731C.1
ggaaaaaaacagggctaggagccataaaccaaaatctaagggggcaggggggggccccaaccaattcaggggggaagacatcaattacgacagataccattcggccaaacatcctaaacattatcatcgggtccaagggggctggttttttttatccgaaaacgggaagggaaaggaagcaaatgctaccagcagggctaaaattacgatccgggatctaaaacatcagccccacaacataaagcaggaacccagggggggcagaggaagaaccagcccaccgggggggtgcggatccatcaggggtcccgcttcctgagcttggccacccgctgctgaatctgctcaagcctgaccaccagctgggggacg

SEQ ID NO: 56734 - DNA, 791 bp, Zea mays
  Clone ID: MRT4577_151732C.1
aattcggcacgaggcctaaatccactgctcaaatcatacacacattgaacgacacctcccaccaaacacacacacacacacacaaatttcggaaagagaactgccagcgcagatcgccatccgaccacgaggctaccaaaatgcagcgcccagactcgtgccagccagccagccatcactcctgctccatctccatggatgcacacaccaccgcggccggccaccatcagcgaccacagatagaatcgagagggcaaccgcacgagcaccagctctgctctcacggcggagacgacgacgacgacttccatgtcacgacccacccccctatccgatcccaaatcgcacgaggaaacttcgggaggaaaaaaaaaacgcacctccctggccacccgggcgcgttcccttgtctatcccccctgtgcttggaagcccatgagagcacaccaagaacaagcacaggagacgagagagaaagagagagagagagataggaaaaaaaaatccccaaaatccaaggccgatttatcttcgccaacatctggccagctccatccgaggccgttcccgccgcctccgcgaggtctcgggaggggagaggagctccccgactgaccgaattcgcgaggcaggcaggcaggcttagggtttgccaaggtgctccggagccctgactcgccggggcgatctagcggccggttcctcggttccggatgatcttcaagcggagtccgcggtcgcagatccttgcgccgcggcgctgcaatgccgcgggcagcggaggcgaggac

SEQ ID NO: 56735 - DNA, 401 bp, Zea mays
  Clone ID: MRT4577_151733C.1
cggacgcgtgggcgcaagaaggtcgacagcgccagcacgtcgctgctgtccccgtacctgcacttcggcgagctcagcgtccggaaggtcttccaccaggtccggatgaagcgcctcatgtggagcaacgacgacaaccacgccggcgaggagagctgcaccctgttcctctgctccatcggaccacgccggcgaggagagctgcaccctgttcctctgctccatcggcctgcgggagtactcgagggtggcgaggcgggagaggagtacgcgggagcggtaggcgagccgtggaggaggatatggaggtcaccgaagaggaagaaagggaagtcgtggactctgatgtggagggtttcattggtttgatgagtttacattacaggttgcttttcttaaat

SEQ ID NO: 56736 - DNA, 212 bp, Zea mays
  unsure (1)..(212): unsure at all n locations
  Clone ID: MRT4577_151734C.1
taataaatctagatctgcaagctgccacttctttatttttcaagcttacatacacatatcaagcaaagagagagnctctcctatagtaggacctagcttcaattcacttgccgtcgatttacaacttcttttactgttaaaacctaaattcattctcaatctcaattgttttacaacatcatcccttttaaaaccttgcctttacccaactt

SEQ ID NO: 56737 - DNA, 499 bp, Zea mays
  unsure (1)..(499): unsure at all n locations
  Clone ID: MRT4577_151735C.1
ccttgccggttttttaggntcttgtcattatcccctcctccattctgnaaaaataatctctatagcctgtacaagacttaggaagtgtttgtttggngattataatctgcctagattatataatccaacaattcttgaactaagtgttagttcaaaagttgttagattatataatccagacagattataaacccaaacaaacatccccttacttgctagttgaatcccaggcggattgcatggtagttgaggttgacaacgatggctgtaagataaaactatgaatctcttatgaagtgtaagctttaactagtagaaagtttatcttagcagcttagaacagggtaaatcaccatcagtctttatctcctggcctaaagtataccatctcgtacagcccactagctttggagaggcaaacatacttttttgtgctttgtgacgctngaagntaactgcagagctggggggattattgttttaacccggggtcgtaaat

SEQ ID NO: 56738 - DNA, 334 bp, Zea mays
  Clone ID: MRT4577_151736C.1
agtattaactgccagcatgcctttttattattacccattcattctatgaaaaacacacattgtgcgtgacactacatgttggagttccatcaacggtctatttggaaaataacaattagcttataaaatgccacattactaggaatacgatatatagttccatccatatcagatggttatcagatgcgtggccaggccttgacgacgtacgtgtagactcgctgagcgcctgagctgaacgccacgtaaccgcggaccatgcatacatgcatgcatgcatggttcattgatttcaaggggcttagcttcaagaacgaggaggggtgcaagacct

SEQ ID NO: 56739 - DNA, 380 bp, Zea mays
  Clone ID: MRT4577_151737C.1
atctattcatgttatcgagatgagtgttgttggtctataaattacaactaaaaaataaaaagagggctcatacaaaagctacggggtcgggtaaactaaataaattctggacccacggtctagaggaaccagcattacgcacaacttcatacctgacaaagtgtctgatatgaacactcataaatgcaatgtctacgacgccatttacacaatgtgttgactgcgaaaaccctatcattaccaaatttactgggcttacactacatcttcctttgagaacctgacttaataacgactaggcccggcccaatcgccatagcaaacagttgggcacaatgaatgtcgcttgtgaccctccttgtaccaagaaattaaacgcg

SEQ ID NO: 56740 - DNA, 356 bp, Zea mays
  unsure (1)..(356): unsure at all n locations
  Clone ID: MRT4577_151738C.1
aaacaggaaaagaatttttgaacgggccactaaaacccgaaggggggcccaatcaaaggtcacgagttccaacaggggcccctgaaacaaaaaaaaaacccccttacccttttttcggggcctctaagggggcttaaatcccctcaaaaaaggccacaaaaaagggattttttttagtccccccccgtaaccaaagggaaaaaggggaaacaccggaatttggggggggggtaaaaaaaaagaaancctcttagccctaactcagggccctgccctttccaacccgggtcggaattggaaacccccctgggtgggacccccccaagggggaagggggcacctgggccccccccccg

SEQ ID NO: 56741 - DNA, 426 bp, Zea mays
  Clone ID: MRT4577_151739C.1
ccaactggatacctgtttcttgttagtttgcatcagttacgtcggaggacatcaaaatcgaatacacttccactgaaaaggaaaaaaaaacggcagaaaaaaaaaatcaaaattcgttgctcgacgtaaccttaagctacgtgtatcgtagaacaaattgtggctgtaatgctcttctaagccaaagggaataccagtctgtcacccttatatgtacattttattgctcacgatctgcaaaactgcaaccgtactccaatcaaacagccggcaagaacttctcgccttcagcagcaggcttcgattgctcacccactttctgaaaaactagctttcgcagcggaagctggccattggagggcaccgtaacctgggtgtccacgaagatgctgtcctcgtccttgaaatcacctctgaggatgccct

SEQ ID NO: 56742 - DNA, 546 bp, Zea mays
  Clone ID: MRT4577_15173C.1
cctcgaggccggccggggcaggaaattctgccgtcgcggccaggccaataacgaaccaacgcacgcagccctgcctctgcgcgcgcgcgctgtctccacaaacagcagcagccagcagccacacctgacctgacctgacctggtcaccggagaggggagcgcgctcgatcatcaatcactacttcatcagatcaggggcagaggacggccagggggggaacaaccgaagaggagcgcgtcggcggggcgtcgagctaggctggccgccgcgaggatcccggcgcccgtgcgcgctgtcatggcgtggtggcggaagaaggtggtgtccccggcttgccgcgcgtgggccgccgtctctacccgcgtccgcgcgcgcaacgcaggcagcagcggcagcatactgaagctccacgaggacgtgcagacctgtggctacagggacgtgcaggtgatgttcgacatcctcacctcggagctggaggcgtcaacacagcgccccgccgtcaagcgccaacaccagcagcagcagcagcgcaagctgcggcc

SEQ ID NO: 56743 - DNA, 652 bp, Zea mays
  Clone ID: MRT4577_151740C.1
cccttttcgagttttttttttttttttttttttttttttttttttttttagtatcgacagcaagatctcttcaattcagcatttttcggtccattacaatgcgccttgctcccaatataaacatctatatatacgtaattacatgtctcaagtctgatgaagatatatatgtgtgtactatatatataacaatatacatagaacaaaaaaaattgaaaggcggaggaacccagtaactctgcgtgtgaaaattttcttgataacaacgaaaactttcttgccccagaattatttaccgagggaatggacctggagcctcacaaccgcgcccaacatgctatagaacctgacatccaaaaaaaaaaaccttccttttcccgttttggacacgaacggaacaacgcaaaaaattgcaggtgaatcgagcttgcttgtaaccgatcaatgctctcttattctgatggtagagaaaaccaccctcgccacggcttttttacagaggccacagttttttattcacattgtaaaggcctatcaaaactgtgtcaagtgacaaaaaaaaattgtgctgataggatcactcccaccagctcaaaaaaatcagcgaccaccaccagggctttgaactgccaacacttgtaaaagtctgagt

SEQ ID NO: 56744 - DNA, 449 bp, Zea mays
  unsure (1)..(449): unsure at all n locations
  Clone ID: MRT4577_151741C.1
ggtctctcgccgggccgctggcgggcatggtccggcacctgcttcatcatctgctgggtgacgttcgtgatcgcggagctgtgcctgctggcggggtcggtccggaacgcctaccacaccaagtacgtctcgctgttcagcaacgccccgccccggtgcgccgtgctgcggaggggagtcttcgccgccggcgccgccttcgccttgctcaccgcgctcctggccgagctgcactacctcttctacgccagggcgcgcgccgccgccgccgtgcccccgcccatcgtcggcggcatcggcatgacccgcatgtgatgtgatgtgactctgtattctgtggcagctgccccgccggcgcttggctgcgtgctttgtagtttgtaccgtgtgttcatgcatttcacgggaccttttttgcctgaaaaaaaaaaaaaaaagggcnncccggg

SEQ ID NO: 56745 - DNA, 1376 bp, Zea mays
  Clone ID: MRT4577_151742C.1
ccgcacgtgcccgcccgcgcgtagaggggagagggctagggttcagagcacgacgagccataacttcaacaagcagcgggcgggtctcgggcggcgcgcgggcgcttggtggacgacgctcaagcggaggcgggcagcgcttgggagtcaggcgtgcgaccttgcggctgtgctcaggcggggcgttgcgtgaagcgctagggagtcgggtgtgcgacgggcggcgctcgttcctcaggcatgtgcggacgacgctcagacgcatggctgtgtcgaccacttgcagacgacgccgacacagatccaggtccaggtccaggttaagtattgttttttggtgtgtggacgtgattcttctagtgagatatgttctgaagcggcaaggtaaaccctcttagtctacttgtttaacttttaaaatatacccatcggtttgaatgatgcaaaactacaataatcttcatgtacttgattgactaatgagttggatatgattcgtattctatttcttaaaaaagtaaggcagaagatagctagattcatgatttggcaaatacaacctcaaattaacttgcctattcatcgattatgttcaggaaataatgtatcaattaattgaaggaagtaatagtagtggctcatctagaactcattcgattcctagttctaactatgaccactaacttttgccttgctagctggctatgtacaagcctgcaacacattcttatgataccatcatgtcattaaatgtcaagggctgagtatccccatacagcagggcctaaacgacgtagttcgtaatcgtgcaaaaagaaacatcgcgagtggtgatgccatacgtgtagaagtagcaggtgtggtctggggagaccaaagtgttgttattttgttgttgatgaatggtattgatgataatatattgctaagtgtatgacttgatatgtggttgttgtttagatactggggctttggttgtatgaaatggattcctgttaaggagaaattggttgtcctcaagaaaaatgcggaaccttatgtacagaaggtatcgacaagatcagtgaagttttatgaacggagggaggattttctatctccgctgtttagcctggagtcaaaggaggcagaaggagatgaagacgagtgagattgagaggatcaacgaaatgctgctgtctaggaaatgctgccttttttagagaaaactagatgagtgtcagtttatacgaatcaccaagttggctttgttgttgagtgtccttaataaagatttttgcccctgtttctaagacagcgacattcttagatataaaacacactttgtcactgcacacttttatttcactgtagcacagggtagattcagtcttaaa

SEQ ID NO: 56746 - DNA, 803 bp, Zea mays
  unsure (1)..(803): unsure at all n locations
  Clone ID: MRT4577_151743C.1
ntaggcgcgcagtacagctgtcgagtcgttggggcgaccgccgtcaaaagtagcgccgccacgccacaacgccgtggtaatggcaatggcaatgccaagccaagcggctccgggcacacgggcacgcangggatcgaggagctgcagggcctgtaccccagccttgcctcggcagttgaggggatcacggacaacgagtcgctgcggccagtgctcaagagggccttccaacttatcagcgacgaacgagcacgtcagttggatgccaaagtgaagaagcagggggatatggaggcgcagatggcggtgaaagtgactgcactgaggaacgaggtacttgacacccttaccggataccatggattgcttcatcaatgatgttaagtatgaggggtaaggtctacatgtctttttgtgagaaatgaactccggaccggaggaattaatcatgttttaaggctagtttggaaaccatattatcccatgggtttttcattttcccaaaggaaattagttcattttcccttgggaaaataagaatcccttgggaaaattgagttcccaaactagcccttattgtatatatagacactctagtgggaggtggttggtgacaattttgtttttggtgttgtcaaccctttagtttcagtgttcccatgataaaacactggtatggctttcctagaagaacatgttctacaatatttggctaaaacttcttgtacttgtagttggatagttatgtaatgcagagagttgtcactaacagatataaacatgaacctgctgcagtttacttg

SEQ ID NO: 56747 - DNA, 962 bp, Zea mays
  Clone ID: MRT4577_151744C.1
cattgggtacctcgaggccggccgggatataccgagtagaatagagaggggagagggctagggttcagagcacgacgagccataacttcaacaagcagcgggcgggtctcgggcggcgcgcgggcgcttggtggacgacactcaagcggaggcgggcagcgcttgggagtcaggcatgcgaccttgcggctgtgctcaggcggggcgttgcgtgaagcgctagggagtcgggtgtgcgacgggcggcgctcgttcctcaggcatgtgcggacgatgctcagacgacgccgacacaggtccaggtccaggtccagttcatggagcatggttaccaccttggtttgcggcacaatatgctcattacgcggaggttgtcgcaggtcactagaataaacaagggaaacctgctgtgcataatgttttgcataagagaaaatggttgccctcaagaaaaatgtaggaccttatgtataaaaggtatcaacaagatgttaatgggataaacctcatattgagaccgctaagatgaaatggattcatgttaaggagaaattggttgtcctcaagaaaaatgcagaaccttatgtacaaatggattgtcttcaaaatgttgttcttgtagctacaacaaagagaaacaacaatggtggtgatgctatacgtgtagaagtagcaatgttggtcttgtagctccaagattttgttattttgttgttgatgaatgatatctatgataatatattgctaagtgtatgtgatgatcattggttgttgtttaattataatggtttgtgcttattgtgctacattgacattggtaataattaaaaaattaaaatggccttggttgggccaaatgttttgtgacaaaaaaaaaaaaaaaaactcgagggggggccccgggtacgtattggtttttggtgtgtggacgtgattcttctagtgagatatgttctgaagcg

SEQ ID NO: 56748 - DNA, 212 bp, Zea mays
  Clone ID: MRT4577_151745C.1
gatttgcagcctgtaaatatctgagactaagtttcatcatttctttttctccttgcgggtttataagtgaagaccacaatctgagatatgaacgcagcactgctatgtaatattgtactgcactcagcagaatgttggaagaatacttttcattaccgcctcgtttggatcattggaattgaattccattctaataatagtaatttaggcat

SEQ ID NO: 56749 - DNA, 363 bp, Zea mays
  Clone ID: MRT4577_151746C.1
tttgcttattgtcgtacttgaacatgtaggtgatgtattcgttgctgatgaggtgaaggttaaggactccaaaacccttctctttggtgagaaggaggttgctgtgttaggcatgcaggaaccctgaggagatcccgtgtggttcggttggtgccgcataagttgttgaggctactggtgctttcactgaccaggagaaggctgcagctcacttgtagggtggtgccaacaaggatgttatctatgctcctagcaaggatgcccccatgtttgacgatggtgtcaccgaaaacgattacaagtctgacattaacattgatttcaatgctagctgcacaaccaactgacttgctcttttgctaa

SEQ ID NO: 56750 - DNA, 240 bp, Zea mays
  Clone ID: MRT4577_151747C.1
gccactcgttcgaagacgcgttagtctgcatgcaggaggtaccactatctgagtagggggcaagcaggacctaatatccttcacacgtaatcccgtacgtactacaggctccagtcctctgcttccagctgacatagtgcagatattctgacacaagagtcagcaccaattgacagtctgcctcgagacaaactgcgactttgggttccaagacagtagacgaagcacagtttgggacga

SEQ ID NO: 56751 - DNA, 226 bp, Zea mays
  Clone ID: MRT4577_151748C.1
agcaggcacgcctgcaggagccgggccggaagtttattgccgggtcgacgcgctctcttgtcggccggcgcccttgatggtcgtttgtagaagctggagctttacaacgcagaagggtggcgatcaccttggtgctcatgcactactgctgacaaaaatgtcaatgggtatgccattctcaccaggccgagttttgctagtgcattggaaaatggatgcacgtgcc

SEQ ID NO: 56752 - DNA, 438 bp, Zea mays
  Clone ID: MRT4577_151749C.1
ttgggtacctcgaggccggccgggcactcccctgccgtggtgatttcccctccctccctcgctacctagcctgttgatgcgcaatcttgcgagatcaatgtcaagaaggtctagctatcgatatgcaccccgagaactgggacacagatctggtatagagaaattactccctttattaatgaagtatgtggtctcatctggagacagtcgctctgagggattctgtaagtgctctcttgtaatctgtgtgaagagacctgtgtggacataatgtacgccacaaatgacctgagactgtgcctagccacggatatgattgatgacgatctctcaccgctaaacttgcatgttatgatgagcgagcttccaccaaactgcacgtgtggatgaaataaatcaacatggtgctgctccctatgtatcagcccagtgatgccg

SEQ ID NO: 56753 - DNA, 1108 bp, Zea mays
  Clone ID: MRT4577_15174C.1
cattgggtacctcgaggccggccgggagtccagccgcgtctcccgctctcgtcttttctttcggcgacgagccgcagactaggcaaccgctgccgccctaggtcaggtgcccaggtatccatcggacgacccttccccgtcgacagcaagcaccaggtgtgggcaatatcaaatcaaactgtgcacttatggaggcttcaattccaagttttgaaagcatgtacagccaatattatgtggcatgaaagagatggaaaccagtcagacggccaacttggggattcatcaggagctgggaccagagatcagtcaaaatcccatgggaaatcatgttaacccagaaaaggaaactaatgaaattccaggatctgaggttaaccaagagcttgtggaaatatgccagggcgcagtggtggaaactgatacgatccaagaaaatcaagctgttccagaggcaggcttagaggttaatgaagagactgtggaaacatgccaggaaacagctgcagaatctgatgttaacctagagaagcaaacttctgatccaggtgttatttaccgctgcagaaaatgccggagaatgcttgcaacacaagaatttgttgttacccatgaagtaggtgcaggtggcaaaagcttcagagcaggcaaacggtctaatgtgcatgaggatgatgagaaaccagaatgtccatgcatcttcgtggagcccatgaagtggatgcaaactgtggaagaaggatatgttgcgaaaaagctcttttgcatgggatgtaaagctcgtctgggacagttcaattgggctggtatgcagtgcagctgcggagcctgggtgattccagcatttcagctgaccaaaagtaagatcgaccaatgctcaatgtaacaccagtgcaattaggcgaagttttgacccccttagcagtgtcgttacaacatatatatgtgactaggaaacagtatcatgtagacatgtataggcactgtggtcatttggtctgctgtttagtctgctgctgctgattggcatgtgggttccaccaagctgcaacaactgatactaggaagcattaggtgggctttcagtttgctggtttgttttgccctg

SEQ ID NO: 56754 - DNA, 476 bp, Zea mays
  Clone ID: MRT4577_151750C.1
cggacgcgtgggacaacaatggcgagaggctcttcccaatcccaacaatcaacctccaccggttcttcaaccgcccggcccggtctggccgctcctcgtggttccgccgccgctactgccggcatgcgtcgccgcaggctcggtggcggtggtggcgtatcctcaggcggcggatctggagttggatcaggatcgagcaacatgctgagattctacacagatgatgctccggggttgaagatctcaccgacggttgttctgatcatgagtctctgtttcatcggcttcgtcactgctcttcacgtctttggaaaactctacctccacaaatccggatcccaagcttagatccggatcaggacctggatcgtttaatcggtgatcgctgttttttttttttttttttagtatgtttccttgtgttttggttcccttttttagtcttttcgatgagaaccatgtaaatcgctaagcgt

SEQ ID NO: 56755 - DNA, 118 bp, Zea mays
  Clone ID: MRT4577_151751C.1
catatcctatcctctacctctgcatcatctaccggctccgacgtctcgtatccggtccggaccttggcaggcatgggcaacatcaacatcgtatttgacactttagaaaggatcgaca

SEQ ID NO: 56756 - DNA, 406 bp, Zea mays
  Clone ID: MRT4577_151752C.1
aacccgaacaaaaacagggggggcaaggaaataaaacgggaattgggggggggggggggggaaatcaaaaaattgggggctttaaacaccatagggtttataaaaaccgttgggtttcaatggatcgattagcccccacagaatttaaataggcctacttaggcaggggggagggaggaaggccaaaggggaatttttttttgttaaaagtttttaaggcccacaaaggggggggccgagtttgcaaagggggccgtggttttcttgaagggggggggaatcaagtttttggttaaaaaccgggagggggttaatgaaaagttttaaggttgtgaggggcccgtttttttttacgggaaaaaaaaagttgtttttttggggggggatttaaaaaaaagttggtttt

SEQ ID NO: 56757 - DNA, 301 bp, Zea mays
  Clone ID: MRT4577_151753C.1
aagcaagggaaggttccactaccccccccttgggaaaaaaaaaatcggtcaacactttcctttgggcagcccgacatgcaaaatgggcgtgccaggacaactgatcatcgagttttagcatttacgggcgggccatatgcattggggaggacaacaaccgcctgtttttttgaaaaaaatgtgaagggaagggagatttacagatggcgacgggggatttcactttcgggatgtttggatgaaccctcctgcacctggggcaccggcgttccatagggaggaccctttcataactggtggg

SEQ ID NO: 56758 - DNA, 731 bp, Zea mays
  Clone ID: MRT4577_151754C.1
cattgggtacctcggccggggccgggcttccttgggccaagcccagaagctgtctggtttcccctagccgacgtcacgactcactcacaagcacgacgacggggcacacgagctcacgggtgatggcgaacgagggcgtcgcggccgagcgggcggtcaaggcccctccaccggagacggagagcatcgtgtggagggaggacaaggggaggttccagacgcccgacggcgaggccttccttcagtaccgcctcctcgacggccgcggggcccccgctgcggcagtgatggacctggtgcacacgtacgtgccgcggagcaagcgcgggcaggggctcgcggcgcggctctgcgacgctgccttcgcccacgcgcaggcccgcggcatgcgcgtcctccccacctgctcctacatctccgacacgtacctgcctcggaatccggcgttgaaggagctcgtggacaaggatcaagaaccccatcccaaacccagcagcatgtagatggttggttgttcaagaaaccagctgccacttaaataagcagatatccagaaatacctgtcacttgatgaacgtttgcttcttcgaaggcgttgatgtcagatgttacacgttggatatctcgtgcagtgtttcagaaccatttgattttggagaagataataataacaaagcttgaaatacataaaaaaaaaagcagagcaaaaaaaaaaaaaaaaaaaagcccta

SEQ ID NO: 56759 - DNA, 426 bp, Zea mays
  Clone ID: MRT4577_151755C.1
ccggccgggacgcgaaacttggttacatctcgacaaaatgtcactcaacaaagaatgcagattttacctctggtactatcgtgaccgtccttctagcctcgagtaatgaggagaaagaagtattcaacggctatgtcgatcaattcggccaggcacatcttggtcacgttcatatcacgcaatcttcagcgctccgacagtggacagacatacagaacgaagtctctgaataagtcatggatgtccgcgtgtattgcgacagctgaacgagaccatctccataccaatggctgacttcacatagggacagctgatctacacgatgccttgcaagatcttacgtgatcatccagctcgagtgctacatctcgatggggagcacgaacttaagccagaagcaggcacctcgagctttaggatgcgagc

SEQ ID NO: 56760 - DNA, 463 bp, Zea mays
  Clone ID: MRT4577_151756C.1
cctacgcgtgatccgatagcgatggcaactaatattatgaactagctgtgttatgaacttgagaactaaaaatgtaaactatgggtgtgaactcatgtgaatgcacctactgatgtatgatgacttatgtatatgaacttatgctgttaggacttgtggaaactagatatatgaatatatgtccatgtttttgaaatcaaagaagaaatgctatcattaattgaccagagtgctatagaagtagcttgcctaagcaagatgacctaatgatgcgagatctataaacagtagaaccatgctagatccagattagtctaaagaatgacaacagagaattttcagcaggtcttgataggaactgacagactacaatcgtagtctaagcttaccctgacattgatgttaattgatcattttttgcactattgactatctcagatagatctaacttattagagacaac

SEQ ID NO: 56761 - DNA, 227 bp, Zea mays
  Clone ID: MRT4577_151757C.1
cactttctgtaataactgattacaatctagaaagaaacgttgcccatagatcaaatgggagcttgaacgctgaagccaaataacagatctgatttggtgagcttttatagaggaccagagaagaccgagtaaactattccatgtggtgatgtggatttcagtttctacttatgcagtaacttccttgtcgccttgatctttttcttcctgcctctccaatggttgct

SEQ ID NO: 56762 - DNA, 347 bp, Zea mays
  Clone ID: MRT4577_151758C.1
atccccccacttagagagaacaaacaagagacagggggctcatttatataaacgatcaaaagaaccccccggccggagcagaaaaacctctccataaagccaagggtcataccacagcccctcactcgtgcccctaagcccaacaacaaacgggtttcaattgaaaaaaaaaaataccacccttgcccgtgcgggggggataaaactaacaacattaagtcccccggcttccaattattcagaaaaccgggggggaacccacaccctgccaccaaccggcattaccgaactgctccttctggccgagcgggatgaaaaatcgaggccaaaaaaaaaaaccaccaccc

SEQ ID NO: 56763 - DNA, 639 bp, Zea mays
  unsure (1)..(639): unsure at all n locations
  Clone ID: MRT4577_151759C.1
tcgaggggccggccgggcccgggagcttcacaacaaaaattccatctccaaagtccaaaccaaatatctgaaaaatggatggggagcttgaactgcccgaattcaaccctcgggaacgcgtcaagcagcagacttcagtcccgtttctctgggaggtgaagcccggtgccccgaagagggactgggtcatctccaagccagtgccagtagcgtttgcatgcccgtccccggccccgacaaagcttgttgtgagcgtgccattccagtgggaagaaaagcctgggaagcctctgcaggaagcatctcccttccatgtgctgcccccggatcacggtgccttttcagcatcttcccgctcgctgaacccgtttgtggtcgagagcgaggaggaatactcgcttggttttgagctggaagcatttggttttccagacagcagcgacgcctctggcgctgcagcgtgggcagatggctcctcctccggccgtcgtgacggctggttctcgttttcagagtcggaagactacagccactccagtggcgatacttcagcacacgacaaggagttccagtttccccgggcgccttcagagaagagctgggaggtggncaatgacgaggacaatccatggagccctc

SEQ ID NO: 56764 - DNA, 458 bp, Zea mays
  Clone ID: MRT4577_15175C.1
cccacagcgtccgatacactacaggcgagccccacatcgttggctctctcttcgacacagagaaggacgacggtaaaaacctagataacgctctctctaaaaccctatgaacacgtgcgtgaggatgagagagccgtgcatggaacgggtggcccgcaacgtggaacacgagatggccgagtctgatcgccttcagccgccgcagccgttcggaatggtatgcaagatggtgatgatgcatgacaagaaccaagctctggtgcagatggaagaccaccatgcttacatgagcgcgctgcaagattacacttcgtgcgcaacctagcataaggcgaaggaatgcatacatgcagggctcatctgaccaagagctgaccactgaccagagctctgatggaaggaatgtggataaggagtgcgaacccaaccgaatactagtagttactatccaccatgtg

SEQ ID NO: 56765 - DNA, 808 bp, Zea mays
  Clone ID: MRT4577_151760C.1
ctcgaggccggccgggccgggttttcaaaaaaagcacaggaaagggccgcggcgagcagcagcgggggcggagtgtgctgtggagcggcccgcgtgcggcgagggtcgtccctacaagccgtctgacagttcataagaggtacccttttgggaaggtcctcaccatggatctatcccaggcactgacctcatccagtgatgatgaaaccagggcacttggtacattgcttgatatgttcagcagttccttttcacttgatgatatagctgatgcatatatcaaagcaaatggcgatgttaacaaagctggagatttcttatacgaccttcaacattcattgcctcataccaaagatgttgagtcaagtgtcgaggctaacctttcccatactgacaaggcagttgaagaaaactgtatggacaattcaagccaaccaagaactcttctccgtactgagcaggcagttgaagaaaatcatttcgagaattcagatcacacaaaaatgcctgaaaatctgcataagtctagtgctgcatttggtactgtctccagcatgttaagaaaagagtctatcagggctacaacaacagcgagtagagcatcaaaaaaaggcaaacctcttagggttgaactgccagagtacatgcgggatgattttaaggtgacatctgatgaatctgactctgcaccgaggagagagactttgaataacagggatgtgaggagtttctgttttgcatgcttggtgaagggatttaagctccgtaaagaattgatccatgaagttctaggcagctgtggatatga

SEQ ID NO: 56766 - DNA, 564 bp, Zea mays
  Clone ID: MRT4577_151761C.1
gccggccgggctcggatccgccaccgttcccccctccccatctcgtcctacgatctcgtgcttgtagatcccctcgcacctcacccattggcttcaacaaggacttaagaccgacgacgatggcgacgaaactggattagctgcgcacacccgtaacgagcgaggcgcacctctccttcgaagcacgactgctcctactacgacgaggtagtggagaacaacaaccactacgtcgctcagccccccaccgacgacaaccgccaggagctctccaaggagctcttttacaccctcctcgcaagcctaccaggtcgactatgagccattctggaacgagctcgattgtgtcaagaacctctgcaagaacatgaaggacctcacggtcgatgaccttgacattgccagattatctgaagactacctctatgtctgggtccgcatagacgagatcgacacgagaggaaccaccttgatcggctataacgactatatgatttccaccgtcaaagtgctggtatatccctgtgactattagctgatgcttcttgaacgacaaccctgcta

SEQ ID NO: 56767 - DNA, 520 bp, Zea mays
  Clone ID: MRT4577_151762C.1
ctgacgaactgacgattgccgcatcaccggcgagggaaggcggaacgacgacccggtcccaagtcctcgcaaacgactttctttctctctctctctctctctcttttttcctttccccctccttaccactggccagggcgtaacccggacccatatgcgagagtggacacaccacccacggtcttcgaaggtacattataccataagagttcatagtagcgctaaccacccactcaagcccgacctattcgatttagtttcaaatgcgacttatctaggttattgttaatttcgtcttaaccgttcttataataaaggtcaaggttgagaagtataagatattcgaggagtacgagttctacgaatagaacgtcatctagatgcagttacaggagatgcttatgttatagatttagatacaggaacttttcttgctccagattatcatattacaggtggtctatttcgtcttcttgtatatacagttgatattgcttatctattacaaatttaagaataa

SEQ ID NO: 56768 - DNA, 257 bp, Zea mays
  Clone ID: MRT4577_151763C.1
cataaagtgatcgttctcaccttacaagacgagatactgacatagaaatttgctactgtagcaccacccgtcaaattgaaatgggaatgaacaatcctaatatcttccgaagagggagagacggaagctactaatcacaagaagttgtcagaatttggaattagaatggcagccggcttcaagcagatgacttcctccaggactatactttattgatcaacatccttcataggtaagagctattagtattctaattg

SEQ ID NO: 56769 - DNA, 231 bp, Zea mays
  Clone ID: MRT4577_151764C.1
ccccccccacgaggccacgactttggcatataacttggctcatctggactttggggacccacacaggaactaaacgcaggtgctttaaataataaaacatgggggacaacgctagatagtttgtaaaagaaactttgggctcccgggtgaatcttaaaatcatttgggggggacatgggcgcatacacacacaccctttttttgttctcgccacacacgtttaaccccact

SEQ ID NO: 56770 - DNA, 466 bp, Zea mays
  Clone ID: MRT4577_151765C.1
caggcaatccagattcaaacttccatggaggggggtttacatggcatccaaataaaatccaacaaattgggggggggggggggggcaccccaaggggtcaaaggttttaaggccaaaaacatggaggggggggatttttgggatggtttttagggaggatccattttcttaagaggtgcctgggcagcagttttgggctggtccaacaattaatttggaaccttttggtggtggggggggggtttattaaagatccaggttaattccaactaaaaaggtttggccttgggttcggcatgcactccataaattatttttggaactttaaaaatgccttttttggggggaaggtcccaaaggttaaaattttttttataaggttttggggggtgggtttctttttcgaaggggggcccaaagtttttataggaaaatttttggggggttttttatggaaaaggggggg

SEQ ID NO: 56771 - DNA, 441 bp, Zea mays
  Clone ID: MRT4577_151766C.1
gggccggggaaaaaaacaaaaatatagggggccccacccccgggcctttaaaggttaaaagagccggtttatcccccgggctaaaaaaatgggcccccccccaggggggcccccccaaaaaaagggcccccccccgggccccaaaaaagggggatgcctcccattttttggggggaaaaccccccccccccggataaaaatacattttttttaagcccgccccgaccccggggtcccccccggaatttcggaccgggccccggggggggaccaatttttcctaaaggggggcgtattaaagcttgggggaaacaagggcaaaagtgtttcccgggggaaaatggtatcccctcccaattccacacaaaaaacgagccggaagctaaaaggggaagcccggggggcgccatgggggggcccactcaattaattggggggggc

SEQ ID NO: 56772 - DNA, 170 bp, Zea mays
  Clone ID: MRT4577_151767C.1
gttgaggtcaacacttgtctttatcagttccctgcaggaacagtcaggccaagaaaacaataacgcagaaccctaaggttaggggggagaaccagacagttattccaagggcgggaaatccatcaccatggggtgaagcaaagcctaggtctgcaggttgcatgcgcggc

SEQ ID NO: 56773 - DNA, 487 bp, Zea mays
  Clone ID: MRT4577_151768C.1
cagaagggatccagaagtttggtcgagcagagacataccttatctaaactcagaagggatccagaagtttggtcgagcagagacataccttatctaaactgagaagcaatgactagattggtggttcctatgtttcctttctgcctttcagcctctcccggcggggcgagccggcgcatcctttccgctttctattctagaaaggggtttctatcacgactgatccgcagttcgatgtctttagcctgacccgaaacaccactcccgcgagtagaaagaaagagagatgatctacttgcaacttgctactgctggtaccttgcaatcgtatcccggcacctttaaagcactttccggtgtctttcgctcaattgctagccctgagctgccttgcccaactaatactaatgcactagcatctacggacgttctgccttgatttgacatagatgaataggatgaaatgggcccgagggaaagcattctt

SEQ ID NO: 56774 - DNA, 1995 bp, Zea mays
  Clone ID: MRT4577_151769C.1
caacctcgcctcgcggtcgcagcctcgccccgatttattaacaggcaaacaaatgtcccgtccgttccctcgagaaaaggccacttctgccgtgtgcatcgcttgccagcttccgcctttccatgaccacgccgctcctgctgtgattctaggacgacgtgccgcccgggccggctgccttctcacgccgggagggttggggaacgagcgccgcagccgccgccgccaccacgaactcgcggaagaccatgccgagatccaggggcaacgagccgccgctgcggacgtcgcagcgcgcgccgctgcacctcaagacgacggcctgctccgaggcgaatggcgcgcaccaccgccccgtcgccgaccggagtagccccagggtctcgccgcgcagccctctgcccgagaagaagcgtgcggcgggaacacgtgttgcggagctggagggcaagctggggaaggtgcaggaggagctcaagaagctgcgggagcagctcgcgtccgccgaggccgccaagaaggacgcgcaggtcgcgctcgaggaggccaagaagcgcgtcggtaccaagggaagcccagcctccaccaccaccaccactcctctctcccccccttcgcctggggtcgaaatcgccaagaagaccgaggagctgaagctgcctcagccggcagccgaggaggagagcagcataaacgccccggcgaccgatgtgtttgaggtcgtccgggccgagtcgggggacaaggagaaccagagcgcggctgaggactgcgaggtcgtgagctgcggcggcggtaaggcggcgctggacgtggccgagaatgaggagacggaggaagaggagactaagaaaatgatcggggaggacaacagcgcggcggtggaatctgacggcgccgacaaggagagcccggaggtcgtggagctgaaggcgaagctggcggagaaggacacggagatcgctgccctcacggcggaaaacgctgagctgaagaagcaggcagaggaggccgcggaggcggcgaagaaggccgaagaggggcccgcgtcgagggcggccaaggccgagcacgaactgaaggagggcgcagcgcgggaggcccgggtgggcgagcagctgcgggcgtcggaggccgcgcgggaggcgctggacggcgagctgcggcgcctgcgcgtgcagaccgagcagtggcgcaaggcggcggaggcggcggccgctgtgctcggcggggacaaccacctcaccggactggccggcaacggcaacggctggggctcccccgccactatgcccgacgacggcgacgacgagggcttcggtggcaagcggaagggcgccggcatccgggtgctcggcgacctgtggaagaggaaggggagcaagtgaaggcctgccgcctgccgcggaatgggacccgtgtcccaaatttcgcaacggtgagctcgctcagcccgcccgcttgccagcttgaacaactccatcccttgcactagcttagctccatcgttttaccgcgttttggttcggagtctacttatgtttgtatgatgatgatgacgatgatgagacgatgctcgtgaggttaaactatgtctgtaacgcttgatcccgctgctgcctgctacctccgcgtaaggagcaaccaagatggcttggtgcttttactgcattgcggcggtgctgttgacgagggagtagatggtgtttattttcatggtggaattgaggaatgcttgattgcagcatcaagaaatgcctcttgtgactctaacgaatcctaagatatcattgcagcgcgtaggatctccggtggcctttagagagagagagagaatcgctggaatcctaaagaggttcatcgtgatacttgctgattgtatggtggctgttcatgatactcccagcctatgaattatgattgcatccgatggatgcaaccaaaaaaaaaaaaacctgcagcccggggatccactagttctagaccacgcgacca

SEQ ID NO: 56775 - DNA, 1066 bp, Zea mays
  Clone ID: MRT4577_15176C.1
ccagccccggctcgccggcgggctggccggctaggaacggcggggcacggcctccggcctggcgcgacgcgggcgcgggtccggccccggcggctcgcggcctcgagccccggcatcggtggcggcgcgggcgcggccccagccaggcgctctggcctagcggccccgacggcacgggcacggcggcgctggcagccccggcgcgcggtttcccgacggctcgggagcggcggcctccggccccgtctgctctggcgcggccctccccgcggcggtccgggcttggctgcgcggagcgcagtcccctggcggctcagcctctgcgtgggcgcatggcgctaagccgcggccccggcggcgcggcagcgagtgcgtggccctatcgagggcgcctctccggcgcgtggacgagcaggcgagcagccccgacgacgtccgcggcgctgcctcaacagcgcgggcgcgggcgtggcctcgacgcggttcctggcggcgcggcccgtggtcccctgcgcgggcgcggccatgccggccccggcgggggcaacgaccccattcgcgtgcgtccctcaacggcgtatcccatgcccaggccttggcggcctcagcagcgcgggtgcgtggactcgacgacgcgcgggcactgcccggtagcgcgagcgcgcggcacctcgggcgcgaggatgctaccccgtcgcctgggcaggcagccccggcgcacaagcacgagcgcggtccccagcagcgtgctggctcgtggccacggcgcgagtgcgctgccatggctgggcgaccaggcatcagcgcaagcacatcccaactcgggttacgccatggcaggggctgcgcccaccgtcgctgttcacttggacgcaaacaagccagggcctgaaggcctcgggagccaacgctggtccttgatggaaaatcgttgtacggcgagcgcaggtggcagaaatgttcattaattatgaacttgataagtttgctattcgtaccttgtataatcagacttctctgatttgtttatttgaacggatgctcttataaattgatgaatttgtcc

SEQ ID NO: 56776 - DNA, 257 bp, Zea mays
  Clone ID: MRT4577_151770C.1
ggacaagcagggtttgctgcaggccatggcggccccgctggaagctgctcctgcgcctccgagctccgagtgatcgccatgatgtgtacgtcacgcactcacgctgtgtgtatacactctactatagcaaacatggtaatggagctgcatacagaacgaataaggcgtgacgcgtgtcagacagtgagagtacgtagtaatttgtacatgcacgtgatgtgccaattaatcaaagattaacatgcagttaattaatt

SEQ ID NO: 56777 - DNA, 497 bp, Zea mays
  Clone ID: MRT4577_151771C.1
ccggccgggagctgctgctcgccttgctttccacttccctccatctctctcagatcgacccgccagaggtaatttcaccctcgatgcgacacaaattcgtccgtgcgctaccggcataacctccgacaaccgcgaatatggaagcgtctgtaatgcgagacgacgttccaaaccagattgtgtgttcgaacatacaacggcgccatccttgccaatgacaaattggaattgaaaagtaccgtggaggagatccccactgagtgccacaaaagtgaaagtagaggaggaccccttcaaacctaacacggctcgcaccgtttgcttcatcgtgaatgaaaaatacttccctgggagtttctcgagaaaaactgtaagatacatccaggaaatgaaatggagaaatgtgctggcgacatgagaacattcctgagaaaagcaaaccactatcgctatgcatgacactgtaacaagctgctgatcgagctactactgagaca

SEQ ID NO: 56778 - DNA, 351 bp, Zea mays
  Clone ID: MRT4577_151772C.1
attcggctcgaggtgcgatgagattttttcattactatagcccaaggcactatcatgtacctaggcccacaacactatgcagtacactcagtcgatgccctggcatacatgagtccagtacgaaaaaaccaagtgaagtctcagcaagaaggcttgtccaagatagaacagcatccatagtgctgccagtatgcatatccatacccacgcgtttgtatctcaaagaccgttgccaccttcataacatttattatttgtaagagattgcatcaggaattaactgctacatacaacctacatcacattgatcctctaagagcactcctgggtttcagcactactctgctctgc

SEQ ID NO: 56779 - DNA, 319 bp, Zea mays
  Clone ID: MRT4577_151773C.1
aatcaagacagctgtcgatccaattgtcacttgcgtctccctccaacaagctaattagggccggtgcgtcatccctcttctagctctttttattatccgtggtggaggagaagcagcaccaccaccacctgttgcaccataagaaggacaaagagcaggaggagtgatgcgacggagacggctacggtaagtacgccgaatacactgaaggaacgcgtgacgtaggtggtggccgcgggtgaaaactagcacaacgagtacaatggagaaaagcattatagagaggagctgtgcctctgggaggtgcgagacatcgccg

SEQ ID NO: 56780 - DNA, 234 bp, Zea mays
  Clone ID: MRT4577_151774C.1
cagtgttctttggtttttatgtgaggcacgcggcagacttcctcgagggtggtgagaaggtaatgcgctagggcacgcctactgatcaagacacgattcatcaccctcaggggggaaactccgctgatgtggaaacagtcacggccccaggtcaacaaaaccacagaggttcgtgcaaaaaaccaaacagggtgagggggaatacacggccaccaaacgtcatgcggcccgagg

SEQ ID NO: 56781 - DNA, 441 bp, Zea mays
  unsure (1)..(441): unsure at all n locations
  Clone ID: MRT4577_151775C.1
aagcgtcctaaaaaaaatatatcaattaattatataaaattatattttaaaaaaaaaaaaaaaaaaaaaaaagaaagtttaaattaaaaggctggcgggctaaaattcccnccctttcttcctcatactaccaacattcttatctctttcatttaactccaaattttttttctaccaccccatattttacaacttcttcccttttataactcatttctccccaaataaaccttctttttacctaaccatacttttctaacattttctataatatttttatatccctctccttatatctcttctaaactatttcctatatcttttattatattttttccccccctttttctacttattatatcccctttttttattcttttaactcctcttttttttccatttacttctcttttttaatttctaatattttatctttttttt

SEQ ID NO: 56782 - DNA, 276 bp, Zea mays
  Clone ID: MRT4577_151776C.1
cctctttaacccaaaatgatcaccctgttctgcagtgtttatgcgtgttaaagaggggcaccatttttgtaagccagatttttatatttctattttctaatgagctacaccgcctgaactatacatgggaagcaaaacaagcagggcttacaaaaatggtgcccctctttaacccaaaatgatcaccctgttctgcagtgtttatgcgtgttgaatttagaatgctatgttataattatcccggaccatattgcatcaagtataatatgtgctaac

SEQ ID NO: 56783 - DNA, 502 bp, Zea mays
  Clone ID: MRT4577_151777C.1
gggctctgcctccccaggatacttcgccccccgttccaccgcgagcccttccggcttccgcctctgttccgccgctccagcctccaggatccgtgagaggaaaagtagtagccccatccccaaccggtcctaacccacggtacccaatacttgactcggctctctccatgagctactgttccatctccatttcttcaatcatttctcgcctttcatgttcaagggcgttgcttgccaaccacggtatcgttctagccgccggggccgaacgaagtcggggatgtaattgaatccagcgatctttggatgctcgtcatacgtgccaacagcagggtcaatttccctcgaaagagaaggccgaggaaatggaagccggtttcctgtggaaagagatcggtgaccaagccggtgcggcgagaatgtccggtgggaacaagaacaggagcctcgactgggatttgaacgactggaggtgggacgccaacctgttcctggccacacc

SEQ ID NO: 56784 - DNA, 313 bp, Zea mays
  Clone ID: MRT4577_151778C.1
aaaccaaaaatttgggggccgaaccacccgagggggccccgggggtttttggggcccaacggacaatttacttctgggggggcagagacacccccgtttgggaagaattcccacggggggggggggggcttaaatccctttggggggaaaagattaaagaaagggcctaaccaaattccgtgggggtgtgtccaccccttctccaaaagtagctccttgattaggaaaattggcccccggttcccccctagattggggccaaaaaacaacagggccccttaatgggctccagggctccccgtggccccggggg

SEQ ID NO: 56785 - DNA, 545 bp, Zea mays
  unsure (1)..(545): unsure at all n locations
  Clone ID: MRT4577_151779C.1
tccacgcggcccagcacggccgcggcaggctcgcccacgaacacgcgctccttgccgcctccccccgcgcccacgaacagcgccgacaggtccgagcccggggagaagctgaggatgtcgaacgcggtcggctccctgtcctcgtccgccttggcctcctcctcctcctcctctacctcctcgtacccgccgtgcaccaggccgccaaggtcctcctcgccgccgtggcggaaccacgggtgcgccacgatgccgtccgcgtcaatgcgcgccgacgggtccgggtccagcacgcgccgcagcaggtcgcgcagcgccggcgagaaccacccggggcaccggaacctgcccgcgtagatcttgcggtacatgttcaccaggctggcgtcgttgaaggggaggtacccggccgccagcacgaacagcaccacgccgcaggaccagatgtccaccttcccgggctcgtaccccttgcgcgacaggatctcggnggccacgtacgccggggtgccgcacattgtgtgccggaagcctttttcttcttc

SEQ ID NO: 56786 - DNA, 319 bp, Zea mays
  Clone ID: MRT4577_15177C.1
agaggaccaggcttgctttttcttttttctaaaaaacttgttccccacaaaagggttgtttcctttggagtaactggcaaaaagggtaagcttttcctggtaatttttcaaaccaagcttattttttttttttcgctttcggtaaaattgaggggcgggaaaaaacccgaaaaaagaattgttttttgcaaccaagggggggaaaactggagattacggaaacttttcttattttaaacttataaactggacagggttttttaaggccatttggggaaaaagggaccggattggttctattgctttcaaacattaaaaa

SEQ ID NO: 56787 - DNA, 603 bp, Zea mays
  unsure (1)..(603): unsure at all n locations
  Clone ID: MRT4577_151780C.1
ataataaagactttaaagtctggtcgtttataacttagcagattaaaaagtctactctacgcagccatttaaatgctaacaatatgtagtcttgacacctgattttgcagttaaatatggctcagtcagtacccaatatcagcaggatcaccaatgtactcggcgacttggtcaagtttaacatgaagcatctcctggctatctgcatcgcaaaccacaccagtttccttatccaaatctttctcaactagtctcccatacacacccttatgtctaccagacagaaccaacacagaccctcctcgcctgggcaatgcagtctcaagcaactcctgatcaatcccttgaaccaactcctgcgtctcatccatagcaatatcacaacttgttggcccaaccacatcagtcaccactgctttcttaagatacaatctcccacctttaacatccttgcttattattctcacctttatatgactcctaagccatgaggtcttctctctncgctctctagtttgacctctatagttctgcttacaggctttaacttcagtgcaactctctccctctgtttctctattacgttttctcacacctctatct

SEQ ID NO: 56788 - DNA, 310 bp, Zea mays
  Clone ID: MRT4577_151781C.1
actgagcccgcccgctgccacaccagccgggcgggactaacgagccaggggatgggcgcaccaccggcaccagcgggccggacgggctgcagcaatgcgaaccgactggcacgcaaggggcacgggccctaacggcctgccgaactaacgcgccggaaggccggcagaccagcaaaaggaccaacgcacagaccagaactcagaactgggcagacgcaggcagaccagggtggaggcgtagaccacccgggagctagccacagcatggttgtgggacagcttaaactcaaacaagtggcacacctagaaa

SEQ ID NO: 56789 - DNA, 369 bp, Zea mays
  Clone ID: MRT4577_151782C.1
ggcacaatgcacttttccatactgtccgcacgcccggaatataccacctctgctgcagaagagttttgggtacaacacacatgtctcatcaccacctatgaccacacacacccgcagaccacgctgatggctccctgaccacagatgtttattagacaatgacatccatataaagggacaccacagggcaccagactacgcacatacccagggacagcagcagcttaaatgaaccatggctttcttaggacaatagcttggtgatccctcggattcaggggaatggctgcgcaagtagcttctctgtggggataaacagcacgcatagttctgccctctggcacttgcagatgaactggaggacggagg

SEQ ID NO: 56790 - DNA, 370 bp, Zea mays
  Clone ID: MRT4577_151783C.1
gcatttcaggcttggccgaacctcgggataaattcctgcgtctgtgtgcttcgctctgtattgtgtgctgactctctgtcttactcactttttatatctgcacttcaacacttatctgtggtacaagttatatttgaagtgcagggcattttgagacaggatcttctattccgctgcaacctactcgaaggatctttcattccactgcgatctggtccttgagtagagtaagaactaaagttttaaagtgataattttttattcgcctattcaccccccctctaggcgacatccagatcctgttcccgggcaaagggaactttcactatgtactcaccaaggcacccattacgaggcgtggaacatcgtc

SEQ ID NO: 56791 - DNA, 4261 bp, Zea mays
  Clone ID: MRT4577_151784C.1
atggtgttcattggttatgagaaaggtactaaaggttacagggtgtatgatccagtagccaagaagcttcatatatcaagagatgtgatattcgaagaggcaaaagcttgggactggattggtacagatcagccgagtccatcaacatctgtaattgatgtggagcattacagtattgcaggaccaggaacagcaaccgaaagtgcagagaatgggacagaagaaacaacagcagccgatgattcagatccacagtcacccaatcaaagtcaatggcagatagacactggttatagtgctggttcaaatcagaatacaccacaaggaagtccaactgagcagggagtggataataagacttgggagcttgcagtattaccacctggacaccgagctatagggctgaaatgggttttcaaagtaaaaagagaccctgatggaaagataaataagcacaaagctaggttggttgctaaggggtatgctcagcgtgagggggtggattttgatgaagtatatgccccagtggcaaggattgaaactgtaaggttgctgatcgctttagctgcacagaatgggtggaaagtgcatcacatggatgttaaatcagcttttctgaatggtgatctgattgatgacgtgtatgtacatcaacctcctggttttgttgtcaagaatggcgatgggaaggtactcaaactgaagaaagccctttatgggctgcgtcaggctcctagagcatggaatgctcgacttgataaggaattgttgaagcttggttttatcagaaatccattagagcatgctgtgtacagaaggactcatggtacagacttgctgctgattggggtatatgtcgatgatctgataattaccggatcaagcaatggagccattgaagctttcaaaagggaaatgaagaacagcttcagtatgagtgacctaggactgctaagttactacttgggtattcaggtggaacaaaagaatggggtgactacattatgtcagagttcatatgctctgaaaatacttgagcaggcagggatgaaaggctgtaatgcttgctgtgttccaatggagaataggctgaaattaagcaagaaagatgattcgccacctgttgacaagacaaattataggagcattattgggagcctgaggtacctagtgaatacaaggccagatattgcctttgctgttgggattgtcagcaggttcatggaagatccgagagcaaagcactgggcagcagtcaaacaaattctgagatacttggcagggacagtgaactatgggtgtgtgtataagcagctgggcacaactgaaaccaagcttctgggttacagcgacagtgacttagcaggtgatgtcgatgacagaaaaagcacaagtggttcagtgttcttgctgggtaacagcctggtaacttgggtgtcgcagaaacaaagagttgtggcactctcatcgtgcgaggctgaatatgttgccagtgcaaatgcagcatgccaaggtatttggctgagcaggctacttggtgaattgttggggattcaagcaccaaaggtaaggctgttggttgacaacaaatcggcaattgctttaagcaagaacccagtacaccatgacaggagtaagcatatcgacaccaaatatcattttgtcagagattgtgttgagaagggagaagttgatattgaacatgtgagcacaggtaaacagcttgcagatatactgacgaaggcacttgggcgtgtcagtgtcagcgaagccgataaggggttgattcgttttagcggggaagagactatcccgaaaccagaaaatgatgaagtggtggtttttaagagcttcttcaaagcagggttgagatttcctctgcacaggatgattgcagatgtcttggaaaattttgagatttaccttcatcagctgacccctaacgccattgttaggctcaacgtatatatctgggctcttagaagtcaaggggtggagcctctcaccgaagccttctaccgagtacttgaacttcattatcagacgaaggctagggaagacggactgcatgagaacttcggctgctataattttgcttatcgcaaagacatgaagacaccagtggtcagctatcgctctaaatggccgatgggttggaaatctgaatggttttatgtcaagattgatgagaaaaaggagaagctagcctcagtgcaacatggcccagatgttgtgtatgagtttagagttgtgtctgaaaatattggaactagagatttggtgcaggaatacttagccaatagagtatttccaatgttaaaggaatggaatatgccgaagcttaaaggagaaaagaaaaagaatgaacttgttcgactgccctatcacttcaagttcaagaaacatttcaaagagccttgccaagaatggttggaaatgattgaagctatgtgcaatgaaattttgggcaactacactaagaaagaagatcaattgatgacagcggccttcggcacccgaccgaaacgaaggctgaaccgagtaatggatgccctaaaatttgaataccctgactatggacggttaagcaagggtgccgaagggccaaagcgaaaaagagttgtcagtgttatgaagaggcaagctgctagaatgatagaagaagatgagaaagctttgaaaaataaaaaatccaaccctgagccgaaggtggctgttccgaagaaaagaaaagcttcggctgcggagccaaaagcaactgatatagaagaagaaattccttcaacgcctcctgctgctgacgtggaggaaatttaaaatgactccactaggccacatctgatgaagcttttacagaagaagaaggagccctcggcaacgaagaagtctgctgagccgaaaaaacgaagaattattactatgactgaagccattgaagaaacaccactgccagcttcagcgtcaaagacaccagctatcgaaagtgctacagctgctgaagttgcacctactgaagttgtatctgccgaaggtgcaacggccgaaggtgcaaacttagaaagcacattctctgatattgataaaatacttctggatatggccgcagaagaagctgctacagccgccgaagagaccatggccatagtgcctgggaaagaggatatagccgaagatacttcagaagaagagaacttcaactttcaaaacttaattgggcaagaattgtcaaaggctgagatagaaaagttgagactatgccatatcctgcgggtatcagccaggggcgatgctcttcggcggtgtttgctgacgaagcttgcttctacacagagtatgctgttaagcaaagctttgaggatgcaacaggaccttgaagacaaaaaacatgagatcataattgaaggtttagaaggcaaaataaaagatcaagcaactactcttgaaaagaaagatttcgaacttcagacaatggaaggcttactggcagaagctgaagccaaaattgcaaagttggataaggagcttctctcaaaatcagaaagctttgaacaagaaaagcaaaaaattgatacgaagtttgagactgagcggctaaagcaggtcttcaactcggttggaaccagctctgaaaaattcagtccttcggttgaagacctgtcagggaccttcgagcatattgagggcgaagttgatgctcttgatgaagttatagccggacacggtgatttctgtgccctgctagcttctcggggcacagctgttgccttcatgaagtctggttgcacacatgggaagattgttaatagaccaaacttcagtttatcaccagcagatctgattgatatccccagcctagctcgaagcataggaaacagatttataaagcaaatatggacgaagggtgggcaaagcctagctggtgacgaagctcgaagtcacctcaagctggatgatgaagccgaagaacacagagccgaagcttaggcatttagctgcacgtttatgttcctaataaatatctaactgcatgtgtgtcgagcggttgtgcggccagaacaacgctgcgttcgttgtgcggctaggaagtggtcaccgccatgcagtgcataaaattcgctctcgcgcgtaaggcgggcacgtcgcagcgtgagcacgtatggcggggggagagcccaaggtctaagactgtgtaacaccgttataagtatttgagatgagaacaagtcagctgcgactagcagagcaaaaaaaaaaaccccag

SEQ ID NO: 56792 - DNA, 2013 bp, Zea mays
  Clone ID: MRT4577_151785C.1
atggtgttcattggttatgagaaaggtactaaaggttacagggtgtatgatccagtagccaagaagcttcatatatcaagagatgtgatattcgaagaggcaaaagcttgggactggattggtacagatcagccgagtccatcaacatctgtaattgatgtggagcattacagtattgcaggaccaggaacagcaaccgaaagtgcagagaatgggacagaagaaacaacagcagccgatgattcagatccacagtcacccaatcaaagtcaatggcagatagacactggttatagtgctggttcaaatcagaatacaccacaaggaagtccaactgagcagggagtggtgtttgccacaccgcccacagatgcagcaagtggagagctgaggttcagaactctagaaagtgtatatgacgacactgatgaagtcactgattttcagtatagcggtctgtgctatcttgctgcagaggagcctagaagtgtagatgaagcattagaagaaaagtgttggagggaagccatggtcactgaaatgaattcaattcaggataataagacttgggagcttgcagtattaccacctggacaccgagctatagggctgaaatgggttttcaaagtaaaaagagaccctgatggaaagataaataagcacaaagctaggttggttgctaaggggtatgctcagcgtgagggggtggattttgatgaagtatatgccccagtggcaaggattgaaactgtaaggttgctgatcgctttagctgcacagaatgggtggaaagtgcatcacatggatgttaaatcagcttttctgaatggtgatctgattgaggacgtgtatgtacatcaacctcctggttttgttgtcaagaatggcgatgggaaggtactcaaactgaagaaagccctttatgggctgcgtcaggctcctagagcatggaatgctcgacttgataaggaattgttgaagcttggttttatcagaaatccattagagcatgctgtgtacagaaggactcatggtacagacttgctgctgattggggtatatgtcgatgatctgataattaccggatcaagcaatggagccattgaagctttcaaaagggaaatgaagaacagcttcagtatgagtgacctaggactgctaagttactacttgggtattcaggtggaacaaaagaatggggtgactacattatgtcagagttcatatgctctgaaaatacttgagcaggcagggatgaaaggctgtaatgcttgctgtgttccaatggagaataggctgaaattaagcaagaaagatgattcgccacctgttgacaagacaaagtataggagcattattgggagcctgaggtacctagtgaatacaaggccagatattgcctttgctgttgggattgtcagcaggttcatggaagatccgagagcaaagcactgggcagcagtcaaacaaattctgagatacttggcagggacagtgaactatgggtgtgtgtataagcagctgggcacaactgaaaccaagcttctgggttacagcgacagtgacttagcaggtgatgtcgatgacagaaaaagcacaagtggttcagtgttcttgctgggtaacagcctggtaacttgggtgtcgcagaaacaaagagttgtggcactctcatcgtgcgaggctgaatatgttgccagtgcaaatgcagcatgccaaggtatttggctgagcaggctacttggtgaattgttggggattcaagcaccaaaggtaaggctgttggttgacaacaaatcggcaattgctttaagcaagaacccagtacaccatgacaggagtaagcatatcgacaccaaatatcattttgtcagagattgtgttgagaagggagaagttgatattgaacatgtgagcacaggtaaacagcttgcagatatactgacgaaggcacttgggcgtgtcaggttcgtcgaactacgccagcagctaggagtaattgaggtgcagtga

SEQ ID NO: 56793 - DNA, 431 bp, Zea mays
  Clone ID: MRT4577_151787C.1
acctcgaggccggccggggccaagacttaccaaatataaaaaggtgggcgtggatctttcccttccttcggcgaaggcgagcgacggaaaccccaaaccgaacctcatctcttttctcggactcgagcgccccctcgatcggtcggccggcaaggtatgacggcaggaagctcggacgccggatccggcgtcatcgtccctcggaacttcacggtcctagaggagcttggaacgtgtccagaaggacgttaaaaatgggacagtgatctatggaatggatgacgtacatgacatgtacgtgcgaacctggactgacactattattgatcctcataataccatccatgacgatcggatctaccagctgaagctggtgtgcgacaatgactgacctgacaagcaccatcacttcgatttcatccaagaataaa

SEQ ID NO: 56794 - DNA, 340 bp, Zea mays
  Clone ID: MRT4577_151788C.1
ctgaacccaaactcataccgtaagcagagtacactagctgttcgtgatcagggcgtacgtgacagtcagccatggtgatggtgtacatgatggcgacggaggggatgaacgtgaatgatgagtgtcagcactggtttatggtgatgaagtgtaagaaggtgcaccggtctgtggtgtacaatatcgacgagcggtcgcacgcattgctggtggacacagtgggcggtcctggggatgggttcgaggagatcgtgatcacactgatctgcttcaactgcatgtacaccttctttgaattcaacttcgtaactgttgacaactgatacaagagcaagaaatt

SEQ ID NO: 56795 - DNA, 345 bp, Zea mays
  Clone ID: MRT4577_151789C.1
ctcaaataaattagaacaagatgtaaacatagaaagaaaaaagataagataaaaaaaagggagtacaactaataaggaagaggagtaaaaaagatttagaacacaaatccagaggtatctattggtgtgaagaagatcagatggtcatcatggactgtgcggtcttttgcgatggtagagctgtatgcctagtagattaggtaccgtaccacaggcgccgaattgctactaatgggcattattgtctaaggaactagtggagctgctggacttttgcgtgctaatggtgccacagttctcaaagtgcgtgtcgaggcaaagactgttcttggctaatcagatatg

SEQ ID NO: 56796 - DNA, 311 bp, Zea mays
  Clone ID: MRT4577_15178C.1
ctttccgcgccggtgagtagcactctctgagagctccaatttcatccgtctgccatcggcgccatcctgcccgcgccgccacaatggtgcgcatgaatgtcctggcagctgctctcaagagtatcaacaatgccgaaaagagaggcaaacgccaggatgcttattaggccgtgctccaaagtcatcgtccggtttctcactgtgatgatgaagcatggttacattggcgaatttgaaatcattgatgaaaacagagctgggaaaattgttgtgaacctcacaggcaggctagacaagtgtggggtgatcag

SEQ ID NO: 56797 - DNA, 623 bp, Zea mays
  Clone ID: MRT4577_151790C.1
ggagaggaagatctcggacgcgttcagctccgaccttgccaggcactgcaagaggtcggggaaggagaagagcctgaacgccttcttcgagctggccacggcctgctgcagcccgtcgccgtcgctgagacccagcacgaggcaggtactcaagaggctggaggagatcgcgagataaatggacgcgagtgctgagcaggcctggcgacttgctgcttaatctgcatcgctctctattgcagcataccgttgagctgagaagcgtctaccttccctaagctaaacgaagaacgtatttttgtggtgggcgagtaggaaatggatgcatgtttttcacgtccagtaacctgtactgtacagtttcaccgagatgcagggttgttcatcagaaaacatacagggtgtgctttcggtgcaagaaaaaaaggaatctccatgtggcggaatgttctctccagcgcgtatgtaacatggtatttgtcgtcgacgtcgtgatactcgcatgctcgcggtgccacaccatcaagtctggggttggtgatttgtccttatcacttgccaatgtaatcaacggatgaagatccccttagctttcgacttgtttcgatagcctggcgcggtgg

SEQ ID NO: 56798 - DNA, 243 bp, Zea mays
  unsure (1)..(243): unsure at all n locations
  Clone ID: MRT4577_151791C.1
ccacaacccattaaaacagcgccccagagggggggcggggggcgcaacaaaaaacacgccgccggcgaaccggcgaccccccgggcgacgggaggaagcagccacgccgccgacacagcgccaacccgacgacagccacaccggacncgaacgcaaacngacccaagggggcaccgacgccgggggggggggaganccagggcagacgagcgccaagcagagggaacgcaagggacgccagaa

SEQ ID NO: 56799 - DNA, 430 bp, Zea mays
  Clone ID: MRT4577_151792C.1
atataaatcacaacgagtctatatgcatctatatggcacatacacacattattctgtgaagcgactgattcgggccttttgattgcgtgaccacacatgcctatgttgccgtgcgacgggccctcacggttgacgctcgcacgcgcggtccttttcatgtcactccaccctttactatatgccggctgtacccatgaactactccaccttactggcaatgtgctagcttgctgacgacgcccgactcatcggtcatggtcgggagcccgaccttgcagacgtcacagatgtacgcctggttgacgaactgatcggtgaagtagggccaggcaatggagggcactcctgttgctggacgccctccatggtacgagctccagccgcagtgcgagacgaagcacgcgaccgaagggtgcgccaacacccgctg

SEQ ID NO: 56800 - DNA, 325 bp, Zea mays
  Clone ID: MRT4577_151793C.1
aagttcaaacatcaaacttcacaaggatccaagccatactgctgcgcaaaaaacaagggcacaggggagaggacacaacacgaacatcaaaccaacggagccacacccaccattcatgacacacaaaccacagatgtacatgggacaacggctacgcatatacccacttacagcatcacatacaatgaaccatagctcactgaccaccactgaggccgggcaccacttggacagtgctctactgctggatgtcgaaaactcgaaacggtgcgaccatctctacaggtgcttgccaagaaccatcagcccctcggtgcctgggggg

SEQ ID NO: 56801 - DNA, 356 bp, Zea mays
  Clone ID: MRT4577_151794C.1
ggacgacgccgctggagcgcgccagcgcaaggactccgaggctgcatggaaggcgcaggttcgttcgttcggtagcctattcgtgcttggtctagtagatccaggccgccgtcagcgcgacctacaggctatgataggataaccatgtcgtacagttttgcaagagctagattagatcttgatgactttgccgtcctcagtgattatctagggttagcatctacgtagttctaggctttgaaattgctgtctaactgtgtgtgctccctgatgtgaacagaaagcttgggaagttgcgcaagctccgttcaagaacctgatgatgatgggatttatgatgtggatggcagggagca

SEQ ID NO: 56802 - DNA, 240 bp, Zea mays
  Clone ID: MRT4577_151795C.1
atcaggcatcatggatggggccattccaagcttgtttattaagaaagcacaggaaccacatgaaaataaatgttccaaccatgaaataagacataattggcccaaacattgcaccctaatgtgtattatacacccatacttaaggaaataagttgcccctatatatcgaaaccttgactttatctaatccgacaaacaggaataaaaaagacctgaagtgttcctggaaccaattattta

SEQ ID NO: 56803 - DNA, 454 bp, Zea mays
  unsure (1)..(454): unsure at all n locations
  Clone ID: MRT4577_151796C.1
nttganggcccccanagcgaagaagaacaccgggcgagagacaacaggatgcacaacagtgcccccgccgtccaagaactcaacaggacacatacgaaacttaaatcacttaagaacgataacagaacaggcgaaagagaagccccaccagaagagcagcacgacgcacggaccacaatgcaagatcgctccactccactagacaaaggagtgaataacaaacacccaggcggccccattcgggccagtgaaaaaacaggatccaggcatccaaacgcccacggcaacgacggagcaagctaaggacctcccacacaaggtgaaaggaaggacgagcacactgctggcaccaacgagagaaaaggacccacacaacacactggaacatcggacggaccaatggagacaaaactctaccacaacaaaccccaaccagaagggagcccccccaagc

SEQ ID NO: 56804 - DNA, 777 bp, Zea mays
  unsure (1)..(777): unsure at all n locations
  Clone ID: MRT4577_151797C.1
atccttcccatcgccgccccaaccctagcccccgccgccatggccgactccggcgactcctccccccactccgcttccccgacttctacgcgcgcctcgccggcctcgccgccgcccgcggggacctctgcgtcaagtaccagctccccggcgaggacctcgacgcgctcgtctccgtcaccaacgacgaggacctcgagcacctcgtcatcgagtacgaccgcctccccgcccaagccgccgcagcaggagctgcagcgcgagtggtacctcgacctcaagtccgccagcccgcctccgctgccgcaggccctgccgccgcagatgcagaaccagcagatgcagcagccgcaggtcatgatgaagcaggaggcggtgcccgtccagtcgccccctcccgccgcgcccatggccgtgccgcagtcggtggtggcggcgtccaagaccggccccgactacctcttcggcttcgactacggcttcatgccgccgcccgcggtcaaggtcaaggacccggccggcgatccgcccaagatgagggagaacgtccccgtcgagatcccgcccaagaatgaagaccgacaccccaaccccaacccggncgcagacaacaacaacaacgccatggtgtctcccgccgtctcgcccgccgagttccctcgccagatcccggacctcgagaagctccagctcgctgacaacgccacccagcagcagcagccaccaccagctcctgctccgggtccggggccccaggccgcccctgctcctgctccg

SEQ ID NO: 56805 - DNA, 208 bp, Zea mays
  Clone ID: MRT4577_151798C.1
cctccctctagctagcactaatcgtccatccagtctcacagtcaagctccccgaccaccagcgcgcctcgagctcgagcttccctcctgacagcgtgctggtcgcttcaatggcatctcgggcgcacctgccgggctcgccggcctcgatcgccgtcctcatcctctccttcttccaaggtacgtacgtgctggctctgattcatttc

SEQ ID NO: 56806 - DNA, 443 bp, Zea mays
  Clone ID: MRT4577_151799C.1
aaaaaccccaacaaaggagggggccgcccccgagaaaaccccggagggggaccccgccccggggggggccggggccacgggcggccccccccggggggccaaacccggcacccaggcggggggaggcgacggagcgaaaagggggcccccggaggacggaacccgggacaaaacccgcccccggaaaaaatagaaacccccccgcaaccaaaaagaggaaccgaaccagaggggaaaagaacaaagcgcggggggccaaaaagggaagccacccgccccggaagggggagggaccaccccccccaaccaaaaaaagaaaccgccgggggaggggggaaaaaaaaaaaggcccccccgcggagaggggccgctcacgtgttgggcggcgagccgcggcctcttcgaaaaaagaggggaccccggggggccgggttgcggggggg

SEQ ID NO: 56807 - DNA, 782 bp, Zea mays
  Clone ID: MRT4577_15179C.1
actcctatgggcgattgggatcctcgaggccggccgggacaccggccatcgccatacgacacggcacatcgcgttcgcgttctctcccacgcgaccgacgcgcgacgccgaccacggcgaggtgtccgcccccacgtccagcagcgcacgtcgtatcggctcggcgcccggcccgtcggccgcgcggacgacgccgcctgtgtcaatctcgattcgtcgtgcgggtcagtggtcacccaccgccaccggccaccgccgagcggggtgcaccgggaaactgcgaaagaaagagactggcgtaattgcgttatccagataagccggcgcggcatgtgcacggtgcatgcacgcggcggcaccgggccacggcccggcgttgaagtcggttacgtacagcatgccagcgaccgaggtgactggcgctcattggcgccactgaattaacattgccctgccattatccgttcccagctgatgacgacgccatggaaagctcgcggaaaacctgtgcaagttcttggctgaccgttgaacgccttgaattgatgtgccggttaggagtagtttatatatacagtactacaaacctcatccatacttcccatagacgatacgataggcccataccgtacgtgcttgcacgcgcgctgacagccgatccagcattacccgaacaattcaaactactatactataaacgcgttgcatgtgtgcacagtgtaatttttaagtgcagagccagcggctattcgtaaataaactcggagcagcatacgagttgc

SEQ ID NO: 56808 - DNA, 436 bp, Zea mays
  Clone ID: MRT4577_1517C.1
ggggggttaaacacgaggcttataataggtttatttcaccacggtccaggggggaagtcgaataaaaaaaaaagcgacttttttttcggtgggccttattataaaaggcattggccggggggaaaccccagttccggttttttccctgccccctttgacaaaaccccaaccagaaccacgggcccgggttttaatttgccctgggcaaccccggccatttgaaaggggcccccccccgggtgaacctgttgttggacctcccctttttggagggggggaaagaggatttctttgaaccagggttcctgttgggggcggggcaattaaataaacggccctttcccccccggccaaaattaaactggaaccagattttctttgtgaaggggcccttggttgaattgaaccccggggtccgttgattcccctttttaaa

SEQ ID NO: 56809 - DNA, 356 bp, Zea mays
  Clone ID: MRT4577_151800C.1
gagctcctgcagagatctggggggggggggggggggggtccccgtagaacccgactggttgaaccttcaaacacacacatctggggagtgcggctccaccggacccgcaacgaggctaacgcgttactatgatcgcgcgcacgctgcacaaattagtattaccccttcgccccacctcggagtcgtgtgtctctactcctataagcactagactcagtcaacctgcactgatccgcgtaagaccaacttagtattgccgtactagtccgcgaagctaggcatggtcaccacgaaaacctcagagaacgcgaagccagccggcggtgtccgctctctgggccgtcccccgcgaaact

SEQ ID NO: 56810 - DNA, 2106 bp, Zea mays
  Clone ID: MRT4577_151801C.1
atggatcctaaaggtaagaggatggtaatcaacgacaaggagaaggagaccctctacgtcaacgagccaaaagacgacaagcccactgactcaagctcaagtcacaagaagagggatggaaagaagaagaggcgcataaagaagatcatctactatgacagtgacgcctcctcctcttcaccaagggatgatgacgacgaagactcttcgtcgaaaaagaaaacgaaaatacataaaaattcccaagctacaactgtcttgctagcatctctatgcagggatgaatacaacaaagtgagcggcttggaaaatgccaagcaaatatgggacaccctcaacatctctcacgaggggaatgatgccaccatgattaccaagatggaactagtggaaggtgaactagggaggtttgccacgataaggggagaggagccaactcaaacttacaacaagctcaagacccttgtcaacaagattcgaagctatgggagtacaagatggacatatcatgacgtcgtccgactcatgctaaggtcatttaccgttattgatcctcatcttgtaaatcttattcgtgagaaccccacgtacaccaagatgacacccgaggaaattctcagaaaattcgtgagcgggcacatgatggtgaaggaagcgagcagcaaggaggcgctacccagcaaggtagcacaagtggaggctgtcgggctcaacgaggacaaaatggcacttataatcaagcgcttcaagaccgccttgaagggacacaaggagtatcccaacaagaacaaatcgaggggaaagcgctcctgcttcaagtgcagtaagtctggtcatttcatagcacaatgtctcgataatgacaatgaccaggcgcaagaaaagaaagggaagaaggaaaggaagaagtactacaggaaggctaagggcgagacgcacattgggaaagaatgggactctgactgttcttcatccaactccaatgatgaaggactagctgcctcggacttcaacaaatcctccctcttccccaacgaacgacacacatgcctcatggctaaggagaagaaggtacatatacgagatacacctaagtacacttcttctagtgatgaggaatcttctgacgatgaagtagattatagtgatttatttaaaagattagaaagaactaaagtagataaaataaatgaattgattgatgctcttaatgaaaaggataggttgctagaaaagcaagaagatattctgtttgacgaacatgataaatttattaatgttcaaaaatctcttgctctaaaaattaagaaaaatgaaatattgtcttttgagctgtttacctgccatgattctatttctagtctcaaaactttgaatgatgatttaaatacaaagctagaaaatttaatgtgtgttggggttcttcttctccgccgaaggtcctccaggcaaaaacaccttcggcaagacagtacaaaggcagttgtgacgatggcttcgcacaacaaccaagctgtagcaccttcggccacgaagctggtgctcccaatcacaagcggttcaagttctgaaccagccaacaagaagcagaagaaggaagcacaaataagggtacaacatgttggggtgcaaggacccttcatcaaatccaagtggtctcacattccaattaccttctctcaggaagaccttcaactcaagtattatcctcacaacgatgcaatggttatatcttgtgtcattaagggatttctggtccacaatgtcttggttgacacaggcagtgcagcggacatcatctttgcaaatgctttcaggcaaatgcaagagccagaggataagatacatgatgcaacacaccctctttgtggtttcggaggaagacagattgtggcacttggcaagataacaatgtcagttaccttcggctatgtccataacacaagaacagaacatgttgtctttgacattgttgatatggagtatccatacaatgcaattattggtcgaggaacgctcaatgccttcgaagaaatacttcatctagcatatctatgcatgaagataccttcggaacaagggcccatcgctgtacatgggagttaa

SEQ ID NO: 56811 - DNA, 340 bp, Zea mays
  Clone ID: MRT4577_151802C.1
accacaccgtttgtctaaggggaggacctgcaccaccgggaggcggactgccttagggtcgaccacgacgaactccaccacctaatcctggctgcaaactatttcaacagcaacggtctgctacgctctgaccgagcagacttgacggagacgatcgagggcaagacaccaggagagactccgacgaccttcaacacgaagaatgactgtaacctctatgaggcagaggagatacgcaaggagaaccaatgggccttcgagtaaggagctgctgcatcatcgacgcctaactttggcgcaatgtactactatggatactttactacgtcctaatggttca

SEQ ID NO: 56812 - DNA, 862 bp, Zea mays
  Clone ID: MRT4577_151803C.1
gaattcggacccgttgtcgctccttatcttcttcactttaagctcaaactcattttgagccctcctgaggaagctcttgagggtcccttggtttcagacttatcctgcaaaaagaacacccaagtgaaagcggggaaaaaagttcaatccaaaacaataactagaccatacttacttccccctatgcttagataggcgacgggtccgaagagatccatatgcagcagctccaggggtcttgaagtggtcatcacattcttgctgtgatgctactcctaccacctgtttcctgcttgacaagctgcacaaggtctatctttcgaaatgaacatgttagacctatcacagtctccctttagaagcttgtggaggttcttcatccccacatgtgctaaaagcgcgatgccacagccagcccatgcaagtcttagccattaagcatagcatctagaccggcctcttcttttgcaaaatgaacaaataaagttgccgtctaatacacccttaaaagctagtgaccatgactcttctaaagacagacacatctacatttgtaaataacaatatatcccatttgacataattgactgacagatagcaaattattatccaagacactctccactaagaatacatttgatatagaatgctcattagaaattgcaattttacctagccgctttaccttgccttgattcccatcaccgaatatacattgaatcttggaaatccttatttttgacgtaggaggtgaacatcttcttctccccgcgtcatatggtttgtcatccgctgtcaataatccagcttgaacccccggatgcataaacctgcaaggcaaatttaggcttgggtcttaggt

SEQ ID NO: 56813 - DNA, 267 bp, Zea mays
  Clone ID: MRT4577_151804C.1
tgatagctcacctcacctcctcgcccgttgtttcgtgctccgtccttcaccccccaccaagcttgccggtcaaaaactatccacccctccacggctccacccctacccgccgacgagcgccatcgattgattccgctcaagcctggccgtggacgacgatgcatctccccagcgctgtgtgagcccaccaaataccactaccgcaaaccctacaataaacaacctgctgtcgcaaaaccaattttagcactatgacgcttgtgcctc

SEQ ID NO: 56814 - DNA, 255 bp, Zea mays
  Clone ID: MRT4577_151805C.1
aaacggccgggaccacacccgttccactacctgccaatttacacacttattctcgtacccaccacatcaaaccctgggacaatacaaatcttttgaggcttaaagtactacacaaatcatgcccatcatacatatggacagcctgtgatcctttatcacctcaccagaaagactatatatcaaaatcttgtccttacctctcctgcaattaatggctttcttacaacacacacattcactaataaaagatgcaac

SEQ ID NO: 56815 - DNA, 508 bp, Zea mays
  Clone ID: MRT4577_151806C.1
cgggggggggcaggaacaaatcaaaaaacaaaaataggggcggaaggcaaattccctgggttttaacaagaaaattcaaacaaaaaccaggaggcccaaaaccctatgaaccaaaagggggcgacggggaaccaaaacctggtaccaaaagggaaaaaaccttattacaaaggggaaaaacccggcccaaaaaaccccaccccttaaggaaaaccaatcggggaaaacaagttggagggaggagaaaaatcaaggaggccgctggacaagcaaatgggccatttggcacccataaagggggggactggggaaaccaaggggggttagagaacggccaaccatgggctctaacaaagggggggaggccaatacaaaaaccaccccccataagggacggccccaaaggacaaccatcattcggggccggtctaagggccaccaacaggaactttagaccccccatacccaaggcaaaggcagggggggaggacgcataactctgcaaaag

SEQ ID NO: 56816 - DNA, 364 bp, Zea mays
  Clone ID: MRT4577_151807C.1
atgacacctgcgaagtcctcttaacggatgccgaactgcatgacaaggatgacttctaagggttgaactacccggtgatggacgtgaacaacctggatgctatcaagaatgctcaaactgttaacgccaagaaagctgtccggcacacgccgtcctggggacactactactactgtctcatcaacgaccttattcagcacttacacaactaactgaaaactgcttctgacatcgggaatgccactgtcaaaataactcacaagatagctaccgccctatatgattctgacccatcgtggatacctgcccagggctctcaatgcgaaatgacaagagacttgaccaagcttcggtgacacggatg

SEQ ID NO: 56817 - DNA, 444 bp, Zea mays
  unsure (1)..(444): unsure at all n locations
  Clone ID: MRT4577_151808C.1
cgaaacccccaaanccncngaaggcaaggggaaagggggaaaaaacaaacangccnccgnacaccaaaaaccanngaagaaagcaanaaanaancgnaacggngangagagccagcnaacncancggagngccgcagnaccgcaaacgnccaacaccnccaaagggaaaaggaaagccggggggaacagaannnnacancnaaacgaaaaggcccccaagaaagcacgcggcaanagcaaccccgggnggaagcccaagacccaaaccanangccnccgagcaggaaccccaagccgganncaaggcgcccgcaacacgagacaacggcagagacgcacacaaccgacagagaaccgcccggaaggacacccaccgcacagaaggccacccccaggccagagcgccaacaccaaacaacaagggcgacaaaagccacgcaggcc

SEQ ID NO: 56818 - DNA, 1268 bp, Zea mays
  unsure (1)..(1268): unsure at all n locations
  Clone ID: MRT4577_151809C.1
cntngngnagncnntncncancncngncngngntngngncngngncnccngcnntncttnaagnannacnntangatagtgttatttctctctcncngngngncntngggcnangngnanantnntncngngncnantnggnaggaantggggcggngntggcncnantntctcnanangnacncnananngncnncnanangtgnncnangcnangcnacacgnaanangnaanangaanangnnangngnangngnanangnnanangnanangncnanntncngnngncnangncnnantggnctncnngngnangggnngngnaccntnggncccnantancntnngncngnntngnngnaccnanntncncnntngnnantncnngacncnnantncnnantnacncnntagnacccnntncnacngncanntangagagaagaggntagggtantncnaccttacaannanggntnanccnnngagngnntggnccnngngncnnccaancanagnanngntnntnacnntaggagnaantnacnntggncanccttnncnncntnacncattnacaanncnacnntnntncnncnntncangnagacanttnanccnaanttncnnccnncncnngnngnncnanntnncnaanntnncntnaaccnnngncnncnnanntnncnntnanncnngncnncnnanntncnnancnnncnannanngnnananccnnannanncnntnannngnncnntnannngnntnncnanntnncnnncnntnntnngncnncnnngnanncangnnanncangaaanntnacnccnaanntnggnntncnnntnncnntnngnntnanntnncnnntnagacanagnntnacntnaggntnnntnacaaattnaannntnagncanncnntnaggnaantnaggacanccnagnaanccnnntnntnggnntaggaccnntnaggntnanntnnggnntnannngntnnntnggncnnntnntnggnaanaanntnntacnaannganntnacaggntnnggntnntnnntnntnggncnnttnaaccnnccnggnntnnaccnnncnncnnancnncnnncnncnnantnnngnncnannntnncnannntncnnntnngnntnncnanncnncnnngncnnngnnancnnngnncnnannanntnannnanntnncaannntnannngnntnannnanntnannnanccnannanaggntnnntnn

SEQ ID NO: 56819 - DNA, 470 bp, Zea mays
  Clone ID: MRT4577_15180C.1
acctattctttttcgctcggcgcgcgtagaagagaagaggcacttcttcctcctcgccggcttcccctcgcgtgtcgcaagtgctttaccctacaccgtggcccgtggatcgtcgccggacgccaggcatcggcaagcggcagcgcagccgtccaccctgattttgccaagggttcaggaatcaggatatattcattctttctccaaaaactatagaattcattcagtgtcggacggaccttgacaaaatggaagaagcagggcgcagaggcatcagctcatttccacacgaccgcgtattttctatttaaccagcgcagcgcagcgcaggcatggaagcacagcggccgttcatgcagatgaaagatgagagagacctgaatgaaagaacaacaggaggacaaggaaggaggacgccgtcagccctctgtttaggaagctcaaccgggccatggagtcctcttcagccc

SEQ ID NO: 56820 - DNA, 281 bp, Zea mays
  Clone ID: MRT4577_151810C.1
aaacacatgcatgcgaatttatttctattctataacttaacctacattctaatctctagtcggacgcttacaacctactgtttaaaaacaggccatactgaattaaattaatacgcttggaaaaaagatctcatcatgactggtgtcgtaggatcgaacatacacacatcgaattcatattagaaacaatttcgcatactggatggcgaatgtgacacaccctttgccgaaacattaaatccagctttagtagaggttaatctaaaaactattatcttttt

SEQ ID NO: 56821 - DNA, 672 bp, Zea mays
  Clone ID: MRT4577_151811C.1
ctccttccctccgcgttcttatcagtacgttgtccgcgcctaggcaccaaagtccaaagcaacagccatagctcgatctcgatccccggcgcgacgaaagagaaagaagcggcggcaggtcgacaggtcgatcaactaaggtggatccccggaggcatgggaagaggcccctacccgccgacgaggaggaggaacagccgccaccgccgccgtcagcacccaagcacgagcaggtggaggagcagccgtatcaccccctcatcgcgcgcgctctgcagcagcaaggagctgccagcgccggcggaagcccgggagcagatgtggccgacccttccccgtcaccggaggcgtacgcgcagtactactactcggcgcgcgccgaccacgacgccaccgccatggtctccgctctgtcccacgtcatccgcgccacaccggaccagcaacaagcctactaccccgccggatccgccgctgtctcaggagaacagcagcatcagcacgatgcggcggctgcagcggccatcgctgaggaacaagggaggaagcggcactacagaggggtgaggcagcggccatggggaaagtgggcggcggagatccgggaccccaagaaagcggctcgtgtgtggctcggcacctttgacacggctgaggacgccgccatcgcct

SEQ ID NO: 56822 - DNA, 456 bp, Zea mays
  Clone ID: MRT4577_151812C.1
agcacaatctttctcacctggcagcattggcactttcactttctgggtactaagtattgtaatcgagatagctgttcctcctgcattggtgaataataaatccatcgaatatttacgagatggtggctgattattacctggttcaatagacctaacttgcttttacggagcaatcagacgaggacataagaaatcctcagggacctaaccttggatgtgtcgaaatagcgattggacatcacttctacatggagcaaatgattcatcaggaggacaagtttaacgaaatgcactggactgaaacattagcacagaatacaattttctccgaataaaaaaaggataaaggtccccaaggtcctctagcacagcgttgatcctctatgatgataatagcactcttggtgctgtcatggacgtagccgtttcctgcatggaagtggcatctgatcacca

SEQ ID NO: 56823 - DNA, 271 bp, Zea mays
  Clone ID: MRT4577_151813C.1
cagtccacgcgatcgctatttctagatctccagcggttgccctatgggatcgtctgtacatgcatcggactgaggcacactgcattgcagttaaggacgccatagtgcactacgagctaccgagccatcccttctatggacccatactatgtgtgaataactgtcccttcttcagcagcgcggccaccatcaacatgtgctctaagtgccacaaggagatgattacgaaccacgatcaggccaagctggctgcctcctctatcgacagcat

SEQ ID NO: 56824 - DNA, 208 bp, Zea mays
  Clone ID: MRT4577_151814C.1
cccacgcgtccgcccacgcgtgcgttagaaaaaggacagatgaaatcagcagggggtatgtgctgcaaagggtacatcaatcaaagcgtgtgtgacgagcaagacacacatgatcgctacgctgtgagcatctacagaagagcagatgatctgactgggatgaataataaaggaggagcaacaccaggggatgcttacttgagggaca

SEQ ID NO: 56825 - DNA, 527 bp, Zea mays
  unsure (1)..(527): unsure at all n locations
  Clone ID: MRT4577_151815C.1
cctcgaggccggccgggccgggataaagggggcgttctgtgcgtgcgaggcaaaacaacgcttggcgaattgaggcatgggccagtctctgatgaagctcttcttcgacgactcctgccagaaagaagtgaaggtgacgacggacggtggttgtgatgcttgggctggacgccgccggcaaaacgacggcactgtaccggctgcacgtcggcgaagctctgtcgacggtgccgacaatcggtatgcgtctctcatagagctacgttgatcctcgtagtagaccacggttcgaggtagcattgtgtgtgtgtgtgtgtgtgtgtgtgtgtgcaggtttcnacgtggagaaagttgagtacaagaacgtggccttcacggtgtgggacgtcggagggcaggacaagctgcggccgctgtggaggcagtacttgagcaactcggacgccctgatatacgttgttgattcggtggacagggaccggattggggttgccagggaggagttccagcgcctcgctcaggacccg

SEQ ID NO: 56826 - DNA, 271 bp, Zea mays
  Clone ID: MRT4577_151816C.1
gaaattttcatttcacaacctattctgctcgaacttgaagcgccaatcaagatttgcggtgatattcacggtcaatactacgatcttctacgtcttttcgagtacggtggtttccctcccgaggcaaactacctcttccttggtgactatgtcgaccgtggcaagcagtccctcgagaccatctgcttgttgcttgcgtacaagatcaaatatcccgaaaacttcttcattctccgcggtaaccacgaatgcgcctcgatcaatcgtatct

SEQ ID NO: 56827 - DNA, 2544 bp, Zea mays
  Clone ID: MRT4577_151817C.1
ggcgtggtcaatagcggccaggcattgggacagttctctgtgttgatgatgatggaatcttgagggttggttttccaggagcttctaggggatggagagctgatcctgcagaggagagatgttgaagaatataaggttggtaactgggttcggattcgtccttcactaacggttgctgtgcatggcatggagtccattactcctggaagtgttgggattgtatactccatcagaccagatagcagtcttttattgggactttgctatttgtccaatccatggctgtgtgaaccggaggaggttgaacatgttgacccattcaagagtggggaccaagtatgtgtaaatagctctgttgcagagccctgatatgcatggggcggtgagactcgtcacagtgttgggaaaataattgacatcgacagtgatggcctgctcatcattgatattcctaatcgggctgcaccatggcaggcagattcatcgtgcatggaaaagattgagaacttcaaggttggcgattggattagagtcaaagtgacagttccctcacccaaatatggatgggaggatgtgactcgaaatagtattgggataattcatagtctacaagatgatggagatgtgggtgttgctttctgctttagaagcaagctttttctttgctcagttgcagatatcgagaaggcacaaccatttgaagtaggggaaaaagttcatgtgtcaccttccatatctgagccacgcctcggctggttaaatgaaactgcagctactattggagccatatcaaggattgacatggatgggactttaaatatcaaggtttctggccgaaaaagcttatggaaggttgctcctggtgacgctgagaggctttcagcttttgaggttggagattgggtccgcccaaaaccaagtattgggagcagacctacttatgactggaatagtgttgggagaataaacattgcagtagtccatagcattcaggactctggttacttggagttagctggctgtttcaggcatgggaagtggctaacccataacacagacattgagaaagtgcagacagtaaaaattggtcagcatgttcggttccgtgctggaatttcagagcctagatggggatggagagatgcgaaccctgattctagaggcatcatcgctggtgtacatgctgatggagaagtaagggtcgccttctttggtgtgccgggattgtggagaggcgatcctgcagatcttgaaattatggatagctgaggataaagtttcggtggagggatagactttggattggggaccctgctgatattgttcttgatgatgtccacttattgacggaggcttctaattgcttggcattttgttcataggcttgtggtattctttcgataccatatctgatatattgcacccatccattttgcagcatttcaaatttagcaaaatcttaacctgcagtggacttgcaagttgcacataactatcatcgcatcggcatgccagggtgccaatcatagtcattcaagcatagggacaatctcatctattgacgcagatgggaaactgaggattcatacaccagctggtgccagggcttggttgacagacccagcagaggtggaaaaagtggaggacgaggaggaagtctgtattggggactgggtgaaggttaaggactcagttggaaccccagtgtatcaatggggtgatgtgaaccacagcagtataggggtggtccaccgggctgatgatggagagctctggattgctttctgcttctgtgagaggctgtggttatgcaaagcatgggaggtggaaaaggtgaggcccttcagacaaggtgacaaagtacggatacgacctggtcttgtatcccccagatggggctgggggatggagacctacgcgagcaaaggcgaggttgtgggtgtggatgcaaacggaaagctgaggataaagtttcggtggagggatagactttggattggggacccggctgatgtcgttcttgatgatgcccatttattgacggaggcttctaatggcttttgacctttttgttcataggcttgtggtattcttttgaccccatatctcatttcttgcacccatccattttgcagcatttcaaatttagcaaaatctcaacctgcagtggagttgcaagttgcacatagttatcatcgcataggcatgcatggcagggtgtatttcttgttgataaccggggaatgagaagacagcgatagtgaaatactcctagagttgataaccaccacctaggtttttttccctttggtctacatgtataattatgccgcctgataccttttgggtttcagtgtaccatatataccagtgtacaggttcggacctgaacattaatttgattgatagtggtctactggtcttgttgttttttgtatgtttaaaaaaaaaaaaaaaaaaaaaaaaaaaaaaaaaaaaaaaaaaaaaataaaaaaaaaaaaaaaaaaaaaaaaaaaaaaagtactctgcgttgttaccactgct

SEQ ID NO: 56828 - DNA, 511 bp, Zea mays
  Clone ID: MRT4577_151818C.1
cccaccaaccccgccgacacgacaccaatcgaggagctcggggggcaccaataatggccggcgtgaactccagcgtcgtcgggctcaagcccgccgtggcagtgccgcatgccgccgccgcctcatcgccggctaagcgggtgcatctggccgcgcccgatggccgacgcgccgctctgctcggcctggctgccgtcttcgacggcacggccaccaccgggtcggccaaggtgcacgatcttagatgagtacctagagaagagcacaggccaacaaggagcctgaacctcaagatgatgctgcccaccattggatccaacttttcacgcgcctacactgtgtagttcggcagctgccatatcccctacatcttcactgtgtgcctggaccttgccacgcacatgaaagtcccattcattatcgtacgagccttaatattgattgctaggggcaaggtaaagttcaagattctgtttgcaactttttacttggaactgggtgaagcaacatt

SEQ ID NO: 56829 - DNA, 1049 bp, Zea mays
  unsure (1)..(1049): unsure at all n locations
  Clone ID: MRT4577_151819C.1
ttgggtccctcgggccggccgggttatgtgtaccttcatatctgagccacgcctcgggtggttaagtgaaactgcagctactattggagccatatcaaggattgacatggatgggactttaaatatcaaggtttctggccgaaaaggcttgtggaaggttgctcctggtgacgctgagaggctttcagcatttgaagttggagattgggtccgcctgaaaccaagtattgggagcaggcctacctatgactggaatagtgttgggagaataagcattgcagtagtccatagcattcaggactctggttacttggagttagcaggtcgtttcaggaatgggaaatggttaacccataatacagacattgagaaagtgcagaccttaaaaattggtcagcatgttcgattccgtgctggaatttcaaagcctagatggggatggagagatgcgaaccctgattctagaggcgtcatcgctggtgtacatgctgatggagaggtaagggttgccttctttggtgtgcctggattgtggagaggcgaccctgcagatcttgaaattgagaatatctttgaggttggagagtgggttaggctgacgaacgatgtggaacaatggagatcgctcaaacctggtagcattgatgtggtgcatggnggtgggatatcaaggtgatgcttgggatggaaccattcatgttgctttttgtggtgagcaggaaaggtggattgggccttctagccagcttgaaggagttagcaagtttgttgttgggcagcgtgttcgaatcagaggctgtatccgccagccaagatttggttggtccaaccataatcattcaagtatagggacaatctcatctattgacgcagatgggaagctgaggattcatacaccagctggtgccagggcttggttgatagacccagcagaggtggaagaagtggaggaggaggaagtctgtgttggggattgggtaaaggttaaggactccgttggaaccccagtttatcaatggggtgatgtgaaccacagcagcataggggtg

SEQ ID NO: 56830 - DNA, 1945 bp, Zea mays
  Clone ID: MRT4577_15181C.1
attggttttatgtctctatgcactgccattatgcatgctgcttgttgtttgtacgttcacccatggattaaaatgcctttttcaggattaaggaaaattggtttatccatgcttttgtgtttaattactaccgttttatttatgcatcatggatgattctcaatgtacttaacgtgatttgattgtttaaattgatcaaactcgtagatgaaatattttgactgctaatccaattaactatctgttatgattctggatatagtttttcttaaagataaaaaaggccactgtttgtgtcatcatttcaattttatttttacttgagtcaacacctgattttgtcatatattgtgtcagccatctactgaatagacgtgtggttagtatgcatgcactggcagttttcctgattttttttggtatttcgtgaatctgtcaggtaaggctctttctttcagaggattccccttctcaagctggattaagaccacaggacaatctccaagcaaaaggctcatggttaatgcatgcagctggcccaagctcagatgattctctgccacctggcttcgaatcattgcagccaaccagcgatctcaaaattgacatgtcccaaatcgctcttattaggtggagatgcccaccacagatattgtataatcctgattggtgtgtcgctgctggagaagaaagtgaggaggttgccttgcagaatgagaggatgtttggagcactggaggctatatatccacgaccatcgaacattcctccaaacccactggttactcctgatgtgaaagactcccagtatgatgattcccgaacccaattggttcctttgctcccagttgaagaggatgatgcctctgaccagttcgaagaaccacctgttggtctaccaagtagttaccaccactcagataagtatgatgatgcaatatccagggtcccacaagcctcagatgctctctttaccactgcacaacagcagccgaatggttccatcaacacaacaaggtctggtgtccccgccgaagcagacgtagtggctgctgcatctgctgcttacactgcaataatgcaaagcaaccaaatgggaaacatgattgaccaagatctgctcatcaaaatactaagtgaccctgcccaaattcagaggctaatgaaagaatatggtgcacttaaacatgaacagtcaaccaacagttctgtggcgtcaatggtgcaaggttcaccaccccagatgacagctagtgtccccgtctctgtcccagaccgttccaatgcatttcacaacataaaccctaagctgccgcctccacctgttccgaatcgtctacctccagcttcagttaccatgaatgcaccagcgagttcaagtcaagcaattagctttccaagtggcccaaccaggggtttgaactattaccagaacctgatccatcagcatggaggggagaggcaggagccacttcagcagcatggaatgcagtttgcaatgcatcaccagcctcttgcctcgcaggccagtgccgctgatgttgtcagcagtggtgctatgccagctagggataccaagcaaaggcctacgaagccttgtgcttacttcaacagcgcgagaggatgccggaacggtgcgaactgcacgtttctgcacgatgtgtctgccgcgaggaaagaacagtcaaagggttccaaaaggattaagcttgacagcagaatagccgggcggtattgaggggctgctgccgccggttgatttttgactgttctttggttcaaaatcctcatttcgccttttttccccttcaaaaacgtttcagtaaatattgcgccccagctccttgtttctttcacttagccaatttctctttgttgactaaatgaggtgttttagaagaaagaaaaatatcccacgatttattggagctatgtcgtggtcgct

SEQ ID NO: 56831 - DNA, 480 bp, Zea mays
  Clone ID: MRT4577_151820C.1
ctacaccattggcaaggagattgttgacctgtgccttgatcgcatcaggaagcttgccgacgactgcactggtctacagggcttgctagactatcaactctgtcagtggaggaacggtctctggcacttggatccctgctactagagcgcctgtctgttgactactgaacgaaatccaagcttgggttcactgtgtaccattgcggccaagttactacttcggcagtagagccatacaacagtgtactgtacagacactctatgctcgagcacactgatgcggctatactgctggacaatgaggccatatacgacatctgacgtcgatcctttgacattgagcgcccaacctacacgaacctcaacaggcttgtgtcccaggtcatctcatcccttactgcctgcctgaggttcgatagtgctctgaacgtgcgatgtaacgagttccagaccaacctggtaccctacccgaggatccac

SEQ ID NO: 56832 - DNA, 692 bp, Zea mays
  unsure (1)..(692): unsure at all n locations
  Clone ID: MRT4577_151821C.1
actccatagggcgattgggactctcgaggccggccggggaccagcccccagccgcttgccctcgaatctcaatcgctcaagcagtgcttcagtcgccggtcgccgctcgctggactgtcgctcacccgaaccgccgctcgcccagactgtcgcttgcccagagcctcggacgcagagcccagaccccggagtcccaggaccgtcgctcgcccacacgcagagcccatcagccgccgcttgctggacgcttggacagtcgcagagacggcagagcccgtcagtcgccgctcgcccggacgcttggagtcccggactgctcgctggacgcccggatgacatcttcatcgatgccgacgccgatgaacactgctgacaaggaaggtgagaactaagaagtgagatttgtttaacatgttctatgccactatatctatgtgtctgtgtgtgaattgtgatgctttgcgagagacgatactctaaacgtttgcgctatgctgtttattcactaaccgacatccaacgctttttattcactaacctacgagggatgttgacaaagatctgtcactgccacctccatcgatggttccaactttggcaactgacaaccctatgtcccgccgctgccccctaattccangccgttgtcggtggcacaactaagagcaagaagaaaagccacgttgtgacta

SEQ ID NO: 56833 - DNA, 597 bp, Zea mays
  Clone ID: MRT4577_151822C.1
tccctatttggagcacgagcaccaaagctgcccagatcttcgtggggcctgcccctgcttccttcaactccaccaccagctaatgctcctgagacttaatatcaatggagctctcctactcaccatgatcggtgtcctgccatggctacacgccatgattgttgctcccttgctgaaggtcatcagaaggggagcagaacccaaccactagccttgtctgctgcccttggtatcacgattgggatctttacgaaatattatgagcacctaaaggatcaactacgataaatggtttcagtgagtgaaccaaggccgaatccattctttcatttggttcttgaagtcgagcatgtgttggacaaaaattagctgttcttgcaatatcaatgatgattgccagtctgctccgcagctatgaagtatagcctcattcaagtttgtctaaagtaaatggacacaacagttacagcagccacctttatctgccaaaccctaatatcatcctcaccaaaagaatgatctgaagggagagtgttgcaaacaaaaatctgagacacatacactgtttaaagatatgcgtctgagaacatcattgca

SEQ ID NO: 56834 - DNA, 187 bp, Zea mays
  Clone ID: MRT4577_151823C.1
gattcttctttagaaggggtgagattttgtaacacacctaaattatatcatgctgaaaacaatccactttgaattattagttctgagtaaaaaggaaaatatctatattttcaaataatgaaatggtgtatgaaaattaaacaatttcttaagtagtaaaatattaccaagagtttgatgcactcat

SEQ ID NO: 56835 - DNA, 400 bp, Zea mays
  Clone ID: MRT4577_151824C.1
tttttctgtttatggagcgcggaaattgatccagaggttctggagctctcattactatatcgaggacaattgaaaacttacagagagttatttttatagaaaaactgcgtcctgacgcaataggtcgggctgatgaaataatggtgccccctctgacttcacgtctagtgcagaataatgtccagactgagcctaccttttaatgaggcaaacatgctgctggcgagaaacccacttctgcacaggcataccatgcttgaaagaggcatgagactcaacatcatcacggttttcgcaggcgcactgcagctaatttaatttacaactatctgtgcttggggcacagacatttgtaagcttgcgtgtgattacgaaaccacgtcggatgatactggacgat

SEQ ID NO: 56836 - DNA, 2072 bp, Zea mays
  Clone ID: MRT4577_151825C.1
cgaggccggccgggatctttgcgcttggggcaatgacgcagctcatgaggttataccgaggcgcgtcaattgctggttgaaaactgtttccaaaccccctctgcggcccgcaagggccccagagaatttctggaagggctccctctaaccagggtaaagcccacccctcttccatagcatacatagcagagcaggcgcacggcgcaccgcacacctcactgccgctcccttctcgtctcgtctcgtctcctctcgtctcctctcctcggcggatccggcaccgacccaccgcccctctgctcgctccttccgccggaatcgctgctcctctctgtgtgctgtcgatttgtgcggcgactgttagtttggttcggtcccatccttctgttgatcaatggctgacggtgaggatatccagccacttgtgtgtgacaatggcactggaatggtcaagcccatgcttctctctgcaggctggctttgctggtgatgatgcgcccagagcagtgttccctagtatagtcggccgccctcggcacacgggtgtgatggttggaatgggccagaaggacgcctatgtaggtgacgaggcacagtcaaaaagaggtataaaaacttgaccttgaagtaccccattgagcacggtatcgtgaacaactgggatgatatggagaaaatctggcaccacaccttctacaatgaactgcgtgttgctcctgaagagcacccagttctgctgacagaagcacctctgaacccaaaggcaaacagagagaagatgacccaaattatgttcgagacattcaatgcaccagcaatgtatgttgctatccaagctgtcctttccctgtatgccagcggtcgcacaacaggtattgtgctcgattctggtgatggtgtgacccacaccgtgccaatctacgagggatacgcgctccctcatgccattcttaggctggatcttgctggtcgtgatctgactgactgcctaatgaagatcctcacggaaaggggctattccttcaccacgacggcagaacgggaaatcgtgagggacataaaggagaagctggcctttgtcgccctagactatgagcaggagctggagaccgctaagagcagctcctccgtcgagaagagctacgagctgcccgatgggcaggtcatcacgatccgcgcggagaggttcagatgcccagaggtgcttttccagccgtcgctgatcgggatggaagctcccggcatccacgagaccacctacaactcgatcatgaaatgtgacgttgatatcaggaaggacctgtacgggaacatcgtcctcagtggagggacgaccatgttccctggcatcgctgacaggatgagcaaggagattactgccctcgcgccgagcagcatgaagatcaaggtcgtggcgcctcctgagagaaaatacagtgtttggattggtggctcgatccttgcgtcgctcagtacgttccagcagatgtggatatccaaggatgagtacgatgagtctggccctgctatcgtccaccgaaaatgcttctgagcttagctatctgccgcgcctttcatagcgtgtcaagctgttgagatctgcgttgttgagttgagtgtctctatggagtatcacatactttctgcatgaggggggaagagtatacccaactaagcgcatgcctttcggatgccctgcttcgtgattcagatgctgctttctttcaagtgatatgtcgatgtagtgtgcgagcaatgtatttggtttggctacagctgttcctgtcgtctgtgcgtaaaacattagctatgtatctatccatatcttgcatatttgaatgtatggtcgttttctcatatggtgtcaagttaaaattcttatgttctcttattaaattttagttacccatatgtggccataatagccatgatatcttgtgaaagggtctttagctgggttggttggttggtctaataagtataatattttgtgaaaggggatttagctgtggtggttggatgatctgaataacacttctactggcctgagtttaaaaaaaaaaaaaaaaaaa

SEQ ID NO: 56837 - DNA, 289 bp, Zea mays
  unsure (1)..(289): unsure at all n locations
  Clone ID: MRT4577_151826C.1
tttttttttttttttttttttttaattaanatatatataatatataagttnatgataatattgtataaaatttgaatttggtttttacaatnataagttatgagaagaaagaagtagattagtaagaggaatatgagaaatttaatgtagatggtatgttatttagggatgataggagtaatgattattagtaatggtattaggaaataaagtagtgttgataaatttatgggtgtatgttatggggagattatatgaatttaattttgggagtgatgattttgttttg

SEQ ID NO: 56838 - DNA, 374 bp, Zea mays
  Clone ID: MRT4577_151827C.1
ggcatactttgacgacggcgaggggtccctgtgagataaaggttcccaagaccgccgatgatgatgcccaccacgccacggcctgacgcccgctgagaatcggaacctcgccgcccccattggaggacagccagcattattcttcgaacagtcggcaaaaatggaaaacgacggcataatcttcgtgattgatattacaaatttgcaagatacggagcacgtagagaagggagcaaactaaagatcatcgcagcatgctgcatatgccttaatgcatgtccagatgtccctgaaaaacgatgtatgtaatatgttcctcagtgccaacagttgaattggctagctaattggcagtgtcactgtcgcctttggtc

SEQ ID NO: 56839 - DNA, 399 bp, Zea mays
  Clone ID: MRT4577_151828C.1
ataagaaccatagtatagaattgaaatgttcttgtccttcactgatttgagcagataaaaaaacatatgtgtacaattataaacgccatgtgcctgtgcacattgtaaaccgaaaggactgtaacacatgacgcgagcagcgtgcctatttttataccacgtaaactaactgaaactgtgaacaccttcttgtgaactggtgtgccacacccccctaagacggctctcatttgcaatcactggcaacgcgccctcaacactgtgacgaggacgctggtggccataccgccttactaggtacagcccgtcgaacccacctgggcgcagggtaagtttggcggcttcctgaacatgatgatgccctaccatcaactgcggtgtggcttgttggctaacttg

SEQ ID NO: 56840 - DNA, 386 bp, Zea mays
  Clone ID: MRT4577_151829C.1
ggttggtcattatttgacttgttttcaaaaatagtattcaataaaatgaacttatacgaatgattttgtatgaaattcataattactagtgttaaattatcgatacataaaaagaatataatacctaaaatagagtatggcactcattaatttgctagagccacttctctaaaataccagactcgaataagtccaagacttactcttcttgatcaatatcagtaaaacttggaagtgaaatacttttcgagtttgggcccaactcaaattctgacgaagcaaatttggcacattttgaattaaattgacaaagggaatctaactcttcttcagtttcatcatgtagaatttttcctttgtgaacgattctgaatccattgagttca

SEQ ID NO: 56841 - DNA, 315 bp, Zea mays
  Clone ID: MRT4577_15182C.1
atcccgaggttcggccaagcctgaaatgcttgcctagtcctcgttggagttagccacacctgggcttggagtctatttcaactccttcctccgtttgctcagatctgtcagtatgacagatagagccttccactatgttgagttgggttacaacaaagccgcggctgcttacaatcttcttgacagcactccggcggagtaacaatgcgctcaagactttgctctagctctttgcagcacctctccactctctaaaggcttataactttgccttcacacaaacttgagagattacacaagagggagagagagaat

SEQ ID NO: 56842 - DNA, 256 bp, Zea mays
  Clone ID: MRT4577_151830C.1
cccacttcaaactaatctgcactccatgcatgtgcattccgctcctgcccagacgcgccgggtgtctcagaccctgggcacaccaccacatcatcctcacctccatatccaaagtgtccatctatatccggcttatgaaccctgctcatgccgttaccgacgacatccttacgcagttcaacgttcgaacggccaatgactacaacctcgtctgtttcttcgagctgcgccccctcctactctcagatacgtgtca

SEQ ID NO: 56843 - DNA, 188 bp, Zea mays
  Clone ID: MRT4577_151831C.1
cccacattaatggggggggggggggtttcccccccgggggggggccttggggggggattttcccctgggagcaatccttttcgcgtccaaaaatagaggcccttcctctggcgcaggagctcacctaaggacacatcgccgctccttaggagccctttaacttacattatttggtttgctgcgggggg

SEQ ID NO: 56844 - DNA, 439 bp, Zea mays
  Clone ID: MRT4577_151832C.1
cgggggggcgtctaactagggttccccggctgcaggaattcggacgagaaacgccgggcaaacttgccggcccgcagatcttaattcccattccgccaccgatcgaccttacgccagtctcggtctcttcgaaggcgtcgcgcgcggttgtttgagaggagaggaggaagatgagggagtgcatctccgtccaatcggcaggccggcatcaagtcggcaacgcgtgctgggaactttactgctggcacggcatccaggtgcgaccgctcgattctcttccttgaaagcatctccatcaccatcttcgattgctttctgatctgttgtcgaggagcgctgtaatttgcagttgcagggcgttagtactcgaatcggggtgaagtactgaagtggcttaggttagggttttttttgtcagatctgttgctagtactactag

SEQ ID NO: 56845 - DNA, 271 bp, Zea mays
  Clone ID: MRT4577_151833C.1
cctcgaggccggccgggccgggacttccacaccgcacgaggccacgacacactctcatcacacgcacggaccctaccccgtccccgcccgcctcggaggccggggcagagcaccgccagaagcagcacagccagccatgaagcgaaccagagcgcagcagtccaagtcggaggagccgcaggacccctccgccgccatcgccgcggccaaccccagcccaaaccccaagcagcagcagcgccggaccaagaagacgaggcagcccaaggta

SEQ ID NO: 56846 - DNA, 546 bp, Zea mays
  Clone ID: MRT4577_151834C.1
ccccgaacttcccgggagcagagtactgggcggtgcgaggccacgacggccggtcagggcgagggccggatgcaggatctatatgggacgacgcactcttgagtcggatgcaggcagcacaaccgggacgagatgtttccgccgaccaaaggaaccgcatcgcgccctcgagaatatgccctcgccgacacccacccaatcctcgaagacgcggcctataatccgtgcgccaacgaccccatcaaccacgaccatcggtgtgaagcgacccatggtcgatgaggttcagcgctgcacctgtccatcgtgatatcgaggtgagacgcttcaaggtcattcctgcttcaggagactcaccaaggatggtggcccagaacaatgctggggaccagaagactgcatactgaatacatgtcctcgatgattcctaggaagacgaggagagacaggaagcctctgagcttgcttagcacgatcgcaactgctgttacctcagcacagtggctacttccatgactcatgaatgcatgccccgaaagatgtggg

SEQ ID NO: 56847 - DNA, 253 bp, Zea mays
  Clone ID: MRT4577_151835C.1
gcatgcaaatctgaaccaacaatgtagctatgtagtcatgtagactttacattggcagtcatgatgggacaacattgtgtcaccaaaagtccgctaactgagcatcaattcagtgtcacctataccacactttgatccaggttccgggacctaattaatatattgtgacactgaattgatgctcagtcatgtagactttacattggcagtcatgatgggacaacattgtgtcaccaaaagtccgctaactgag

SEQ ID NO: 56848 - DNA, 430 bp, Zea mays
  Clone ID: MRT4577_151836C.1
cctccttttctttttttactttaaatggtcttgggggggctttttagagaattacaggggatcaaaccgcgcccgaaaagatgagcacaaacagccaacgaacagtgcacaaagatcgtcttggacgagccccaacacatatgggaacataattcactacattactctatgggaatcggaacctcacattaatcctgcacagtgaccctcatctaaacacatgagtaccaggcactcggagagatcccacgatactgaacgaaatggggctacaccagcacgaaatctttacttaacaatctctgggttacacccatattaggcagacccaaaaaggttcagctggaaaaggttcttgtccgttacctcaatgcccatgtaaactttgagacagacgatgctgtggtccaggtaatcactgttggttccc

SEQ ID NO: 56849 - DNA, 622 bp, Zea mays
  Clone ID: MRT4577_151837C.1
tttttttttttttttttttttttttttttttttttttttttttttttttttttttttttttttttttttttttttttccccaagggaggggccctctttttttttggcccggggttaaccacctttcaaagcggggagggttgccaaaaccggccaaaaaaaaaaatccttttcccttcccatttttccaaaaggcccccttaaaacttttttagggcccaaaaaaagggggaggggcccccaaccaaaaggggttaaaaccaaaaaacaagcgttgacgtcaccccccacccgtaggggccaaccccaaaatttcaagggcccccgggacccgttcttgttttaaccggggggggtaaaaaaacccaagggcaagggaaaaaaaaaaaggggccccccttcccacaaagttaagagggcccctggccaactcccgaaaaaagggggggttaaaaaacccccccccccaccccggggccccgggggggaagggccttgtggccaaccccaggggaaaaaaccccctctttgaaaagccccggggcaaaagttttcctaaaaaaaaaaaacctacccttttctggccccctattcccaacgggggggaggctgaatttcgggc

SEQ ID NO: 56850 - DNA, 238 bp, Zea mays
  Clone ID: MRT4577_151838C.1
ctccatctcgaccgtcgctcaccgggaagctactctacgacgtaacatggcgtccagcgatcggccgcgcaacagaggtggtcctgcgcccattgaaaactctgatgactacagactcgcatatggccgccctcaagatgaatatcgtcaacccacacggcatctacgacgcgctcgttgcgtgaaccgcaagaccaaatgctcccaacacgacattcagctaacgagccatggacat

SEQ ID NO: 56851 - DNA, 241 bp, Zea mays
  Clone ID: MRT4577_151839C.1
cgagcccatcttccaactggctataaaagagcaggtgcgactgtatctgctttggccaacgcctcccataaccccagccattgactactgatgagtcaagatgttgacgctactactcacgctgagcacccttacataactgatatactcagtgataagcttctctcctacttcctcaaaaggttcttaactgctcatacattgaacactctcaagatctgccctacagctcctactgctt

SEQ ID NO: 56852 - DNA, 456 bp, Zea mays
  Clone ID: MRT4577_15183C.1
ggaggttccgttttatataaaaaaaaaaggagaaaggggggattttttattgtgagataagaggggtagaaagagaagatgtaaaaagaattgggggggtactcaaagcgcagagcgaaccgaacctctaccaaaaagaaaagggaggaacacgggagggggggggggggggaattttggtgcttacacacaaatagagactatacctgcacaccaagggggggggcgaaatgtcccacccccccactaatgaggcgaaagagcctgaactggacgcgaaaggcttctgacacgaacagaagccaatcagtgcccggagaaaggtatggaggcccgggatctggctaggaagaaccgggacgacggaggtgggaccacgagcactatcatgctccaattgaacgaggcctgtcggtacgacgaatactagatccacggggacgctgtgggcagaac

SEQ ID NO: 56853 - DNA, 327 bp, Zea mays
  unsure (1)..(327): unsure at all n locations
  Clone ID: MRT4577_151840C.1
cgcaccttcatctccccagcatccctattctgagccttccatcctcagtcgctcggtggcccgcacgaagcagacggtgaggaagtccaccggcggcaaggcgccgaggaagcagctggcgactaaggcggcccgcatgtctgcccctgcgaccggcggcgttaagaagccccaccgcttccgccccggcaccgtcgcgctccgggggaggcgctcgccccngacgagctcggggctgctgatccgctcgctgccgttcccgcgcctggtgcggggggtcgcgctgggctttttgaccgccctccgcttcccccgcgccgcgggctc

SEQ ID NO: 56854 - DNA, 240 bp, Zea mays
  Clone ID: MRT4577_151841C.1
taaaaaaaaagaaaaaaaaaaaaaaaaaaataatataaaaaaaaatatatatataggtactaaaaagaaaataacgacatgaggtgtaaattagcagagaatctgcctgttctgttccactaccagccagcgtatacggccgtgcgcatgtgacttcgtttcttgcacccggttccaacgtgcgatgatataataacactgctgttgggaagcctaatttaatcacaaataatttgcttt

SEQ ID NO: 56855 - DNA, 201 bp, Zea mays
  Clone ID: MRT4577_151842C.1
aattaaacttgtgtcataaacatacatcttttctcatctataaaccatcccataaatacacagcgtcaatattcaactgcgataatatgttctatctacaataacttcatcttaatctgaactacacatcattaatgaccctcacgttctacttcttagcttctaccataccgacatccaaattcacaacaccgaccgttc

SEQ ID NO: 56856 - DNA, 631 bp, Zea mays
  Clone ID: MRT4577_151843C.1
ccggccggaaaaaaaccagaggtaccttgcaatcacaacgaacataagctctcgatctcaccgacaccgaggaacaacagatcaatggtgtccgagcagggaggcgtgatcgcgtgtcacagcaaggctgatttcgactcccacatgaccaaggaccaagaagcctggaagctggaggacatcgacttcactgccgcctggagagggccatgccgcgtcatcgccccactgttcgtctaacacgccaagaatttcactcatgtcgccttcctgagaggtggacgcggaccaaatgaaggaagtcaccgcatcctactagggcgaggcgatgacgaccttccacttctgctagaacagtaagacggtcgcagaccatcgtgggtgccaagaaggaccaactcctgacccagatcgagaagcatggcgcgcctgcgcctgcatctgcgtctgtctaaaggagatcagacggcgccgtcaatataggcccagcacgtatggctgtaaatgttgtcaatatcaggactgactgtgtcctttgtgggcgattgtgaactagtacaatgtttgattctatccgagccggaggcgatacttcacaacgaaggagaccgaaatgttaggccctctagct

SEQ ID NO: 56857 - DNA, 287 bp, Zea mays
  Clone ID: MRT4577_151844C.1
gagtaaaccaccttaacttccaccggggtgccactcactattagataccatggctaacgaatcgaataaccactagaacaggctcaatcagcataatcatttgattctccaaaagcttctcttatctttgactaacaagccatcttatggacctgacaatatcagcgagttgcttactctaatactaatgatcgcgaacacgctcaaatatactctgaactaccttaagaccatttctatcctaaagctcactcatgtacttattgacctcaaatttatgacttaca

SEQ ID NO: 56858 - DNA, 752 bp, Zea mays
  Clone ID: MRT4577_151845C.1
gttttttttttttttaggccgacgaaggagattgctcggccaattgttctgtagatcaagctgacacaaattgccatagtggcacggcattgtacccagctgtggccgctgggttcgtgcacgctcagctcagttagttccgatctagttttgtaaatttgcgcgctcaaattagtttgttttcctgggacaaattggagcggaagaaacacacggacatcaagatgggtccgcgaggagcatctggagcagcatgtcgttccagacgtcgatggggccggggaggcaccagtgcacgcagtcgttgtacagcgtcacgttctcgtgcggccagtggccgtaccggctcgggtggccgtccggccgaagcaccatggccatggtgaagttgtacgcctcgtagcgcatcgtccggaactctgggttcgtcgtcgtcgagacgtctttggggtacgccaccttggacacgtggcacatgagggactgcatgtggttcctggcgtccttgtccccgacgaacgccgtcgacgtgtcccggacggcgtccaggaaggccccggcgtcgaagcggggcaggtcgcagccatcggggcgccaccgccagcgaaggaatccgcggtcggggcggccgtacttcatgcagttctggtgctcctggatgagcgggcaggtgaggttggtgtagtacggcgcgtcgtcgtcggggacccactggcccgggcggaagatgtcgcacccgctcggcaccctgg

SEQ ID NO: 56859 - DNA, 362 bp, Zea mays
  Clone ID: MRT4577_151846C.1
tcttatacggttatggagcttatggataggatttggacaaaagctggtgttctgagaggttaagcctcctctctcgaggttgggttcttgcatttgcagatgttaggggtggaggggatttatcatggcatatggcaggaaccaaagctaataaaatgcattcaattcaagattttgctgcatgcggcaggcatctcataaagcaaggctttgttcaccaaaatcgcctttgtgctataggctgtagtgctggtggtctgttggtgggtgccgtcattaatatgcttccagacttattttctgctgcagttctcaaagtccccttttttgatatctgcaacacaaatgtggatcctacttta

SEQ ID NO: 56860 - DNA, 197 bp, Zea mays
  Clone ID: MRT4577_151847C.1
aggaaggggggaaaaaggattttttcaagaaaaataccattttgtcctttaaaggttcttgggtctaggggaccacattcattaaaagggtttttttaaccacctaagacttttaagttcaaaggtaatagtaaattccaaagggttctttatctgtgactagggaaattccgtggaaacttaccgtttaaaagggc

SEQ ID NO: 56861 - DNA, 435 bp, Zea mays
  Clone ID: MRT4577_151848C.1
ggccgcttttttttttttttttttgcgggggtggggggggtttggatcattttctagttgtttttgaggaagtccgatggcatctgtgattttggggtagaccccggtcatggttaggcgggaaaggcgcactgggtttattccgacgcggctggagaatgtgagaggtctacgcccactgggcggggggggggaggacaggaatctgaggaaaaacttgggaggctacatggcgtttttagtggtggaaaaccacggtctatgcctgtccgaagtggtgattaacacacgcgcttataacaggctcgttctggcagagctgataaaggttcttattgggggggttcttgttggtgacagaaactcttaatgtgctttggctgctggcatgtcgaaacgggggcggtggtccacctccggggctcgaaaacgtgc

SEQ ID NO: 56862 - DNA, 166 bp, Zea mays
  Clone ID: MRT4577_151849C.1
cgcctccatgcgaggataagtcggcggaggttacgtaaggataagctcaagaagttcactatcttccagctacttgttgttatcgtatcacatgtaatgctccacggccgagtatataaggcctagggggcaccccttcagatagaccgactctgctccacttagc

SEQ ID NO: 56863 - DNA, 303 bp, Zea mays
  unsure (1)..(303): unsure at all n locations
  Clone ID: MRT4577_15184C.1
cgcgctgctgctcttttcaaacctacctgctgcgtcccccatcgcncagcctcctgccatactaccaatcctgccggcaccttgtctcgcacaatcaaaatgctccctgctcccatcggtcaacctcctctcaactcacaaatgtcccatccggcgtggctgccttttctttgatngcgaactgcccggaacccccaccacgcccctttgaaccttgcatacctctcgatcccatcctctcttgcttaaacnacccctccncttcgtctcctttttcccccacccccccccccctcccaccct

SEQ ID NO: 56864 - DNA, 1237 bp, Zea mays
  Clone ID: MRT4577_151850C.1
ggccgtggcgctcctcgtcctctgctaccggtccagcagcgtggtcaccgtcaggccctgggcgacggggctcagcgggcagctgcagaaggcgttcgtcacgggcgtgccgtcgctcaagaggtcggagctcgaggccgcgtgcgaggacttcagcaacgtcatcggctccctgtcggattacatggtgtataaggggacgctgtccaccggcgtggagatcgccgtggtgtccaccaccaagaactctgccaaggagtggtccaagcactgcgagtcacaattcaggaagaagataacaagcctgtccagagtgaaccacaagaacttcgtcaacctgctgggctactgccaggaagagcagccgtttacgaggatgatggtgttcgagtacgctccaaacggcacgctcttcgagcatctgcacgtcagagaagacggttacctggactggcccactcgcctgcgcgtggcggtcggcgtcgcctactgcctggagcacatgcaccagctgagcccgccggagatcctgcgggcgctggacacgtccaccatctgcctcaccgacgacttcgcggccaagatctccgacgtcttcttctgcgacgagccccgccggcaggaggggagcctgtccctgtcggcgctgtcggaccgggagagcgtggtgtacagctacgggatggtgctgctggagaccatgaccggccggttcacggcgtccgacggcggcctgctagaggcctgggccgcggcctacctgagaggggagcggcagctccgggacgtgatggatcccgccctgcggaggtccttccacgccgccaccgtggacaggctggacggcgtcatcaggggctgcaccgaccgggagcccaggaggcggctgaccatagcggaggtcgccaagcgcctgagggagatcactgccatgtcacccgacgcggccacccccaaggtttcgccgctgtggtgggcggagctggagatcatctgcgcagaggtcaactgaggtcaacctgagacggacgtgccaatgtttgcaaattaaagaaatcgatcgtgaaaaggctgtttcgtggtagatacacaggttgcttctttttgatatttttattttttaggtttatgttgaagtttgtgtccatctgtacatatgaacaaaatgaagtgtgcaaccaagctgattgttttaaaatattattttaataattaattattaaaaagaattgcaaaa

SEQ ID NO: 56865 - DNA, 304 bp, Zea mays
  Clone ID: MRT4577_151851C.1
ggggggaaaaaccaaggaaccactaaatggcccacaagcatccgcattaaacccccaaaaaccccggggccggggggaaaccctttcaaaccaacagggaaacaactttcggcctaaaccaccgaaaaaccagaacagggtccctggggctcttaaaaacctaaagggggaccggaaaaacctaggggcttacaccgggaaaaacgcaaacaaacaaatcaaaaaaccatagccccacggccgaggggaagtttgaagaaacaaaggaccgcctgaaacaagaaaggaccaatcaaggcccggc

SEQ ID NO: 56866 - DNA, 220 bp, Zea mays
  Clone ID: MRT4577_151852C.1
acaaaaatatcttttagtttttacaggcagacagactgacagacgtaatacatacatacatacaattgaggcggaattatatttgaagaaaaaggagcaaattacacgcgagttcccattgcattgggttgttgttgatgaggtaaaactactttttcatactacagtaccctttcctaaacgtaatcgattgattgaaaaaaaattccaccccttcaca

SEQ ID NO: 56867 - DNA, 485 bp, Zea mays
  Clone ID: MRT4577_151853C.1
actggttccaaacctagaacacgtggtaaataaagggtaggaagggttctcaccgtgattcgccagcacaagaggactgcccacgacaccaagtggtccacggtggtgcccagactacgacgaggaatcaccatggattcgtggcctcccatgctgatttgcgggtagccaaagcttcaccctcgccttgcagagccccgcacccacaccatgggagcccaaccgcgactccggcaagaatagccgtggcggcatccaccattctctcaccatccccatttttccccattcggctctgctctctcttgtctgcgccccgacggctttctggtgatgggcaggggcggcggccgggttttataaagggcgagctgagcggactcagcggaaatcccacgcgcgaaaaacggcggatctgttcgcccaggcctacgatgcggactccgttcgagggggcgcgcgaggaagacggaggacaggaactg

SEQ ID NO: 56868 - DNA, 245 bp, Zea mays
  unsure (1)..(245): unsure at all n locations
  Clone ID: MRT4577_151854C.1
aacagcgttgagatgagcgccgttactcttaatacgatagctctcaaagaagagaggaacatcccttttatagtcaggactnanaacccccccccccctctcctcgtaataaaaagtaaccaccaccacctacaccaccagaagcactgcgctcccaaacaacatctgcaccgcaagatatatagcaacggcagcagcgtcagctacctctcgctagaaaaaaaaacaacttccttaacatctgc

SEQ ID NO: 56869 - DNA, 108 bp, Zea mays
  Clone ID: MRT4577_151855C.1
agagcgttgggcatataatatgtgcgtaatcgaaaattttcacatccatattttaatcatacaatagttttccacattctgaacttatttcaggtctttcactttctt

SEQ ID NO: 56870 - DNA, 416 bp, Zea mays
  Clone ID: MRT4577_151856C.1
gtgcccctccctctcccgggaggccgggacaagaggcaacgggacacccgcaaggccgcaagaagaaacagcgcagcaacaaatacgctgaagagtggaaagcgagagccgacacgacctcgcccgacctgcgctggtcgactgtgagtttttcccccctgtcgcctcccctgctgggccgtgggccgcggcctcggcgcatggcgtcgtcacgggtgatggcgtcgtcgtctccgccgcagcacgccggggcgggctcgtcctcggacctcgcgcgattcaagagtagcggcgtcggatcgatgaacatggacgacatcatccgtaacatctacggccccgaggccgtcaacgccgccgccgccgaaagcgccggcctcggcccggcggagccctccctggcggccccggaggct

SEQ ID NO: 56871 - DNA, 262 bp, Zea mays
  Clone ID: MRT4577_151857C.1
tcgagaagctgtcgtacctgccgccgctgtcgacggacgacctgctgaacaggtggactacctgctgcgcaacggctggttaccctgcctcgagttcagcatggtcggcttcgtgttccgcgagaactccacctccccgtgctactacgacggccgctgctggtccttgtggaagctgcccatgttcggctgcttcggcgccgcccaggtgttcatggagctgccggaggccttggtatcctacccggtcgccttcctccgt

SEQ ID NO: 56872 - DNA, 3654 bp, Zea mays
  Clone ID: MRT4577_151858C.1
aattcggcacggggacacccaacttcgcccgcaggcctccttgcgactccaaaaccctccctccttccccttccttgccccgccctagggttcgcgccgccgcgctgaccctgtcgtagccatggggtcctcgctcccgcccaaggaagccaacctcttcaaagtcatcgtcaaatcctacgagactaagcaatataagaaagggcttaaggctgcagattccatattaaaaaagtttccagagcatggtgaaacactatcaatgaaaggtttgacgctaaactgcatggaccgaaaatctgaagcgtacgagcttgttcgacgaggcctgaagaatgatctgaagagtcatgtctgttggcatgtttatggtttgctttatcggtcagatagagaatacagagaagctataaaatgttacagaaatgcattgaggattgatccagataacatagaaattcttcgtgacttgtcccttctccaggcacagatgagggacttgtctggctttgttgagactaggcaacaacttttgtcgttaaagccaaatcaccgcatgaactggattggttttgcggttgctcatcatttgaattctaattcttccaaggcagtagaagtattggaggcatacgagggaacactggaagatgattatcctccagagaatgagcgatatgaacacaatgaaatgctgctgtataagatatcattgtttgaagaatgtgggatgctagacagagcccttgaggaaatgcagaagaaggagagcaaaattgttgacaagctatcattcaaagaacaaatggcatccgtcttgttcaaacttggccgctttgatgaatctgagagcatatacagatccctgctttttatgaatcctgataactacaaatacttcattgctgtgcaaaagtgccttggcttatactctgataatggtcaatattctgctgctgatgttgagcgcttaagtgcattgtacaactcacttaaagagaagtatgcttggtcatctgctgtgaagcgtatccctcttgattttctggaaggtgagaagttccaggaggcagcagacaactatgtcagacctctattaacaaagggtgtgccctcactattttccgatttaagcccactgtatgaacatcctggcaaggcaaacatactggagcagttatttcttaaactagaagattcaattagggattctggatgctttcctggatgtccacagaaggagcctccttccacactgttgtggaccctgtttttgatttctcagcactacgacagaagagggcaatatgacattgctttgaataaaatcgatgaggctatctcacatacaccgactgtcatcgatctatattcagtaaagggaaagatattgcaacatgctggaaatttcacagcagcagccgcattagcagatgaagctaggtccatggatcttgctgatcgttatttaaacagcgagtgtgttatgcagatgcttcaggctgaccaggttggccttgccgagaagactgctgtcttgtttacaaaagatggtgatcaacacaataatcttcatgacatgcagtgcatgtggtatgagcttgcttctggggagagctattaccgtcaaggtgatcttggccgggccctaaaaaatttcttggcagttgaaaagcattacgctgatatgactgaagatcaatttgacttccattcatattgcttgcggaaaatgacacttcgagcatatgtttctatgctgaagtttcaggatcgtttgcatgctcatgaatacttccacaaggctgctgctggagctatcaggtgctatatgaaactacatgattctccaacaaaatcttctaaggaagagaatgatgagatatcaaaactgccacctgctcagaggaagaagttgaggcaaaagcagaagaaagcagaagcgcgtgctaaaagggaggctgaagagaaacaagaggatgaaacagcttcatctaacagttcaaaatctggcaagaaacaacatgcaagaccagttgatctggatccacatggtgaaaaattaatccagattgaagacccgcttgcagaagccacaaaatacttgaagcttctgcagaataactcgtcagactcattagagacccatatactttcatttgagctaagcatgagaaagcaaaaggttttacttgctttccaggcagttaaacagctcattaaattggatgaagataatccagacagtcaccgttgtttgataaagttcttccacaagataaacagtcttcctggacctgtgactgattctgagaagctaatttggaatgttctggaagctgaacgacctgacatgaggcaattacatggaaagtccctcgttgaagtaaacagaagtttccttgaaaaacacaatgcttccttgatgcaccgagcagctggtgctgaaatgatgtatctcttagagccaaataagaagatggaggcaattaatttaattgaagattcaacaaatattacatcatcagggcatagtttgcttggtcctgtaaaaacatggcaaattcaagattgtattgatgttcataaattgctggagacagtctttggtgatcagaatgttgcaaataggtggaaggcacggtgcgcggaatattttccgtactcgacgtactttgaaggcatcaagagcgctatttcaacctatgccattgaccatagtctcgagagcccaccagaaaatggaattgcttcaaaccctcatctgaaatcaaaagatggagaacaagggagtttgaatgggactctgcatattgtagatgatttgagcagcctaagcattcggtaatgcacgaacaagttgctgaatggtcacaactggaacacaacattttagaactggagccagtacccaattaaccaaagcgtacacgaacaaggggaacaaagtgctctggtgcaagtagttgtcggcacatcacatatgaagagtatattattgattgggagctgaggtgtccagtcaggttattgtcttggttccagcctgtacctttttgttgccattttgtagacagggaaagaaaaaaaatcttccgtctcaattacggtgaagttgtgacagcgtttgttgcctagcgatatcagggtgtgaccattcgtttgaaacagtgctccctctctttttggactacaaaattttggcacaaagcaggtgtacaaggttaaaccttttaaaactttcatctatttgtttcgggatagtttggtgtgtgggggggtttgtcttgatcctttgtgctactgcaacatttggtcctcgacattgtaaattagttaatcttaaacatagaaactgtattccagttgtcatgacaaataatgatcaatgttaaccctgggtgtttgatctataaaaaaaaaaaaaaaaaaaaaaaaaaaaaaaaaaaaaaaaaaaaaaaaaaaaaaaaaagaaaaaaaaaaaaaaaagaaaaaaaaaaaaaaaaaaaaaaaaaaaaaacaaaaaaaaaaaagggcgggggcttttaaaagtccaacctaaattaaccgccctgcgggctctaatttcttttttttggatgcccaaaaattaaggtttcggcccctttttttaaattgtgggggattgggaaa

SEQ ID NO: 56873 - DNA, 388 bp, Zea mays
  Clone ID: MRT4577_151859C.1
gagctatcaggtgctatatgaaactacatgattctccaacaaaatcttctaaggaagagaatgaggagatggcaaaactgccacctgctcagaggaagaagttgaggcaaaagcagaagaaagcagaagcgcgtgctaaaagggtaatctcagacactcacataggatcactgtttacctaattttctgattttgtcccatattcctccaggaggctgaagagaaacaagaggatgaaacagcttcatctaacagttcaaaatctggcaagaaacaacatgcaagaccagttgatctggatccacatggtgaaaaattaatccagaatgaagacccgcttgcagaagccacaaaatacttgaagcttctgcagaataactcgtcagac

SEQ ID NO: 56874 - DNA, 874 bp, Zea mays
  Clone ID: MRT4577_15185C.1
ggaggtcgctggaccctctactcacttgccatggtatatttctaatgtatgcgggccaaggcgaaggagtcaacacctcaagaccttagaagctgtgttgaaggcctacaatacatgcggaagaaccaacctgagaggcgcatgttttctgcatgcaccagattaatttggtatgcgccccacagcgcatcagaacaagcgtcgcggtggctattagcgctgggctcctagcagtggcattaagcgccactagactaatccggtgtgtgctgaggaaggagcgtcggaacatacgttgctcactagagagattctagagaagaaaaaaggctcctgattaatcctgtgatggccatcaaacactcccaagcgctctagcaaccacaagtggtacagggcaggtacaacacgaaacgacaatgaagcaaaccttcgtcaagagcagcttgcaaaccggaaaataggagctgtggagctttgagcgtacattgatgcctcgaaggagaatgctgaagttgtccgctttggcgccaaaagggcttcgtgcacaaaagaagaaagtaagagttgttgaagacttgtacaacaagaaagaatgaaaaagacagtattgcccctgtgatgcttgtaaaccatgtgtaattttttttggcatacttgtaaattcatacaaagttgtacctctcccctacaaataggtgaacaatgccatgcatagattcacttttcgagggtccatagcttcacttagatcagcttcgaagtaacctagagctatttctcgtgtgaagacgaaggtgcgcttctaattatatgttatgttgagaaggatgaaatgacagcgatcaaggcataaagatgagttgcatgtttc

SEQ ID NO: 56875 - DNA, 235 bp, Zea mays
  Clone ID: MRT4577_151860C.1
tggctgcctcaaatattgagtaccgataattaatcatcagactcgcctggtccacttacgactacattttccacaacgccttatatatctatagcttaataatacacattactatcatcctctatcctctgactcacaagtctacctagttctgcttcttcactattctccacggatgaggtttatactaacaccatccactgcataaactgcactgaactataccatcatatca

SEQ ID NO: 56876 - DNA, 275 bp, Zea mays
  Clone ID: MRT4577_151861C.1
cattgtgtggaacgtggccaagccagacaatcatgtggttgtagagcagagcatccctgagagcaccagcactcctgacctagcgggtgagcccagtgctgaaggggctgatggacaggcagaaatcatcattaccaaaactccaatcatgacgataatgaaaggcaaagctgaagccaaaaaaattcatacactcaaggagaatgtacctagccagcctgtgggtgatgccttaccaaagctgtcgactggagaaatggaggtgagagaggggg

SEQ ID NO: 56877 - DNA, 186 bp, Zea mays
  Clone ID: MRT4577_151862C.1
aatttatgcattaggtgttcggactatacttgatgcaagatggcaatatccaagatgttatgttcgtactatacatcggtcactagaatgccacgatatatgcacatatcgcagggactctatgactatgattattggaactaagacattagttgctaaaagtatgaattcctgttcactgaaaca

SEQ ID NO: 56878 - DNA, 372 bp, Zea mays
  Clone ID: MRT4577_151863C.1
gacaacaaaaaacaggaagcgtgtactttagacaaccgcacatcatataaatataactccacacttaactccttaaacattaatcactaaacacacccacacacacacacacacacacctaatatatacacaaaaaaaaaagaacaataccaccacacattattccacacataaccaaaacaaatctttctatttcccactcttttcaaccaagcacattgatcttttttctccacattctctaaattgctaataactacctttccattttaccaaacaatcctaggtgacaattacataatactgaacaccacacacccacacttatacaatgacgccttttaaaaaaatatgaccccacaacaacaaatt

SEQ ID NO: 56879 - DNA, 327 bp, Zea mays
  Clone ID: MRT4577_151864C.1
gattcccgctcgacccactcgtccgcgttctcgtcatgtacctacctcttttttacaacaactcctccaacatacagaagcagctttaattcaactatctgtaaccaacccttttacctacttacaacaatatattccattcaaccaactttctacactaaacccttctacttattttcaacaacaacaactactaccattcaaccatctatctatcttctactctcatcatcaacaatttcttacatttaaccaatttaccttacttaacccctttgcttattttcatcatcaaatactactaccaattttccatcataactacaa

SEQ ID NO: 56880 - DNA, 336 bp, Zea mays
  Clone ID: MRT4577_151865C.1
ctaaaaggccaacagggcaccactggccttaaaattcccccaaaaactcttgttcaaaaaaagttttctcccaagcccccgcttttaaagggggttttcacaggctttttttttccacacccgaatttctaaaaaaacccaggtacggaaacccctcccccccctttttttggtttggcggcaaaccccataaggggaaaccccccccgagttttgggagcccctattgccctggcccctagaaatttttttgcaaatcctttcttctgtttttgggggggggccaaaagccctcctaaaatagggagcccttttctgttttcccttccccttttt

SEQ ID NO: 56881 - DNA, 245 bp, Zea mays
  unsure (1)..(245): unsure at all n locations
  Clone ID: MRT4577_151866C.1
atccatattctacaaatctcannaccanattatttttaactcgtaccatttcaaccgcagtataaattttatttgtcatacccacaaccttaattaatntccctcattttcatcatacacacaacatacacaaaatttctactataatccaaacaaatcttttaaaaaaaaatccatcatttcccactttatatgcttatccattaaataaaataataaataaattaataaaactatatccatat

SEQ ID NO: 56882 - DNA, 156 bp, Zea mays
  Clone ID: MRT4577_151867C.1
ctatagagggggcccccctttttttttttttttttttttttcttgcgcatcgtaagcgcactgtacagcaaattcagtctgcaaaatattacggtcatctcactccgagcggctggcctcccccctcttgggggcggccgaatctacaaggcccat

SEQ ID NO: 56883 - DNA, 298 bp, Zea mays
  Clone ID: MRT4577_151868C.1
tttgataattctactttttttttttaaccaatgagggggggtttttctatgtttgcgcgttcggatacccgttttcatgaaaagaccaaaacccaggccctggttaggaaaaataaaccagcgggggccccttataaagggatccaaggggggttcaaagtggggggggccacaacaaactccaaaaattaccaatggatggatgccctttgggcgccgagcaggaccctctattgggaaaatctgggaaacagggaaagtttgtgggaaccggaaaggattttaccaaactgaacgg

SEQ ID NO: 56884 - DNA, 292 bp, Zea mays
  Clone ID: MRT4577_151869C.1
gactgatcgacaagccactctggcggctcaccggtgaaagcgatgggcgaaggcacgaagcccaagacgaaacgcaacaaggacataggcggcggggcatacgaccgacacggaggagcacaggcagcaaagcagcgcaggaaacgccaccacgggggccgacgagagcagctgagcaggagagaggagactgcgggtgcagctaacaagggagacacggagcacaagaaacagcgggaaaaggaccctgcggatacacatgctacagtggacgaccaggaagggggaaaca

SEQ ID NO: 56885 - DNA, 503 bp, Zea mays
  Clone ID: MRT4577_15186C.1
ttttttttttttttttttttttttttttttttttttttttttttttttttttttttttttttttttttttttttttttttttggcaaaaaaaagcaggaaatacccagaaaggggggccaaaagcaattcttttttcaaacaaaaaaaaaggataaccccaaaaaccccgggaaaggggctgggataacccaaaattaaggaaaaaacccggttcccaccaaaaaaacaatcccccaaaaacccaaaaaacggaggagggttaaaagggcttttttggaaaagcgagggaaaacacagttttgggggcaatccccccccaaaaggcctcacacaaaaactgggccccaaaccaacccccgaaaaaaaaaaggggttaagccaaccccccaaaaccgaaaagggggcggccctggcccttgaccccgaaaacaacgcccaggggggaaacggtcttggggcccccggccttggggaaagaaacggcgccccggataactttccc

SEQ ID NO: 56886 - DNA, 278 bp, Zea mays
  Clone ID: MRT4577_151870C.1
aggactcttgggagcaagccattcagctctccttactcccgcatagcacccagtaatttattgccagtcccgccgtccagagggcaccactctgcctgctcatcctcgccatcctcgctctctcggccaccgccgctgcggctaagtctggcttcacgggctcgaaccagatgcgctctgtcaccgagagttctgcctcctcactcgggtcaacggtcctcgcagcactaggaggaacacgttaagcgcttcgtgtcgcacgcttcatcgtcaggtac

SEQ ID NO: 56887 - DNA, 682 bp, Zea mays
  Clone ID: MRT4577_151871C.1
tacgtgttgatcgtggacgagacatatgcttgatgcaagagcaccctgttgtctatgacatcactcgggcccgcgcatgatcttgtgattcgcatctcctgagtcactaccactgatgaggattgccgccatatgcgctgcacaccacttatcgatgcactgcctcgagctcgcctcgccgagatgtacttgctctgacctctctccgactcgactgatatggtccgctgccagtgcccacaccactctcgacattgcttgcttgctgagaaatgcaactacgagctcgtccggctctggatcatgacagagaagtgctaccttttggggactctgacgaccggtgcatgtgtctcacctgccgcagcaacccaccacacacccttgtacgttcacagctgtcaggaataatctgagcatataaatgggacatagttgcatcacacctacgaacccttactcatgcagggaatatgtgtcaatgcctatgcgcatattactacacacaggcccatgcggcgcaagaccctccatatgttacccccctcctcatgatgttaccacaagagaagctacacaccatcgcagacgaactcttctctagatccacccgtgcatgtggcggcgaaagctgcgctggacacaactcttgagaatacagctcgagacacgtgcgctctgt

SEQ ID NO: 56888 - DNA, 344 bp, Zea mays
  Clone ID: MRT4577_151872C.1
cgccgaggagggaggaccgcaagtcctgaactaaatgcacgccagtggtacgacccacgccagagcagggcaagccaacggcagaacccaaggacctgcatgatggagggtattgcgggcgcagaggctatcctctgcgcacagacatgacatgtaacgagaggagcatggcagcgataggagtatcacaaccttgcatccacacgagaaggacagataggcttatgacgcggcggggctatggagccactacagagaactagaggatgtccatggctctgcgagccgaggaaatcatatcgcatggcatatcctactattgactgcgccagacgcagcccgac

SEQ ID NO: 56889 - DNA, 842 bp, Zea mays
  unsure (1)..(842): unsure at all n locations
  Clone ID: MRT4577_151873C.1
cattgggtacctcgaggccggccagggtacgtagatattcgccatcgcgtggctggctgaccgccaatctgggctatgcgccggctccgatgcgtgtgcgtgtggcgtgtgcgagtgtggctgaggacatgtccacaggctcacggctgcctcgtgtgcgacagcgcggtgagaacgaagctcctgaggcgtgcactgcgagggggcacgggccgtgtcagaccgctgggtgaacgtcgctaggctccatccgggtcaccggcgagctctgcctcccctacaacttacgcacgagcgtggtggatcccgatcatccagtcagccgcttcctccgccgcgctgcgagaacgcctctacatgtatgagtgctactcgggnangtaggtatcgtctccaacctccctgcctactgaatgcgccgtgagctcgctgctgctgcgcgtcaaggtcaggctcgcgcacggctacctcctcgtggggtccttcgtgctcacgggtccgttccgtagcacgcccgtgcacgggcaggccggcgcgatcgggggctgcggcctcgtcggcatcctcagcgtgctgcctcaccatgtacgagcatcgcctcgttccacgagggggacccgttcacggagtcctcggtcacgctcaccggtaggaagaaggaggtcgactagctgcagaccgccgacggctgggacgagtacaccggagggttcttcatcggcggcatctgcggcgcgctctgggactacttttctcctctacgtgctcgacctcacctacttcttcaagtagaaatcgtcaaagatgcgtatatatatagctccggncgatcctcctctcta

SEQ ID NO: 56890 - DNA, 402 bp, Zea mays
  Clone ID: MRT4577_151874C.1
acagggccgccgttgccgttcgcgtaggccacggacccagcagggtgagaactaggacacttcatatgccgatgattgaccattaggtgccactgtgcctccggaacgccgaccgcgaccgggaccggcatgtgatgcacctagcttacgttcagaatcctactggggtacgacagtgcgcactacgatctggggtgcaaattgagctcgtcagtgaccagatagcgtatctattcctacttttagatcgaaagcggactatttataggaagcaagtcttacataccactgcatgcgaagactaccctcttctctaatgctacataaattcaatccaatggccgagtttatacaacggggtaaatgcaaaaacccctgtgctacataaagtaattaacttca

SEQ ID NO: 56891 - DNA, 287 bp, Zea mays
  Clone ID: MRT4577_151875C.1
gggaacaaaataaaaaattaattgggcaaaaaatgcttggaaaaaaaaacggggggatttttttatggggtcgttttaaagggggggcaaccaaagcgaacaaaagggtaccaacacctaatccaaaaggggaacgggaactaacccggggacagaagccaacgggaacaccataccttgaggagataaaaaaaccgacgcccacccaagaaaggcccacaaaataacacgtaaaaccaaaagccccaacaaacgggtaaacccaaacaggatccttggcacagacc

SEQ ID NO: 56892 - DNA, 332 bp, Zea mays
  unsure (1)..(332): unsure at all n locations
  Clone ID: MRT4577_151876C.1
cccgggggaactgnaacccnatactacgacgacggngcgacggcgngccaggtgggggacgggccgatatctatcccgccgtacgtgcggcgcccgcgggatcgggaccgtgcatgaccatanntctagctacctacgcatggatcgtcacggacttgcatgtgctacctactgctacgtngtactatctatctgaatnnaaaaaccctctccgcgcacgtgcgggcttgtgtnttgtgtgtgtgnttgagagagagaggagacggagagccggccatgtccttttggctgtttggtttatttttgagttcatgcggtctttatttatttcc

SEQ ID NO: 56893 - DNA, 587 bp, Zea mays
  Clone ID: MRT4577_151877C.1
tcgtaaaaaaaaaaaaaaaaaaaaaaaagagggggggggggagaaaaaaaaaaaaaaaaaaaaaaaaaaaaaaaaaaaaaaaaaaaaaaaaaaaaaaaaaaaaaaaaaaaaaggggattattttttatatcggggggggccggttttgggggttcccaattttccgtccccttccttgcgaacttctttggttttggggggggggcccctaatttcatttccttggccgtcgttttcccccgtggggctggggaaacccctggggttccccactttattcgctttgcaccccttccccttttccccggttgggttttttgcgagggggcccgccccgttcccctttcccaacgtttggccaccctgattggcgattgggcccccccttttacgggccctttaaccccgggggttgtggggtttcccccccgggtgcccgttccttttgccggcccctttgcccccgttcttttggcttttttcctttcttttttccccccgttggccggttttccccgtcaggttttaattggggggctccttttggggttccgttttttggtttttcggcccctaaaccctaaaaa

SEQ ID NO: 56894 - DNA, 678 bp, Zea mays
  unsure (1)..(678): unsure at all n locations
  Clone ID: MRT4577_151878C.1
aattcggcacgaggccagccccgccgatcctcccccgatgtcgacgatttctggacgcccgggacgccttccaccggcgtccggcgagggtttttgggagcccggccccgcggcggacgcgacccttagctccggcctcggtggcggtgcggctcctagccgcggccccggcggcacggacgagtgttggcccccccggcggcgcggacgagggttgggccccccggcggcgcgggagcagccccacggcgcgcgatcagttcgcggagctctcggcggggcgaggcttcgtgtgcggcctgcaggcggggggcgctgcgctcttctgctggccgtccacgccggcgccgcagtgggggcagctccggcggaactacaacgggcccgccccgctcgcggacctcgcagtcggcgccgaccacgtcgcggcctacgacacctccggggaaggtggtcctatggtggcgcggcgggggccggttccccgcgcgggccgacggcgcgttccgctccctcgtctccggggacggcttctcctgcgccgtccaggccaacgcgtcagccgccgtccgctgctagggcctgcagggtagcgccgtgcaggcgggcctcgccaacgcgtccggcaccccttacctcggcgnagggggcgcccgcgcctgctcccggcttgcctcc

SEQ ID NO: 56895 - DNA, 343 bp, Zea mays
  unsure (1)..(343): unsure at all n locations
  Clone ID: MRT4577_151879C.1
gggcgatcatcttgtccgatccatcaacaatcgccgagagctttcgatagataaataaagangaagaaagcggggtnggggttatttcattctcttcgtgctacccctgaccctagtttgtgccccgctgataacataggcaaagaagaagaaagtctccgccgccgtcgcctaggagaagaatgtgcaggacaacttctgctcgacgctgtgcgagggcaggaaggggatggacctggtggtgagcaaggagttctgcgacctctcacaacgctccaacactgttgctgaacagccggaaccaatgcaagggcaattgcaccgaacaaaagggggtgggggg

SEQ ID NO: 56896 - DNA, 711 bp, Zea mays
  Clone ID: MRT4577_15187C.1
cgggcaggtagcattcagcgccataaagaacttggatttctctgctgactgcttcagcttgataacaatatcaattcattgctcgtcacgagcgcagatggatcgcgagagcgcgatgcagggcagcagtgggggcaaccccggtgctgccacgcaggaggagtggctctaccctggcggctggcagccggagcaagctgtcgtggacggcgcgttcctcatggagctgctggaggacgcgccggtggcggaccagccgccagaggacgtcgaccggctaagccgcgtcatccggtccctggaggctgagatcgatggaggtgggcagccgccctcggcggtggcagacgcaggcacggcggagcaggtcctgggagacgtccatataggcgcgctggaggactaccgcctgctgccgtaccttggtagcatccccagcccctgcgtggccgaggcgccgttggagctctggacggaggtgccggcggcggtggggcatggtatgggcggctggtacctcgacggcgacggcgtcatggtcgggtacgagttcagagagcagtgcttttacggctacagcgagagcccacacgttgagcaagtgtacagccccttgtgggaatgaatgatcaaatgtgaaaccacatataactatatgaattcaagcctgaatgaatgaccaaaaaaaaaaaaaaaaaggcccctagggcc

SEQ ID NO: 56897 - DNA, 644 bp, Zea mays
  Clone ID: MRT4577_151880C.1
cattgggtacctcgaggccggccggggagacgacacttacacctcatccgcactatccggctacctcttgatgcgatgctaaggtatgtgatgctcaagatgtggtgtgaggtgaacagaacgaacacggcacaactacacggcggagtagctcgggggcctgtgcctgtataaccccgagatcctcaacaacctctgcaagtacgtgaatgagcaggtgtcgtctcgcatatataacttgaatgcaagtctcagcctgctcccctcgtaccgctgtgacgcagaaaggatgcatcatacagattgtgcgcccatactgattaacgatctcatggccatgtgcactcccagactccacaacggggttattattaatccctggaaatgcgccaacgccatcaccattcagggcattgataccgctttctccctacttagagactgctacgactgcaacaagtattgggatgaatacgacaacaaccgtcacatatctacagaacggacacgtatctaacgagcgatgcactcatagtgcgattcatggacttaccttgacataccataaatgtactcgggactattcttgtggaggatctacccatctatatgctgcactgtagaactctatctatgaataccat

SEQ ID NO: 56898 - DNA, 263 bp, Zea mays
  Clone ID: MRT4577_151881C.1
ggcagttttgtacagacgcacctcttgttcatgtgggagcaccttgttgtatggagtcagcggatcctaaggccattcatgacaaacacccctatgcgctggctatatcgacgtgaccgtttgggggttctctctagcagatggcaccgcttcacatgcctgactcaggcactcctgccactgaaaatattgcagctgctacagctgaagaaacagaggccaatgcttactcaggaaatagaaaagttctctacaacgcatga

SEQ ID NO: 56899 - DNA, 702 bp, Zea mays
  Clone ID: MRT4577_151882C.1
ggccgcttttttttttttttttttgtaatactgtatatatataatagtggcatacggccatggatgggatacaaatacaatacgtagatacatagatagatacatgcacacggttgcactgactgactgacgattttttttttttttttttttttttttttttttttttttttgatcccaagtcatttgtagaactaagacaaacaccatgatcatcgagacaaaatgtgacaatacaaaaaatatagatttcgggtccattctatcattttatgacactagttgaatccattcatcaaatttatgtattgctacaacaaaggggggagaattttattccatgacattagcttcaacggaatcaatggttgaagttatgcaataggcttccagcatatattaccacctcggttgcgacggcgagcagaagtttttccggggggactccgggggaggcttttagttgcaggggcccaggagtaggcgttcacagaggaggcaccggataggatcatcctcatcaccagcagtcaggaaagggagcaggggccacggaggttaccttgttgccgaggaactggggtctaggaggcacaaattctggtggtttaaacaaggccaaccccatgcctggcaaggcctgtggagcccggaggaggacagaggcgccgggcagttcgggcaggacaaaggcaggaggag

SEQ ID NO: 56900 - DNA, 248 bp, Zea mays
  Clone ID: MRT4577_151883C.1
acaaactcctagggcttatgtatataccccataccatctcaccagctcagtcttcaatatttaaaaacccaattattcaaccctacaggatccaacatgcaatcacaacatgcatctcaccattatcacccttgttactccaacaaccgtgagccctattacagcaattaccttttatacatttagtttcacccatcatcagggcgcaacaactaccacaacttgttctaacaaacctagctgtatac

SEQ ID NO: 56901 - DNA, 420 bp, Zea mays
  Clone ID: MRT4577_151884C.1
gaaatacaggcgcgacccacgcgtcacaccatgagcatctatctacttcaaagcgtatagctaccgcgaacgaagccggcgaaccaggagcacctacacctccatctgctgcttctaactctcagcgccatctccacgcatacaaccggcggctagctacaacaacacaacctgctcgcatcaagcacgctcgctgtgggaaatgcaactacatacctacatcaacacttgttggaacataccaccccagctctaactgaactagctggggcaaatcctatcgcctactcataacaggtgcttccattataccaagtgactatgatgcaactagcttactcaactacaacagcgatcacacttactcaaaccacagccattggctaaccaacaggccgatgccatcctacagcaactaca

SEQ ID NO: 56902 - DNA, 283 bp, Zea mays
  Clone ID: MRT4577_151885C.1
accagattcaccaccccaaacgcagccaaagccccaaagcgggctcgcgcggccgtgcctcccactcccacccacggacccaccgcccacgcacgcacgggcgtgcggccatgcagatcctacgcctcctcgctgcgcggcgcttccgccggcggcggcgcggggtgtccacgatcacctcgacggcgactgcgccggccacccctcgcagcggctgcgtcgccggcgtgtacggatacggcgaggaggaggaggacgatgtgccgttcttcgacctcgacct

SEQ ID NO: 56903 - DNA, 371 bp, Zea mays
  unsure (1)..(371): unsure at all n locations
  Clone ID: MRT4577_151886C.1
nnnnntnnatattaacacttccccaagacccaacaaaaaaaggacaggagggggacgaggcaaagacaaagggcgcaccgtacacacccagagccagaggaggacaggccaaaccagccgaacaagcagaaggacagggcacaagaacacaacagggacacgaggcaaaggaacagagaaagaaacaggaaaaagaacaacaagaggcggaggcaaaagcaaacacgaaaagggagaacagagcgccggagcgaacgacaccaggggcacaaaaggacgccaaaggaaggcaccgccaggagcgaaagcccagggaacggaggcgaagggcggcagcagccacccgcgcgcagccgccagccgccacacac

SEQ ID NO: 56904 - DNA, 375 bp, Zea mays
  Clone ID: MRT4577_151887C.1
tgcttgttcgaaggaaaacggaccgccggattaggattggagtcatcacatcgtcgcttagacgagcgagagcgttcctacggacaagcctacacgttttcataaggaagtcgtattaagttctgtttcagaccacgtcgtcgtccgtagaggagaggcgtttatcattcctccggtaaacgcccaatttcctagcgcaaagtaacgccccgatatccagtagcgagtcggcaaccccgccctcccttccgttcaatcgtcatactttgtagtcgcgctcccagaaccggtctcggcatacaagacgcgagttacggccaccattagggtcagacccactcccgtctctcgccacctaagtcgactaagcacctt

SEQ ID NO: 56905 - DNA, 494 bp, Zea mays
  Clone ID: MRT4577_151888C.1
gctacatctcaaattatgcatttggaaatacccttttgaatctgtatgactatacatggtttttttacttcccggatatggtactcataaaatgaatcaatcaaataggaactcaaaatttggaaattaatgaagtaacggattctagctacatcaagtgttgctcgttaaaattttgtagtgttatgatgctactccacaaggaaagtgcagggcttcaagaaccaaaacatgctgctggagctcccttctgcatcacatgctcttgtattattcatatccttaaccccaaagggttgcctcacagcatattttttgctctccggatccttactaggggtccacttctcctaaagaaaaggaaaatacaggataattagataaccccgtgatcaacttcagataaatacctcattggtaatggttgggcacaacagccctaaaactatacaatcactgagtttgcctttctgtacagcacagaaagatgtctg

SEQ ID NO: 56906 - DNA, 183 bp, Zea mays
  Clone ID: MRT4577_151889C.1
tagctgcgcggggagtgacgacacggcttgggttttggtgcctgtaaaaggaaacgaggtagttgtagcaggtaccctattcgataccactcatcaggagccagacactactaaatgacatactataataggtgtttcctagtttttaccggcgctcgatatagatgggggtggacatatata

SEQ ID NO: 56907 - DNA, 384 bp, Zea mays
  Clone ID: MRT4577_15188C.1
atgccgccagacctgccaccgcacgccctcttctcccccacctgcctcgatgccggcggcaaagcacgccagatcgagggctcgaccccgggagatgcagtcgccagcgcggggtcatgtgcgagctcgagcatgctagtccttacgagtgtgtggtctaattcaacatcgtcacactttttagtgactccgctagggacagaacatcgatctgtgtccaagatgcttgaagatcaaaacaacaatgagaagagtgatctcaccaagctgtccaacatggataacatcatccaccctgccactcgctatttatcaacttccaggcagaggagttttgcggcatggtggaggagaagaatgttgctggcctggggcctgctctag

SEQ ID NO: 56908 - DNA, 2197 bp, Zea mays
  Clone ID: MRT4577_151890C.1
gtctggtcatgcagctgagatgttttagtatagaagtagcatcatttagcgcaagtcatgaagagatgctaccgaattgacaaagtatactctttctataaatcctaataattatgcttagctcataacctggtattcattgtaagcctcatggtggatagtctcaaatagggtcgacaaattatcttatgttcattgaggatgatcctatcatagatgcttgtgcagttgtgcatctcatacatctttctgtactgtacaaaaaggcaaacacagtgattgtatagttttagggctgttgtgcccaaccattaccaatgaggtatttatctgaagttgatcacggggttatctaattatactgtattttccttttcattgggcctcgaggccggccgggaacacgcgcaacggctctcgccctcgccagtgccccggcacgtctcacgagtgcgacaaaggaggagcggcgaccaagcaatccctctctttctatcgctcggggctcctcctccaccgcgcccgcacggcaggacgcaggagataacagaggggagcgcgcgggagcaaaggggaggacggcatggagttcatggagcccaaggacatcgactggagcagggtggtgtcacggtacgtgcgcgacgagacctacgaggacatcgaggccccgcactgggccgacctcaccgaccccaacgccggccgcgccgccgtcgacgacgaggcctggttttgccgccccgattgccagcatccgaagacggccgacgatttcttcaagctgagccccagccccaagggcaagctgctgcgatcggtttccgccatgctgccgttcgccgaaagggacgccaacgccaccagcctcagggacggcagtagcaatctcaagtggcggggtggcggcgccgttgctgcctccacgccgccgaagccaaaggcagcgcccaagaagaggttccaggaggatagcgagaaccatgaccctgcgctggccacgccgcccccacggcaggcgccaagtaggccgccgttcggcgcccctcggtggaacaagaatgccaaggaggccatcaagtccagtgcggagaagcggccggacaatgctgagaaggaggcgctgctcaataagcacgtcccgccgaggcagctcaagagcaccctctcagcgaggaacctcttctctggaaaggatatacttggccagatttcggagttctacgatgagctgaagcggatggttggtggtggcgtcggccggcctgtcacagacacacaggaggagcacagctcagacccagtgaatccgagctatttgatggagaaggtggctcctgatgagacagtgaaggaggaggcgagacaagaaacggtgaaaaagagtccaagcccaatgaagggaaagaaagtggggctgaaggtggaaccagggaagcaaaggtctccctctgtgctgaaggaggtgagggcaacgccgccgactccacagcggtttctatccccatcgccaaaccgcattaagaatgttaaacctggagggatcacagcaggctcgccactcaaaaaggcaccaaaggagaaggggacacctagtaaggacctggagagcaaaaaagatgctgtgaggcaaccctttggtgttaaggatatgaacaatacaagagcatgtgatgcagaagggagctccagcagcatgttttggttcttgaagccctgcactttccttgtggagtagcgtcataacactacaattttttaacgaacaacacttgatatagttagaatccattacttcattcatttccaaatattctctgttcctatttgatcgattcatttcatgggtactctatccgggaagtaaacaaaaagaatcatgtatagtcatacaggttgaaagtcttctccatatgtataattcgagatatagcaaaacgtggttctgctgctttgtcgtttgttcaaataaactgcattttttttccattacttcattcatttccaaatattctctgttcctatttgatcgattcatttcatgggtactctatccgggaagtaaacaaaaagaatcatgtatagtcatacaggttgaaagtcttctccatatgtataattcgagatatagcaaaacgtggttctgctgctttgtcgtttgttcaaataaactgctttttttttaaaaaaaaaaaaa

SEQ ID NO: 56909 - DNA, 2840 bp, Zea mays
  Clone ID: MRT4577_151891C.1
gtccccttttttttttttttttttttttttttttttttttcagcattctgacatctattttcttccctgcttacaagggtctcattttcacgtgcactgctagagtgtattatttttctttgtgaagagttgtatgcaaacaatttttttgggggagagaagaaatatataagtactctaacatacaaaattgcacgccgacttttgtgacagctcttgcattaatttttattccatttttctacatgcaacaagcttatctactaacagggcaatcgatctagtactatcaagggatcccattttatctaatcgtcttcaaattgctagtgcgctataaaataccccaagccaggtcccaaccgtcaaactcgcctgactgtaacaacttctcaattgagaaagcctgggaagtattcagcattctgacatctattttcttccctgcttacaagggtctcattttcacgtgcactgctagagtgtattatttttctttgtgaagagttgtatgcaaacaatttttttgggggagagaagaaatatataagtactctaacatacaaaattgcacgccgacttttgtgacagctcttgcattaatttttattccatttttctacatgcaacaagcttatctactaacagtgcaatcgatctagtactatcaagggatcccattttatctaatcgtcttcaaattgctagtgcgccatccactgtttcgctttcatcatcggagctgatagacttcgatttggacataactctggaaaacccatagccaagagaatttcctgacgtagcacacaactctgtaagctctgacagatgacgattccggaactcgttgatgctttcctgaatctctgacattgggagttttgcttgtgcaagaacagcagcagctagctgaagacttggctccaaggtctcagggacaaccgctgttgcaccagctttctccaaattaacaccatgatcaacatcatgtgctctaacaaatgtcttcacatttgggaaatatttgttcaatgcccagacagctctatagtttgcaccaggggtatccaaagtaattgcagcagcacaagctctttcagctccaactttgtgcagtacctctctgcttccagcatccccaaaatataccggaaggtcaagtgcacgcccaactgcaacccgatcacttctaacatcaagggcaacaaaaggaattaaccgctctgacaggagttgcgcaacgatctgcccaacacgtccaaagcctaatataataatatggtcgtgcaaatcgtcagtctcactttccacaggcaataaactcctcacatcatgctgctcaaattttgatgccagaaactgccctccagcagctaaccatggtgtcagagccattgaaatgccaacgactaaaaacagtaacgatgataattgaggtgatagaagaccctgtaaaatagtgtgctatatattcatagcagttgacagcttctccaaaggcaacaaaagcaaactcaccaccaggtgcaagcaagagaccaacacgaatggcagctatagtagaaaccccaaataccctgcccacaaatgtaaccaacaatgtctttccaattatcaagagacccaatatcatagagatcattgggaagtttgacagaagcagctttgggtcaatagacattccaaccgtcataaagaaaagtcctaacagaagaccacgatagggagctatatctgactcaacctgcaatgagaactctgtttctgctagtaacagaccagccaaaaaagctccaagtgccatcgataacccagcccgggctgtaagaagacttgtgccaaaaataacaaggagtgtatttgctgaaaatatctcagcattctgattttcagcaatttgcttgtaaataggccgaagcaacagacgacctccagcaattatggcagttatagcagctactgctttgactgcagccattcccatggcttctgctattgcttggaaaccaacccctccttttgaagaattaggtgatatgagaggtattaatatcaacaggaccaccacagccaaatcctggaacaataacacagaaaatgtggcacgtccatgacgcgacgtactttcaccacgctcttgcaatacttgcaagacaacagccgtggatgcaaaaacccctaaagcctaaaatgtcatccccatggattacccacccagggaaaattccaggattccagatggatgtgagtatccaaattaggccgaaggcggataattgaacatggatgatttggttccaaatgaagattaagacgcacatcatcggactgtctccattgggtaatgtaaaataggggacgcggactgtagataacactgtttgacactgtttgcggagtgaagttttaaatagaagataaaatagggatgcgatagaggatctgctggagagagcctcatattgctggtcatgccagcattttcctgaattcctggaagagtctgcccgaaagtttgttttattttgtggatttaatacattccaactgcagtccctaattagcctaaaatcaactatctcaactgtacacagtaatttacagaattaagtctgcataggttcatgcagccatactcatggttaaatattaattcagaacagatgctaaggttctgaactgctgctatctgtagtttctttagaattcaatttattataagatgcaccataccttccagcatcaagtgcaacaaaaggaattaaccgctctgacaggagttgcgcaatgatctagtaaggggggaattttctagggattcagacatggaaaaatag

SEQ ID NO: 56910 - DNA, 317 bp, Zea mays
  Clone ID: MRT4577_151892C.1
agagcctgatacaacttagggcgtcagaaaattctcctcaaatgacaatataaacccagtttaagaacatgctagaatgaattaaaaaggacgggttacattgcctacctttacaggaaagggcgttttaacaagggggatcattagtccaacgcgcctcagccatggggcaggagaaggttggcattctcggtcccaaaatgcgcctacttagatctctgccttattttcgggggcttccttttgagcctccgcatcctttttttcttacacttggccccgattgggtaggaacaggtggggcgcgccctcgagct

SEQ ID NO: 56911 - DNA, 1571 bp, Zea mays
  unsure (1)..(1571): unsure at all n locations
  Clone ID: MRT4577_151893C.1
acagaagctgagtgcgtgcacgtacgtacgctagccaagtacgatgaccctgagataggcttatatgataactttggaaagtggtggaatgtcacattttaaaaaaatagcctattccaatagtaagattccaattcctcaaaataaaaggaaacaaacggggcctaaaggattttggccctctcagtcccttccattactctcaaacaagcactaagtgtctaacatacaaaaatggacgccaacttttatgacagctcttatatgaataattattccaccctccttccacatgaaacaggattatctactgaacaatgcaaccaatctagcgctagcaaggggatcccattttatctcatcagcatcagattgctagtgtgccatccactgtttggttttcgtcgtcggaggtgaaagacttcgatttggacgtagctctggaacatccatagccaagagaacttcctgacgtagcacacaactctgtaagctctgacagatgacgattccggaactcgttgatggtttcctgaatctctgacattgggagttttgcttgtgcaaggacagcagcagctagctgaagacttggctccaaggtctcagggacaaccgccgttgcaccagctttctccaaattaacaccatgatcaacatcatgtgctctaacaaatgtcttcacatttgggaaatatttgttcaacgcccagacagctctatagtttgcaccaggggtatccaaagtaattgcagcagcacaagctctttcagctccaactttgtgcagtacctctctgcttccagcatccccaaaatataccggaaggtcaagtgcacgcccaactgcaacccgatcacttctaacatcaagggcaacaaaaggaattaaccgctctgacaggagttgcgcaacgatctgcccaacacgtccaaagcctaatataataatatggtcgtgcaaatcgtcagtctcactttccacaggcaataaactcctcacatcatgctgctctaattttgatgccagaaactgccctccagcagctaaccatggtgtcagagccattgaaatgccaacgactaaaaacagtaacgatgataattgaggtgatagaagaccctggttgacagcttctccaaaggcaacaaaagcaaactcaccaccaggcgcaagcaagagaccaacacgaatggcagctatagtagaaaccccaaataccctgcccacaaatgtaaccaacaatgtctttccaattatcaagagacccaatatcatagagatcattgggaagtttgacagaagcagctttgggtcaatagacattccaaccgtcataaagaaaagtcctaacagaagaccacgataaggagctatatctgactcaacctgtaaggagaactctgtttctgctagtaacagaccagccaaaaaagctccaagtgccatcgataacccagcccgggctgtaagaagacttgtgccaaaaataacaaggagtgtatttgctgaaaatatctcagcattctgattttcagcatttgcttgtaaaaggcgaagcaacancgac

SEQ ID NO: 56912 - DNA, 282 bp, Zea mays
  unsure (1)..(282): unsure at all n locations
  Clone ID: MRT4577_151894C.1
cccacgcgtccnctcttcntttcttccactacatataaccttccttatacaactgccnacatggcgctcccgcccaattttaacatgcctacgctccaccacctcatccccctttccatcacctccgcccccctcggcacccatgcctacaataactacaccgtctcctactacaactaatagtaccacggcctaaccctgcctctcgtccactaccacttcctgcctgactcaagaacttcatctctgccatatcctcatcttaacaccgacaataaccac

SEQ ID NO: 56913 - DNA, 349 bp, Zea mays
  unsure (1)..(349): unsure at all n locations
  Clone ID: MRT4577_151895C.1
tggtccctcgagncnncgccggacactgagagccgttcatacaggcgtcttttcactcgtctatctctgcgacctcggatctccctacaagtgccacgctggcgactgtgatcacacacagggctaggtcgcgccagccgaagaacaggattgagggagcgaccctcgctccacctcagggcacggtggtgtccaggacagatacgcgtgctgggagctgtactgcctcgagcatggcattcacgctgatggccagatgcccggtgacaagaccattgggggaggggatgatgctttcaacaccttcttcagtgagactggcgctgagaagcacgccccccgcgctggt

SEQ ID NO: 56914 - DNA, 614 bp, Zea mays
  Clone ID: MRT4577_151896C.1
ggggggaaaaaaagggaattggatttgacaacttgtccctggaaaaaatacaaaaacagggggggggcccaaacaaattttaaaaattatcctttggccaagggctgggaaaaaaaaaaaacaatttttgaaacccagggggggggaaaaaaacgggggaaatggcaaaaagggcccccctccaaaggggggcgggaaaaacccttttacccctcaaaactcctaaaggggggcccccgcctcaaaagaaaccccagggggttgtttcagggaaggaaaaacctgggggaccaggacctggggcccccccctgataaaggaacccgaagggggctaggcccttccggagggggacccctggaactaacaaaagtccggagttgttgaatccaagggacaggtataaaaggggggttggggggaatgccctatgcctttaaacaggggccttcccgatggggacccgcgcattgcccaggaaaaatgccgcagggccccccacccttttgttctttttgttgcccctcgccccgaaggaccccccgaaaataactgggggccccccccccaaaaggaggtttaacagtttggttttccccatgggcaacggggcc

SEQ ID NO: 56915 - DNA, 219 bp, Zea mays
  Clone ID: MRT4577_151897C.1
catgattgtgttggcaagtgtatgtgttctactccctcgggacttaattataagttgctttgatttgtttagtttagttccattttactatacatctagatatatagtacattatttgtctagatagacacatagcgaattgcatgtataaaaaagtcaaaacgatttataatttagaacagaggagtactagtttgtggcgagcttgcttatcgcaac

SEQ ID NO: 56916 - DNA, 1147 bp, Zea mays
  Clone ID: MRT4577_151898C.1
ccctcgatgcctgccgggttgaaacagatctttgcggtgagacagacttgctcaactgctacttcctttctccccctggaatgatttggccaccttcgtaggctgaagctgacgcacgtgatgagagctctgcttctgcagtaggacgccttccaacccgccgtgccactgcctgctgcagcagcaggaagtgttagatggcgtatttggtttcaagaaatgaggtggtccatcatctatttatttataattttttaagtttctaaaataatactcctttgcagtgtagtattagatgtcattctagatgaataagtgtagtgtaacaaaaaataccattctaggatacaaaagcagtattgtcaagttttacttgtcaagttttactcttggcttctgcatgcatcgctggctacgcgtatactaaagaggacgttggaaccctatttaatatgggtacgactgaaactttttcctccattactcgttacttggtatacgaaatgttgtctaaaatgacatctaatactacaccccggcctcgccggagtacaggtcaatgtgtcatcactccattcttcacccaggctaacaaatagtattagtataagaaaacaatcgtcctaccaaacctaagaaaaatgaactcatcatgcatgcttatctccttagaccaaacacctctaaaccaagcagcctgcaaagcagagggaatccgagccaagcggagcgagccaagccgggggcaatcatgcggcagtgaatcctaccggaaccgcggcagctttggcggcctgcaagcgctgtgcggcgcgcaggtgcgacgcagcgtggcggaatgattccgccgactgtttgcttgcgcgtggacagcagcaccgcgagcagttgcagccgtccggcgcccaggaacggtcgggagggaccgcgcgcagccgcagagtcccaatgccacgaagcctcctcccgtggcttgttgctgctccgcacagtggacgacggcgagggcaattggcagcacggactacacaggttacgggccctgagctcgtcttaaaaacttgtgtaaatggaagtatgagatcccgaggcacacgtacggggccaggactcggcattgaaagttctgcacggtctttaaacacct

SEQ ID NO: 56917 - DNA, 568 bp, Zea mays
  unsure (1)..(568): unsure at all n locations
  Clone ID: MRT4577_151899C.1
tgtccatgtcggtgtctttccccgcacaggnagccgcgctgcgccacaccacgccattgccatgccagtatgccagttgccaccgaggtaaacagcatagcgacggctcagcatagagacaagtccagcgctcaagagagagagagcaagcctttcggcctcgcgtgatgcagcagcagcagccgtccgtccgcgccgtcaccatccccttcgccgaccttaaggatcggggcaaggacctgggcggcttcatcgaggaaggcttcgggcctcaggggctcggcatcgtctccatcgccggcgtacccggttacccagagctcaggaaaaggctgctgcgcttggcgccaaggatcgtcagccttcctgatgatgtgaagaaacaactggaggacccagatagcaggtcataatttaggaatttacagaatggtcttccccagggagtatatcatatgtatgataccataccattcaagctacagataagtggacagaagcatatgctgttgtgggatggatgaatcgcacgcagcttaaaataatgcaacaataagactttgtttgc

SEQ ID NO: 56918 - DNA, 483 bp, Zea mays
  Clone ID: MRT4577_15189C.1
gggttgtctgtgtttgttatagccaactagctagcagtatttcaaaacaaaatcaaaaatcaaaacccgccctaaacgcagagatccgctgcgagcacgcatgatgcaacggcgcggctgctctagttgaccttgaggcgtttagggcggccatgtgtattcatcactccggcagattttgaccgtgccaatgccatgcccaacgtgttcgccgatctgactgctcagccggttgttggcctggagcaagaaacgtacccgccgctctgacaccaacggaagttgagacgtgcggatcgttgaaaagtcgatgcgtttcgtccgtttgctccgtgcacaactctagatggatcatggatccacatccaccaatgcgcttctttcagtccgacgaccctccccgcccccattcgctacggtgggagttcatttctgggtgtagtgtagtatctgctgactttgctggccgcgtcgtctctaatt

SEQ ID NO: 56919 - DNA, 327 bp, Zea mays
  Clone ID: MRT4577_1518C.1
ctctttctgccccagacgagcggcacgacgggggaggtgatcgagtctctggtcagaggactgggactgagcaccacgcactgaggccacgtcctagtggacctaaaggacgccacacagggtaagcacaaaagcctaagatcgcacacacacacgtagagctgagtgctgcacattgaacacgaataattgtcacccaaagatgaaaacagtgtcaaatgcttttacactgcacacaaactatattctttctcctttagggctctgaaaaggctaaaacaataaaactaccaaataaggcctgttaacaaccttatacaaggaagc

SEQ ID NO: 56920 - DNA, 1077 bp, Zea mays
  Clone ID: MRT4577_151900C.1
cattgggtacctcgaggccggccgggttctccggccgcgagctgaagcgcgccacgggcaacttctcccgcgacacctcctgggcgccggcggctacggcgaggtctacaggggcgtgctcggcgacggcacggtggtggccgtcaagtgcgccaagctgggcaacaccaagtccacggaccaggtcctgaacgaggtgcgcgtgctgtcgcaggtgaaccaccgcagcctggtccgcctgctcggctgctgcgtcgacctggaccagccgctcatggtgtacgagttcgtccccaacggcactctcgccgaccaccttcacggcgccacgagcctgagccgcccgcccacgctcgggtggcgccagcgcctggccatcgcgcgccagacggcggagggcgtcgcgtacctccactccgcggccgtgccgcccatctaccaccgcgacatcaagtccagcaacatcctgctggacgcccgcctggacgccaaggtctccgacttcgggctgtcccggctggcggagcccgggctgagccacgtgtccacctgcgcccagggcaccctgggttacctggacccggagtactaccgcaactaccagctcacggacaagagcgacgtctacagcttcggcgtcgtgctgctcgagctgctcacgtccaagcgcgccatcgacttcgcccgcggcgccgacgacgtcaacctcgccgtgcacgtgcagcgggcggcggacgaggagaggctcatggacgtcgtcgacccggccatcaaggacggcgccacgcagctccagctcgacaccatgaaggcgctcgggttcctagcgctcgggtgcctcgaggagcgccggcagaaccggccgtccatgaaggaggttgcagaggagatcgagtacatcatcaacatcgaggccgccggccatcctatcgagcagcagcgaacttgcctagactccagcgagtgatatgaacttgtctagaacgtatgaatatcttcggaaatcaagatactcctattttgtaatactcttctgataccagagttgttgaaatagtcaataattactatatacgc

SEQ ID NO: 56921 - DNA, 1096 bp, Zea mays
  Clone ID: MRT4577_151901C.1
cacccgtgcgcccacgcgtccgcgtcggcctgcttccagtttaccgcagcgggacgactgacgcgcctccgacgacacgccaggtccggcatccatgggcgccgcggcggccgacctcgaggcgcgtcagctccgcatcctcggccgtatttctgacctcgagctcgccgcgcagcagcaccgcctcggggcgctctccatctccaccgcgccctcagagaaaggcgaggccgacgcgggggctaccgaggttcatctcgcagccctcctggccgcgcgcggcgtgcgggacttcgccttccgtcgcgttcccgccgactactatgaccgctccctcgaggagcggcgcggcctgctccgagccgactcagtcgcccagctctgcaagagtatcgtcatggtgaacacccaagctgctgtagatgttgttgattgcagtaatccaaagaattcaaaatactatgtcgttgttgttcagtatatggcacggcttaacgctgaaaacatcaagaacttcctgtatgaactaaatgagaagcaaataccgaaaaagagatttaacatgaggttggcaccagaagaggagtcacacaagcttactgggtttgtgcataacgctgtcacttgcatcgggatggaaacaaacataccggtcatcatagatgaagctatcaccaaattggatgaggatttcttctggttgggtggcggagaagttgacctcaagctcggaatgcgaacctcacaattcttaagtgtctttagtccattcgtggtgaaatgcagctgatgatagccgtgcagcctaagagaagcttctgattcatttatttctaccgagcctccatgcatccatcacatggaggtacaccacaatactagggggttttgcttggatctggggtttggatgtctgtcttttttggagcaggctattcctgttcagttgctcgcctcacattatttacagctgattgttgttacgactgatgtggtggaggggacattcttgggaagattgagatatttgccacaactaggcatatacaataatactctctgtagtttgtgcctaaaattagcactggttactcct

SEQ ID NO: 56922 - DNA, 273 bp, Zea mays
  Clone ID: MRT4577_151902C.1
ccagcagctgtcacagagacatcagagagcggtcctccttgtgagtctgacctgaagaggaggaggacgatgaggagaagcatcatctcatccggaggagggagagcgaatatgcaccgcgtctcgctgttgctcgtcgccaacgtgtgcgccctggcggcgccggttgccgaggacttcactgacggtcttttcccgaacggcaactccaaggttggcccgcccaagtcggcgctgataaacggcccggtggtttcggcccccaacccattc

SEQ ID NO: 56923 - DNA, 375 bp, Zea mays
  Clone ID: MRT4577_151903C.1
ataaaccaaaaaatttttttttaaatttgggggccccccctcggttttataaaattgttaaaagcttttcctttccctccaaaagtttttgcttccaaaagggggggttggggttctttttaaaaattataaacccaaaaaagacaaggctccaaaggctttttttttttttaataaaaccttttgaaatttccccgggattttcgggccggttcctgggggggttccccttttcttttttgggggtttttttaaaggcgggggtaaaaatgggcaatagttgttttctgggggaaattgttattcccgttcaaattccccaaaaatattcgggccgggagattataaggtaaagccgggggggcccttttgggg

SEQ ID NO: 56924 - DNA, 149 bp, Zea mays
  Clone ID: MRT4577_151904C.1
tctatcgtccgcgtgagctttgacatgcatggatcgaccgaccaacgcggcgtcgatgagactatgagagcatggactcccctttttttatctagcagatgcagagattcctaatgctagcttacctagtacacgacaattcccctgcc

SEQ ID NO: 56925 - DNA, 125 bp, Zea mays
  Clone ID: MRT4577_151905C.1
aaggccactaatgatgtcaggaaaccaatatcaccaaccagatgtatgtccaaacaaatatacgaagctataccaaatacggacttacatactatcacgtaatgacataaacttacaacaacata

SEQ ID NO: 56926 - DNA, 439 bp, Zea mays
  Clone ID: MRT4577_151906C.1
gggcaaaaaaaaacccgggggggcccagcaaaaaaaatttggcgaaacgaacagcacaggaagcatttaccccaggccctacaaattggggaaacaaaaaattaagggaaccaaacacagggaaaacgggcccccaaaaaaaaagggtcccgcccccaccggggggttttatttcacactttatttaggggcggaaacgacaaaaaaacccctaaacccaacaaaaagggcactaccttgaaaaccaggtccctagccctgggaaaaaggagcccgccactgccattggggggaaaacggggggggaacttgcccaaattatgcccaactgccaagggggggaaaaaaaaaggggggaggcccccatgggggaaggaccccaccccccccccagggtcaaagcgaaccatgcaagggaaaaatttcccattggggggag

SEQ ID NO: 56927 - DNA, 1562 bp, Zea mays
  Clone ID: MRT4577_151907C.1
ggtaaacttaccaaagtcaggttgctccagctgatggtttgctggatgttcaaagagatggagaatctaaagaaacaatataaaaaactggttgcgtgggatccgagacagcgggtacaatgttttaggactagcagctactcttggggaagcattctttcgatgcatagagggttcttctgtcacccttgctattatggagaatgtgcaagttatggagtttcggcatctgcgccaacttatccaccttgttattattccatttgttaaatattgccctgccgatttatggctgtggctagtgaaccttttgcagccgttatttgtccactgtcagcaagctcttaattattcatggtccagtcttcttcatgagggtcgggctaaggttcctgacagcattggtaatctttctgggtcagaactgaaggtagaggtaatggaagaaaagttgctacgtgacttgactcgtgaagtatgttctgtcctttgggctttatcatcaccaggcttaaataatggacttccatccttggaacaacttggaccttccaaccggatggattctgttttgaagaatctggagtcctttgcttcaagttctctaactggatttcttatgctccatattggcacagctcttcctgcattgaggatatcagttgaagtgttcacttggacagatagcgatgccgttactaaagttatccccttttgtggtgcattgatccaccttgccgttgcttcaaaccaggctgagttgaggcagtttgttgcaaaggatttgttttcctctataatacacggtttatctgttgaatcaaattcagtcattagtgctgaacttgttggactttgtcgggagatatatgtctatctgtctgatagagatcctgcacctaggcaggttcttctttccctcccacacattaagcaggaagatttactagcatttaatgactctttgagtaaaactgctagtcctaaagagcaaaagcaacatatgcgaagcttacttctgctggctacagggaacaaactaagagcccttgctgctcagaagacaactaatgtgattaccaatgttacaacacggaataggagctctactgctcaccatggatcaagtgccgaagaagatggccatattgggttggccacactatcatcgatatgacctgccaaagttttgggcgtgtaaaaaaggttgcatatcattattggcggatgccggattcttgcagcatcattatgtgaggatgaatgcatgcgtagttatacggctatacccttcctgcctgccttcatgagcaactgaccgattctttggtttaggcggtctgtttttctagaatggatgtatgtaccttccgtgtgcgtgtgggttctggtaaatggtgaaagttgggtgtgattacttgtagctcacagttacatattgagggggtactcagggcccgtttggatacatctagctaaattttttaggccccatgtttgaatactagttagaaacattaaatatagtctaaaactaattacacagttaaggacaaaaacac

SEQ ID NO: 56928 - DNA, 269 bp, Zea mays
  unsure (1)..(269): unsure at all n locations
  Clone ID: MRT4577_151908C.1
gtnttctgaggatgcggcngaggcnnggcgcgcgcggactgagtggaggcttcgtgcggagcgcccggggaaattgagattgcccgggaacccggtgaaccctgaccaggggcgtgaacgcaggctttgcccctgatgagtggaagtgcgtcattagcaggcttgggcgtnagattcatgggtgcattaggctgtttgcnctcgtggtggaaaattcgttnatgcncgnttcancanattgccagcancagagatgagggcaanntacg

SEQ ID NO: 56929 - DNA, 331 bp, Zea mays
  unsure (1)..(331): unsure at all n locations
  Clone ID: MRT4577_151909C.1
gtataagagaaataggaggatggttgtgtggttattttgaggtgtgtgatagtgtaatagtaagttttattnttggatntatgaggtttgagnatttgagtttgtattttttttttggtnnnatggaaanagagttttgggggggggttatttgttggttgtggttgaagagtnataatttaggggtgtgtgtgttatannagagttaagtntgnttgaatttatgtggnatttgtttgagtttttgnttttgtggnttgttttttaatgtanngtggttgtganaggggnaatgtgatntgaantaaaanattgngtggnaagtttgtgt

SEQ ID NO: 56930 - DNA, 465 bp, Zea mays
  Clone ID: MRT4577_15190C.1
ggcttggaacctttgggctgatttatgtgcttggagtattattattattattagcatgggttgctcttgttgtagttgacgcatgtgcggtgggatgggtagttgttgttgttgttgttgacgcattagtagttgcatggatagttggcgcatgtgctgttgcatggttagttgttgttgttattggtgacgcatttgttgttgcatgtgtagttgttgttcttgttattatggaagattggtgtactgcctgtggaaggacgtcgcgtagggcccgttgtaactcgccgtcgtcgttctacggatgtgcgtcctcgactgcgcggctgattataagtttaagaaatgatgctccttcttcggttcgggctagggcgtttactagtgaggagtcgagactaattattgtgccgagtagtcggcggcagttcggtgttgcccgtactcccgtattgggaatgaagt

SEQ ID NO: 56931 - DNA, 254 bp, Zea mays
  Clone ID: MRT4577_151910C.1
gaaatcacactacttatgggatcataatgagtcaaagagcatcacaggtgctacacgaatcaacaaactgcacgctggagatcacagttccacaccggaagcgcgacattgaaccgtaagcgctacaagataaactggcaccaccactggaacatgaacaccatttgattgaaataccactggaacggccgcacggggagtctgacatatgacaaagggcgggcggaacacacagaccagatcaacaaagacct

SEQ ID NO: 56932 - DNA, 522 bp, Zea mays
  Clone ID: MRT4577_151911C.1
gggcggggaggtttttttttttttttttttttcggagaaaaaaaaaaccttccggttttgaaccggcgaagggagatatggtcatgacggtccaaaccgggggccccgacaacgggggtataaaaatggaccccctcctgggggccgccggggccggggtcctcttttagggcccttttaaccctgaagcaggcggggggggtttttattttttacggcaagcaacccccgaaattgaaggggttcccggggggggaaccaaaaaccccgggcctccctaaaggggaaaaaaaccttgggcggggggagccttttagggggccaaccgccctttttttttccaaaggcgggggtcccccccaaaaagggggcccttttttggggggggggggttggcccccaatttctgaaaagggccccggtattggccccccccccaaaatttgtttgggtccaaaattttggggttcccccctttggaaaagggaaaaaaccccggggggtgcccccggggcttccccc

SEQ ID NO: 56933 - DNA, 208 bp, Zea mays
  Clone ID: MRT4577_151912C.1
attgaatgccaggaaccttgaaacttcaggcacaatgtataattctacagcaaaaatgagaactaaaaaaactcggcagaggagggaaagaccgttctcccagtacatgatcccgaccgagaaaaccctcaaactctgccctccatcactaacgggctgatcaattgcccactctacaacggcccagctggagggtgcggacgcgtgg

SEQ ID NO: 56934 - DNA, 241 bp, Zea mays
  Clone ID: MRT4577_151913C.1
aggaggagctgtacaggcgtgtcccttcggacgtgtgagccgtcggcgtcctgacatctgcgttcccggttttgaaacctgctgctgctgttgcgagtttgtgtaccattaactcttctctggtgaatggtgatgtacgtgtcgtagtcgtgtacgagcattttgtgtactgcagaaaaaaaaaaaaaaaaaaaaaaaaaaaaaaaaaaaaaaaagaataaaaaaaaaaaaaatataaaaa

SEQ ID NO: 56935 - DNA, 280 bp, Zea mays
  Clone ID: MRT4577_151914C.1
acgtggtacgcggaacgctacaaaaactaggatttaatactactggaacgagatcgttcccacgttcccggaacggaacgaacgttcccggaacgaggaacgtggccaagttcccggttcccggttactaaggtctagatcttcgcagcaaccacaacaactcttccgaatcttcgaccaatgctgcaaatcagagtggtcgtggaggtcctagccggtttggacgaggtactcatggaggaaggaactcaaacgctccaacctagcggggcggccgccg

SEQ ID NO: 56936 - DNA, 436 bp, Zea mays
  unsure (1)..(436): unsure at all n locations
  Clone ID: MRT4577_151915C.1
gccggaggagcgaggcaaaacacagcaagagacagaccgaggcagcccaacgagcgaacgagcaaaggcaaccctaagcgacgccccccacgagggggcggacgccgncgccaggccggggaaagcgcgaggaacggcgccaccgaaggagacagacgagaaggagaggagcggggccgcccacgcaacgcggacgaaacagcgaggagacggaaacaacggagcaccgacgacgctgccggacgcgagcaccagggcggtgaccaaaacgcccgagcgggcgctggtggacgagcggatgtcgacggacggaaccggccttagcctggggttcaacaacagcatgctgcggggcatgctgtcgggcgtgatcgagcacgtatgccctttctacgccgaatacaccctccacgatcgataaggaagaagaccccgg

SEQ ID NO: 56937 - DNA, 257 bp, Zea mays
  Clone ID: MRT4577_151916C.1
cttgttttttcttttttttcttttagagactgaggatgtaactattagaccagagaggatgcagagcacagaccgcaccagaacatgccccctcagggcctcaatacacacagccaggagcagcgaccttatttcataatagcaatatggagagatgcacgcattggaataaggacaggcggtgagcacataataccatgtagagctagaagcagaggacgcgtatatctacgccattgcagggcgtggaggaaccc

SEQ ID NO: 56938 - DNA, 314 bp, Zea mays
  unsure (1)..(314): unsure at all n locations
  Clone ID: MRT4577_151917C.1
tggacccgctnacccactttgccagnncgcccctaagcggccccgcttcctttttcgctttttcctttccctttccttttttctcgccaacgtttcngccgggctttttcccccggtcaagcctgctaaaatcgggggggcttcccttntaggggttccccgattttaagtgcttttacgggcaccctcgnatccccaataataaccttgattaaggggtggattggtttcacggtaagtggggccattcggcccttgatagaacgggtttttttcgcccttttggacgtttggaagtcccacgtttctttaaa

SEQ ID NO: 56939 - DNA, 363 bp, Zea mays
  Clone ID: MRT4577_151918C.1
cacatgatcattttggggttttttagtttttaatgggagcgcacccgtttaacagggtcttgcttttgctacattacattaggaaataaaactggcaaaaaagggcggggggcgccccccacaacaggggaaagagaacccccccccccccgggggcacaaaaaaagggggcgaaaaactaaaaaaaaaaataacacaccccccccgggggggccaaaaaaggaacaaacccgcttttctatttattatccccccgccgaggcaacaaaaaaaagggttactggggggcccccccaaacaagggaagccccccttcccggacacgaagaccgcacaccaccgctgacgccaggaacccatggg

SEQ ID NO: 56940 - DNA, 245 bp, Zea mays
  Clone ID: MRT4577_151919C.1
ccctattattttttttttgtgctaacaaaaactttggggggttttgttaagaaatgcggaacaatcccaaagattgctatgttgccacaatagctaacatctgaacgcgccggccccagacctcactcaaacgcgaggccggaaccagaacagacgctacgcccacagcagcacggttaaaaagcgggggcccagggataccccatctgcacgctccttagtccaagcgcccacagtccaccaag

SEQ ID NO: 56941 - DNA, 136 bp, Zea mays
  Clone ID: MRT4577_15191C.1
ggtaccggcaaacccgggtcgaacccagtcgtccggttagttttgaggttgctggcatatttgcagccacaggtaaatcatcgattctgataagataccctatcatgccccttcttttggcggctgcgagagcata

SEQ ID NO: 56942 - DNA, 438 bp, Zea mays
  Clone ID: MRT4577_151920C.1
gccactacaactgtgctatagctatgactgcgcgcgcacgcaacctaggctccgaatcgagatgatgcctatacgcagcgcagaaaatcttatgagcgaaacccccatgatatagagcctgcaatgtttcttgctacgtcatatgataaaacatctgaagcatggacaaaacagtcaccaagcaagtcggttctcaaacgggtagctgcttatgctaaaagcagtgcggagcttttaacaaatcttatgcttcatggtccatcaggggaatatacatgggagtgcctgtttcgaacacctatgagcaactatgatgctgttattctcctccatcaagagaagctttgttgcccccaccacgtactttttcctgctgagaaccctgacggtaagctggtggtctggggcaaaccaagtaaagatttcttgccctatatg

SEQ ID NO: 56943 - DNA, 147 bp, Zea mays
  Clone ID: MRT4577_151921C.1
tataggattctttccctgagctcgctaactgcgcttcttcggctcgccggcaaccacggctgctccggtgatatgccgccaaatggcacactatctcacccgtatggaacagatggacatgccatcgctcgacgcaacctcccctcc

SEQ ID NO: 56944 - DNA, 400 bp, Zea mays
  Clone ID: MRT4577_151922C.1
gcagtcaagggcgggagcgacggagtactgtatagtttcatcagcctgaattcttacatgagttgacacaacaaaatataaatcgatcccgatatcgaaaactcgactctacagagctcttgtatgtacggttcccagggttcacaaaatcaagtccgccatatggtctatactacaaccaacgaattcgttcacttgaatagctgcttgtaaggaggtgtaaaggtagcttcaaattactcgcttgaacgggcagatacgggatacaagtcattgaagcatcgcttgatccagaatttctttctccagtgttataacacaggccggccttccttgtttagtggaatcaccatatcttgttcttggcccagaacagtattattacaaccccaatcacaat

SEQ ID NO: 56945 - DNA, 396 bp, Zea mays
  Clone ID: MRT4577_151923C.1
tactactccctgaggtgagtcgtattataccctgcttcacacaaacagtaaggatcagtctcggccttttgctcaggcatccacaggggggattgggaaaacacttgcatgcatccggcggcaataatggcatcggttccggctccggcgacgacgactgccgccctaatcatatgactatgcgtcctcctctcctgtgccgcagcctgagtacctaaagctccccgactacgtcatccagggcctcgtgtactgcgacacctgccgcgccgggttcgtgaccaacgtcaccgactagatcgcgggcgccagcgtgatgctggagtgcatgcacttcggcaccggcaagctcgagcgagccatcgacggcgtcaccgacgcgaccggcacctacac

SEQ ID NO: 56946 - DNA, 1226 bp, Zea mays
  Clone ID: MRT4577_151924C.1
acccacgcgtccgcgtcgagcaaagcagctagctagctagctacagagccagagggatcggaacgttagttgttttgagcagctatctagctagctaggtaagtaatggcacggcgacaacagtggaacaggggcggcctcgcggccgtggcggtgctcgccgtgctgtgcgtgctctgctcgggccacccggtgccgggcgggcacggcagcggcgggttcgtcacgctgcagccgcacttctatgaccacgcgtgcccgcagatgcaggccatcgtgggctccgtcgttgcgaaggcgcacgcggaggacccgcgcatggcggcgtcgctgctgcggatgcacttccacgactgcttcgtgcaggggtgcgacgcctccgtgctgctggacgccgacggcagcggcaggttcgtcaccgagaagcgctccaaccccaacaaggactcgctccgcgggttcgaggtcatcgacgagatcaaggccgcgctggagcacgcctgcccgcgcaccgtctcctgcgccgacatcgtcgccgtcgccgcgagggactccgtcgtcctgaccggcggacccggctgggaggtgccactggggaggagggactcgctgacggccagcctgagcggctcgaacaacctcatccctgctcccaacgactctctccccaccatcatcggcaagttcgccaaccaaggcctcgacatcgtcgacctcgtcgcactttcaggagggcacaccatcggcgactcgcgctgcgtgagcttccggcagcggctgtacgggccgaccaggggctcttcttcgaccacttcgccaagtccatggtcaagatgggcaacatctcgccactcaccgggagcgccggcgagatcaggcacaactgcaggagggtcaaccactagtaattctaaggagggatgcatatatacggcaatccgtgtggtgcacatcctttgatgattttcatatgtggatgcttcgtatttcatgcttggatttaagtgtgcagtagtatttaaatggctggaatttctgctttattttggttggatttaagtgcgcagtagtaaatggtcgcaatttctgttttaatttggctacgttctggagtggatttttcactatgtaattcgtcattcatgtaccaagaaacgattcaataaaattcatatttcgtgtcgttgccgaaaaaaaaaaaaaaaaaaaaaaaaaaaaaaaaatat

SEQ ID NO: 56947 - DNA, 1467 bp, Zea mays
  Clone ID: MRT4577_151925C.1
gccgacgcctcggcgccgagcgaaacagctagctagctcgagcaaggctagtaccatcgtgcgagtgtgagcaagctactgagagaactcggaacgttgcttgacagcttgagtaggtaaataatctatggcgcgccaacagtggagcagcggcggcctcgcggtcgcggtgctggccgtgctgtcgtccgtgctcatctgctcgggccacccggtgccgggcgggctccccctgctgccgcacttctacggccacgcgtgcccgcagatggaggccatcgtggggtccctcgtggcgaaggcgcacgcggaggacccgcgcatggcggcgtccctgctgcggatgcacttccacgactgcttcgtgcagggctgcgacgcctccgtgctgctggacgccgacggcagcggcaggttcgtcaccgagaaacggtccaaccccaacaaggactcgctccgggggttcgaggtcatcgacgagatcaaggccgcgctcgagcacgcctgcccgcacaccgtctcctgcgccgacatcgtcgccgtcgccgccagggactccgtcgtcctgaccggcggacctggctgggaggtgccactggggaggagggactcgctgacggccagcctgagcggctccaacaacctcatccctgctcccaacgactctctccccaccatcatcggcaagttcgccaaccaaggcctcgacatcgtcgacctcgtcgcactttcaggagggcacaccatcggcgactcgcgctgcgtgagcttccggcagcggctgtacgggcagaacaacaacgggcaggtggaccggacgctgaacccggcgtacgcagcggagctgcgggggcggtgcccgcggtcgggcggcgaccagaacctgttcgcgctggacccggcgagccagttccggctcgacaaccagtactaccacaacatcctggccatggacgggctgctcagctccgacgagatcctgctcacgcagagccgccagaccatgggcctcgtccaccgctacgccgccgaccaggggctcttcttcgaccacttcgccaagtccatggtcaagatgggcaacatctcgccactcaccgggagcgccggcgagatcaggcacaactgcaggagggtcaaccacttctagcttccatggagtggccatccgtgcagtggtgttcttgctttggtttcatttctggatgcatgcgtcatctttcatacttggatttaagtgtgcagtagtcgtaaatgattggaatttctgttttagtttggtgcccattcgatctcgagtcgattttcactcatgtaatttgcaaatcttgtacgaagaaatgatccaataaaattcagcatttgtgtcaaaaaaaaaaaaaaaaaaaagacatgaacaagccaaacaactaaaaaaaaaaaaaaaagcatgacaagccaaaaacaaaaaaatattcggggcggccg

SEQ ID NO: 56948 - DNA, 1956 bp, Zea mays
  Clone ID: MRT4577_151926C.1
atggataaaactgtatcattgccttgcagcaacggcgatggtggagtgccagaagaaacagggatggagaaagtactttctgatctgcgtgcgctcaagaagctatacgggctgctccaaaggttttgctcttccagtctacagaggtttagtcattcatttccttgttctatttttgaaatggaattgcccgaagaagcggagacgacggaggagatttcgtctgatctgcaggcgctcacgagactatacatgctgcttcacaagggtgttgctgcagatgaagatttagatgaggcatccagggctctcctgatgaaggtactaggagatgccacccaggacgctgtgcggaggcaggcaaagacggccacaccttcacagtactatcttctggtgaaatgccaacgccaaccaaaattaagatttgtctttctgcagatgttatcaggttctctagtgtccccagcgctagagagagagctctccatgcgatcagactgccggacagggcatgccgatccgcgcctgaggccagtggcgtcacccagtcccagacccagcctcctggccagtgagcgatcgcgccagcttaacctgcaacactctacggtgtcaagccgatccggcctccacgccgacggccttcaccatgcagcggaagagcctgaagagcctacccttgcccttgctcgcctccccttcaatcgctcgtcgagaaccacgttgccggcagcacggcatcgtccaagccaagagcaacggcactccaacctcagcctccactggttctccgtggctggaacgtcgagacatggcacggtgaccggaagtactccgtttgccaaccgccgggacagtatctatcgcagctctggccgtggtgaccagtgggcgctggaaagcagcagcaggcggcgttccgtgtcgcgtgagctgtctctggggcaatcgtcaaggctgcatggccgcgccaccatcccgcggcacgtgggagcggatagctcctcctcggtgcctctcttcgagaggctggactctgggctgtccgtgagcatggcgtcgcttcatggcgtggagcgtgccggacgcggcgtggctacgccggaacgctcttcctcgagcaacacggtggcgaccattcgaagccgcatcagaacaagcagcactcctttcacggagcgctccctgcgccgatcagcagtacaagggaggactccacgttcacgcgggaggcaacaaggcagcgacgacgtttccagcgaggacatgtaccgcagcatgtacagcggtagcagaagctcatcgtgcgccgcctccagaagcccgacgccgccggcgccggcgccggcgccgcgtgcttttgctaacccctactactactcgccgccggtggtgacacggggcgttgctccgccggtgtacgcacctgagcaggtgtcgcgctcaacgaggaggcgtcgtcgacaggaagtcctggacaagcgggtggcgcggctgcggatgctcaaggacaaaatcggcgcggtgttccatcaccgccacgaccatcaccaccaccaccacctcgggggcggccaggaggagggcccctcgtccaggtccaggagcgtcgtccgcggcgcgggccacaactcgccgtggcagttccttacgagcatgttccaccgcgcgatggaagggaaagataagagcacgaggatccgaacggcggtaggcgtgccggcggagaagaggcgcggcggtggcgggaacatgcgcgctctctttgacgcggtccggcggcacctgaagggaaagcggagggcaccggcggcaggcataaagctgaggaggaaggccagcctgagccgggtgcgggccaagaagatgcattggtggcagcggctgaggcggcggcgcggcatggcagggctgacggcgggcagtagaccacggcgccgtttaggacattga

SEQ ID NO: 56949 - DNA, 787 bp, Zea mays
  Clone ID: MRT4577_151927C.1
tcatttcctcctagtcttacccttgcccttggccccaagagcgtcggtgcctggagtgtaagggtctcgtggacgccttctacgtggtgtcagctgtgatggctgagttgtaggagcatcctgcaactgagatggtccaatctcctcctgacctgcggcgccagcgccagtgtcgtcgtccttgtcctcgtcctcgtgggccacgtcctcaaacgtgtcccgcgtcgatcgcgaggagctcagtcctgctgtagatggtccaactgcacaaatgggaggctgaacgtcctgctgcatacgaggcacaggcagctgcacgtcaacgcccgctagagaccggcatccacaccgagccgctgcacgacgaagacgacgtgataccctctggtacgatacgacgtccaagccagccctctgtaggagaggagtgtacctctcatcgtacctcatctcctccagaaaccggtcgtgggtccggacccgcagaacgggcaacacctctccctctgcggtgagacggcccctgtggtgctcatcgtagtgagggtccagcaagtggaactgcgccatcctgagatcgcgtacgagtccagctaacggtggagaaggtcaagtcggaagaacaccttctgagttctgcgcggcggggaacggcgagcgcgacagggaacggcgcgcgcggtcgctgagctcgctgcgcggtggccggagctcggtggccgggacagggcgcgcgcgcggccgggacagggcgtgcgcgcccacgcgtccgcggtcgcgtgtttcg

SEQ ID NO: 56950 - DNA, 1188 bp, Zea mays
  Clone ID: MRT4577_151928C.1
aaaaacatccacagaacatagttcttcatataatgtccacaaacaaagtccaaaatacaagttccccaacacatagtccaaaacacaaaacatagttcatattacaaccgtctccagcataagtccaaatcacacagtccatatcacaaaagtattcatttcctcctagccttacccttgcccttggccccaagagcgtcggtgcctggagtgtaagggtctcgtggacgccttctacgtggtgtcagctgtgatggctgagttgtaggagcatcctgcaactgagacggtccaatctccacctgacctgcggcgccagcgccagcgccatcgtcgtcgtcgtcgtcgtcgtcgtcgtcgtcgtcctgggccacgttctcaaacgtgtcccgcgtcgatcgcgacgagctgagtcctgctgtagatggtccaactgcacaaatgggaggctgaacgtcctgctgcatacgaggcacaggcagctgcacgtcaacgcccgctagagaacggcatccacaccgagccgctgctcgacgaagacgacgtgataccctctccggaagttgtagtttgtgtgcgcctggtcgttctcatagttaagatccccctgttgttcccattcatcaatgtaatcacggtggtgggtctcgaagtccgtgaccttcttctgtctctgtctgtcgaacctgtcgaccagagccgtcaacgccgctgggttgaaagtgggcagcccacggcgaacctggtacgataagacgtccaagccagccctctgtaggagaggagtgtacctctcatcgtacctcatctcctccagaaaccggtcgtgggtccggacccgcagaacgggcaacacctctccctctgcggtgagacggcccctgtggtgctcgtcgtagtgagggtccagcaagtggaactgcgccatcctgagaacgcgtacgagtccagtgtaggtggagaaggtcaagtcggacgaacacctctccgacgtttacgcgacggcgatgcccgcgcgcgcgcggttcgatcgtgaggacccgcggaaatgcatgcgcgtccggcaccggccggcgtcacgtcgcgcgacgacggcgacggatgccaagaagaaaggagagcccgcgagcaagacaaccccctgcaaacattgatgatggtcgtcagcctgatgagatcgccggccgg

SEQ ID NO: 56951 - DNA, 297 bp, Zea mays
  Clone ID: MRT4577_151929C.1
cactgtacattttttcataaaaacaaccccttggacactgacctttggaacatagcggaatacactcacactgatgcaagaactgggtgaagcacctccccaacaaatagagaacctcaaacccactctgtaaggaagctgcggaatgggatagaaccaccctacaggccactcctgttggggcgacaaccggctgacggggcttcagacccctgaccaattttttggacttgggcagaaccacgaatccaggggggtcctcgtaatcgaaaaattgcttgcacgggttcccgatgc

SEQ ID NO: 56952 - DNA, 400 bp, Zea mays
  Clone ID: MRT4577_15192C.1
cacatacaaaatgtgctgaggctgctgttgttggtattgctcacgaggttaaaggtcagggaacatattctctggcgactatggtggatggtgtcacctacactgatgatctaggacaagccccgttacgactgcacgaacacagattggctcgtctgctgctcttgacacgatccattggacacctgcgctcactaagacactaatgtgaaagaccatgccaatactctcaagaaaaatatcatccaggcaactaaattatctaggctacacgagcacgctatgtgaccccggtgctgtggaccagatgattgcgctcactgacaggtactgtatcggctctaggtcaggtggatcatacatgatcactgtcatgactatacttatacaaaagctagct

SEQ ID NO: 56953 - DNA, 591 bp, Zea mays
  Clone ID: MRT4577_151930C.1
tttccctcagcttcctatctttctcccctaactctactgcattccccgtctacgtagtctccactatgatcatctcctcctctgccttgccgcaagatcgatgatcgaaaatcaactgtgcttctcgaagtgatcgaagagagactcgtgcgacaggtaagtcctgcacactgatgatgttcgagctcgacgtctccaacgacctattcatcagcacaaatgacatgacctacatggtcaagtaccattctactgcacggacaacgaacagcacagagacatccttctctgagaatcatacaatgttctctctctcagaggattcttctaccgcctttggcatcaagtaccccgtctacatcccgtgggacgtctgtgtagatgattatgatgagtagtgcactgcagtcatcactgacgaggtactgggttgatgaacatcctgaacgatggtgtctagaacgccggtatctctgcgcccagcgaacatggaccgatgtgtgatgaagtggcgcatgaggacgactccacctgcgatgatatgttgtttccatggctacactgcagcacttgatggcttgatcgccttgc

SEQ ID NO: 56954 - DNA, 340 bp, Zea mays
  Clone ID: MRT4577_151931C.1
gtaagctcggaattcggctcgagcgactctccacgcaacctttaaccttttattacttcttgcctacccctcaataccgccaagatgggtttggtggtttcgaaattgctcgaccgactatggggtaagaaggagatgcgtattctgatggtcggtctcgatgctgccggaaagaccaccattctttataagttgaagctcggtgaaatcgtcaccacgattcctacgatcggattcaacgttgagactgtcgaatacaagaacatccaatttaccgtgtgggatgtcggtggtcagacaagatccgtcctttgtggcgacactattccagaaacaccca

SEQ ID NO: 56955 - DNA, 285 bp, Zea mays
  Clone ID: MRT4577_151932C.1
ggaaaaaacaaagctttgggggttctggtcctttattacaaacactgttttggggaacatttaggggcgggctacaccaatagagcagggggtttgaacaacaaaaaacgtgggtgggggcaaatagtaccagtagtccattgatcttggttccggggaaacaacaaaattggccgggaccctaaccccgttaagcgcttaacgtttttggcccaaattatgtgcccgtaccgcatgggggggaaaaccggggttcccccgggttttgggccaaggggcttgaaa

SEQ ID NO: 56956 - DNA, 1911 bp, Zea mays
  Clone ID: MRT4577_151933C.1
gccggccgcgggcgagcactcaccccagtatcccactctctcgcacttaaccgcctgctctctctgtctgacgcgccggcgccgccctcgcgatcgatgatggcagctgcggcgtggttgtgtggactcctctcgctcctggccctcgccggcgctgcgtcggctgcggatggggcggagggtgagtgggagccgctgatacggatgccgacggcgaaggggagtgacgctgcttctgctccggctgctgaggatgatgaagtggggacgaggtgggccgtgctcgtcgccggatccttcggttatgggaactaccggcaccaggccgatgtgtgccatgcgtaccagatactgcagaagggaggagtgaagaaggagaacattgtggtgttcatgtatgatgatattgcccacaacattctgaaccctaggcctggagttatcattaaccatcctaaaggagcaaatgtttatgatggtgttccaaaggattacacaggtgatcaggtcactactgaaaacttctttgctgtcctcttgggcaatagaagtgctaccactggagggagtaagaaggtgatagacagcaaacctaatgaccacatcttcatctattactcagatcatgggggtcctggagttcttggtatgccgaacctgccatatctgtatgctggtgacttcatcaaggtcttgaaaaagaagcatgcttccaatagctactcaaaaatggttatatatgttgaagcatgtgaaagtggcagtatctttgaggggttaatgcctgaagatctaaatatttatgtcacaacagcctcaaatccagttgaaaatagttggggaacttactgccctgggatggaaccatcaccccctcctgagtacattacctgtttaggtgatttgtacagtgtttcttggatggaagacagtgaaacccacaatctaaagaaggaaaccatcaaggatcagtatgaagtggtgaaaacaagaacctcaaactcaaataagtacaaagagggttctcatgttatggagtatggtgataagaccttcaaggatgagaagctttccttttatcaaggttttgatcctgctaatgccaacattgcaaacatgctgctttggccaggcccaaagggtgcagtcaatcaaagagatgctgatcttctcttcatgtggaagaggtacgagcagttaaatggggggaccgaagagaagctgagggctctcatagagattaaagaaactgttcagcacaggaagcatcttgacagcagtatcgatttcgttgggaggctcgtcttcggatttgagaaagggccttcgatgcttgaggctgttagaacctctggtcaaccattagtcgatgactgggactgtttgaagaggatggtgcggattttcgagtcccagtgtggttcacttactcagtacggcatgaagtacatgagagcgtttgcaaacatctgcaacagtggtatatctgagatgaaaatgagggagtcgagcatcagcgcttgcagcagctacaactcggcgaggtggagcccgatggctcggggacacagtgcttgatggtaaagatcaaatagcaaagcccccccgaggtctgctgccccatgtccctgtgagcgagctcgtatcatcttgggactgtggacccatcgtcggttgtacatatcatgcacttatgctcgtgcctatgtaaagtagtaataccaactcaactctgatctccatccaaataccgaaatgattaaaagatcaggtgtgaatgctgttgcgatgggtgatcgcaagtagggcataatcagtggaccgaaaatgatgacccaaatcaaggtagtgcttctctgatcgatagcccaaatctattgctaacaaaaaaaaaaaaaaaaaaaaaaaaaa

SEQ ID NO: 56957 - DNA, 189 bp, Zea mays
  Clone ID: MRT4577_151934C.1
gaaaacacggagaacacgatttttttcccacatttataaataaaaatactactcgactgattcagattcaagccgacgcaccgtgaacagaaaaataaatgtgagatagctatttggccctggcacacaccaaattcagaagagtgcggaagaacctgtgggggtacacgggcggctcctctgcgagtg

SEQ ID NO: 56958 - DNA, 571 bp, Zea mays
  Clone ID: MRT4577_151935C.1
cattgggtacctcgaggccggccgggatccccgctccctacagccagcgaccgcgcatgtagcgtggagacagagagcatctccacagagtcctccagagcctccgggatccacttcgaggacaccggactctggctcgcctgccgcctcccggactccggggcttccgccgggccctccctgccactcgtctcatgctccccaggctccgactgcccccaggagacagggagcctaacgacaccaacctttacgcggggaacaactcggcggtgcaccgctccctacgctgagtaggattgtaaaggcgatctctggcctcgaggagagcaacgggtcgagctcaccggaataagcaatcacccaaggggaagcatgcaggaaagctccccaccaacttccggaggccgctcactgtgcagctgatcaggctcgctggcgcctccaagctgacgacggtgaagaactcctgctcggtgccgtccaccaacagcacgtctaacgctgccacagtccagagcatccacggccgcgacaaaaacctggcgctcgccgaaagcgaaggccaaga

SEQ ID NO: 56959 - DNA, 1845 bp, Zea mays
  unsure (1)..(1845): unsure at all n locations
  Clone ID: MRT4577_151936C.1
ccggccgagcacttcgcactcttctccccctcttctcttctcgtagacggcagatctcaggggtgtcgccgtctccggccacggcggccggcgctcggagcatcggtggggttcggtgcggaggtgggcggccgtgtacaagaaccagctgcaggagctggcgcagcggagctgcttcaacctgccgtcttacacgtgcctgcgggaggggcccgaccatgcgccgcggttcaaggcggcggtgaacttcaacggggagcagttcgagagccccggcttcttcagcacgctccgccaggctgagcacgccgccgcggaggtcgcgctcgccgcgctcgcgcggcgcggcccgtcctactcgctcgccgcccgcatcctggatgaaacaggggtttataagaaccttctacaggaggtagctcaaagagttggggcgccgttgccattgtatacaacagagcgatctggcgttggccacctgccggttttcacatgcactgttgagctagctggtatcacatttacagtggtacgcgaggaagtgaattcatccaatgagacagaaaacattgatgagcaggagcagatcaggatcgcccgagccctcctcaattatcgcttgaaggagaagatggcgatggccaactgtcctcatgtttcaccattccccaagaaatttcccatgcagcaagagcggaagccttgtttcggtcaatcttctcaatccagccactcgaagattctccctttattccgccctaaacctaattcaagaccaaagtcaccagcatctactgacggtgtgtcgaaaacgcctgggcggacccccgttgacagcctagatcaaagtgccagatcaagatttccagctgcagaggcagctccctatgtgccagttgggcactaccgccgtataccttgccataacatggctccttccgtcacaattaggaccgctgttcctgtcttctctgctccaccactcccacctccccctgcacgcctgcagcagctccctccactcatgagccacccaccgcccattcggatggcatccccagtccgcatgaggccagcgccagcctctccaatgtttgcctcctcatctccagttcaagtgccgaaacctgtgatgcctgttcagctgaaggatgtgcaagatcactcaaggaaggaagcagttccacctgtgatccctgttcaggtgaaggatgcgcagtgccgaccaaggaagagctcgatgtctcccgtgattcctgtgccagtaaaggacgcacagcgccggcctgccgcaatcccagtgcagatgaaggacgtgcaaacccaagccccaaaggaaccgctggcagctccaattccagcagccaggccttcagttaagaccgacacgcctgctcaagtcaaggaagcttcagctggtgctaccagcgaggcgccatcgtctgctactggcaatgacgccgctgtggaatgcagtgcatcatcggaaagtggcttggcaaggcaatcaggggctgcggatggggacacgctggtactaatgcggaagctaagcatgaggcccgaggctcaagcagcggcagaggcagaggcagaggcagccaccaccatgcggttggagaccaattgacttgatataaaaaaaaatgcgcgccgccatcttctcccagattttgtaattatagccgcctcccgtgcacatccccattctgttttacttcttgtatgccttgngtttcggatttagggctgtctgggcaagctgcattgtggttggtaggaaagaacacctaattttttttttttggtctgttgngaagagagagagagaaaaaaaaacatgat

SEQ ID NO: 56960 - DNA, 421 bp, Zea mays
  Clone ID: MRT4577_151937C.1
gtatggttgaacaaagcaaagggggcatcaggtttcatacataacggggaacggggaccctggggaaaaaaaggaaggaaggggggcctgggagaagcaacggaaaaaagggctcaataaggtttagcaggccaaaaaaaaacagaaaggggggcacagaacaaaggagagggggggcagagcaaggggccaaggacaagggggaacacgcaaaaaaaaagagcacaaggggggaacagggaaccagagctaaaaaaaaggagggggaaaaaagagccatcatctgccgaagacccaaaaaaaaaaaagcaacaggcaccaaccggccggaggaaggagaaataaaaaaaaacatccaggaaaaaccataaatccttggggcaaaagcccaaaatcaaaccggacgcggggggggacccca

SEQ ID NO: 56961 - DNA, 656 bp, Zea mays
  Clone ID: MRT4577_151938C.1
gggaccctcgaggccggccgctcataagaatcctaatccttgagccgccgtcctcctcctgccccagtgctcgagctcatcgcgtactgccagagagcgccgcaacgccaccatgaatctcaacatcgccaacccttccaccgagcgcccaaaaaaagtggacatccatgacgccaagaagctgcgtgccttttatgaccgaaggatatcccaggaggtcagtggtgatgctctgggagcggtgtgcacgggttatgccattcaacatcatcggtggatgagacaagcaacgcttcccaatgatacaaggtagtttacacttctggtcgtgttcctcttctgctcaataggggaactcatctgtcttcctgtgactatcggcaggcggaatggccatggcacgaggaagtccgtccgtgggtgcatctggagccaagacctatctgttatcaacttggagattgcgaacaagggtgagaatgatctgcctggtctgactgacactgagaacccaatgatgaggggacccaagagggcctccaagatcagaaagctgttcaaccttaacaaggatgatgatggacgcaagtacgtgaacaccataccgcaggacattcactaccaagagcggcaagaaggtccgcaaggcacctaaa

SEQ ID NO: 56962 - DNA, 188 bp, Zea mays
  Clone ID: MRT4577_151939C.1
actcggggggactaccattgaggggggtctgctacgagggcggagtcgtgctgggcgccgattccagggccgcactggaatgtatgtactcaaccgtgcttaagacaagattactcaagtgacagacaatgcgtatgtctggagctctggatctgctgctgatacacaagacaattcttgattatgag

SEQ ID NO: 56963 - DNA, 546 bp, Zea mays
  Clone ID: MRT4577_15193C.1
tgtacaagctttttttttttttttttttttttttttttttatttttttttttttttttttttttttttttttttttttttttttttttttttttttttttttttttttttttttttttcccccccgggcggccctttaaaaggggggattccaaaaaattgggggccgttttttttggtttcggcgttggcacccaatttggggttttctttggaaaaattttttcccgtggaaaattttttctcctttccaattccacccaaaataagaacccggagcttaaagtgtaaaagcggggggccccaattagtgggctaacccacattaattggttttccctcaatgaacctttttcccgcgggaaacctttggtcccccctttttttaaaaaaaggcccacccccggggagaggggttttggtttttgggcccttttcccctttcttgtttaatgacttgttgggggggggcgttttttttcccccaaggggttttattctcttaaagggggaaatacgggtttcccccaaaataggggttttcccc

SEQ ID NO: 56964 - DNA, 634 bp, Zea mays
  unsure (1)..(634): unsure at all n locations
  Clone ID: MRT4577_151940C.1
agcagtggtaacaacgcagagtacttttttttttttttttttttttttttggggggattgtcgcagaacttatactactagtgaagtgcgcgtgccctgcgcgcgtgtagtgtaggctcatggagatccaaccacacaactaatataactatataaatttacatatataataagtgtaccaacctacatactgcatagtttctgttaccatttagttagttttgaatagagtacagaaggacctgttttattttttttaaaaccactatttactgacatacatatttgcatttttttataagtataagtagtagatttattttcaatcacttagagaaaagggaaaaatactgtgttttatctttttatctgagggggcgttgcgttcggtggcacacataggtttgtagatcgttattttgttggtcaccacttgttgatcatcccaatgatgtggggctcattctttcttttgntattatattggttggncggtgaaacgagaggactttgcatttgtttttctgttgcttcgtacataaaggtatataagattatgtactccatctataccaaaaatagaagtcgtttataaccatttaggccgcgtttcgtttgtgcaggattaaaatta

SEQ ID NO: 56965 - DNA, 373 bp, Zea mays
  Clone ID: MRT4577_151941C.1
cttctcctccttcctgcagggtacttactaaagagcagcagcgcaagaggtgggtagagcgagcgataagaacgcaataggcgcggaagaccttcctgttcacctcgttagtgctggagctaggggcacccggactagctgtgcgaccaagtgtctggcgcggggctgtacggctgcctggcgccagaccccgacaggaaggtggactgggagacctgcaccaagacgaacctggtgatgcggttcggcgagatcaccacccaggccactgtggactacaagaagatcgtgtgagacacctgcgctgagatcgggttcacctccgacgacatggggctcgacacccgcccctactaggtgctggggaatatcg

SEQ ID NO: 56966 - DNA, 284 bp, Zea mays
  Clone ID: MRT4577_151942C.1
acttgccactacccctttacgctaccttacgcatcgtatccttggggactaaaggagtggtgcgttcaagattcagaggagctttgctaaagtatgttgcctaacttatagcctcatttggatctacagagtgtgggattcattcctgacatatgctccatgtatggatgaatagctggtattaagttcctcaacattttggggggggacaccttaaccctctgcatttatgatgcaatagttttgaatattttcttaactttgcaacttgacgatattgagaa

SEQ ID NO: 56967 - DNA, 629 bp, Zea mays
  Clone ID: MRT4577_151943C.1
cctagcaatgggggtagcgatgctcgctgtcaaactatcgcagatacgagccagaggctgaatgcgcagtcccccttacgatcgcagacactccagggacctcatgcctacttagaccatggctggtacggaagaatacgcactgttatagcgaagcaaccctagactcatgactactctagacttcacgtactacctacctacctactatttggatttggaccatagactgccgctcctatgaaagcaggactctatccactgacttaatttggcatattatcaccacatctcactccccattactgtcgatcgattatagattgaattctttgtataagcaccaccgctccgttattggctagtgcatggtatagaggagacggatcagggggctctcctctgaggttacagaatattcatcttgtcctgacattgtctatatgtccagagatctcgtgcaggggctactagctcacgtcagcagatcaactcgtttcacgcgcgccaatgcttttcaagggaactttctatgctgcgaacataattgaccttgctgcataatcagtgtcgtacttcatggattcggacgaatagatgaacagtagcctgacaatgacaaacagctg

SEQ ID NO: 56968 - DNA, 612 bp, Zea mays
  unsure (1)..(612): unsure at all n locations
  Clone ID: MRT4577_151944C.1
cggtaacagcctcccgggtcgcccagcgttcgccccgcgtccgnaaaaaaaaaaaaaaaaaaaaaaaaaaaaaaaaaaaaaaaaaaaaaaaaaaaaaaaaaaaaaaaaaaaaaaaaaaaaaaaaaaaaaaaaaaaaaaaaaaaaaaaaaaaaaaaaaaaaaaaaaaaaaaaaaaagggggggctttttttttttttaaacccccccttttctcccacgtttgcgcccacgttttcaagaagtaccccggggaattcttttccctaaaaaaggaattggggtagtttaagtggggggcccctttgaggggggttttttttttaaggcctgaacaaaacttttttttttggggccgaattcggggttttaaccctttgccccctaataccagaaaaattttgagttttttgggtttgggggaaattttcaatggggggtttttaaaagcaaaaagggggatttttaaattttttcgcggggttgaccctttttttgcttttgggtccccaaatttccaaaagtgtctgggatttttttttcaaatggggtttttgaattttgaacaatcgggggtttctttttttaaaaaacaaattttttggggggggtttgg

SEQ ID NO: 56969 - DNA, 144 bp, Zea mays
  Clone ID: MRT4577_151945C.1
tcggttgcatggaatcaagagaatgcgcacacggtatatactacggcgacgatgattacgatgtgactacgtccactgtttctgactcttctaccatcctcatgtactttgacaaccccaaccagttggtctcgaccagaacca

SEQ ID NO: 56970 - DNA, 132 bp, Zea mays
  Clone ID: MRT4577_151946C.1
ggtgcccaaatgcctcgtatctattgctgacgtcgcatgatggcttaacgaggattcgaactgtgcctgtgtactattcagcggaacgacagtgaagggaacgggcttggacggaatcagcgggtgaaagaa

SEQ ID NO: 56971 - DNA, 201 bp, Zea mays
  Clone ID: MRT4577_151947C.1
gcggatccgtgcctgcacaccgcatagggagtgctggactgccctgctcttttggggcagccgggcgccgatgaggatactgctcgcacgcacacagagcagacagccggttcgagatcggagacgcggagaggggaaaggctagacgtcgacctggcactgcggctctcctacgtctcctgtggggccggcttacctagc

SEQ ID NO: 56972 - DNA, 357 bp, Zea mays
  Clone ID: MRT4577_151948C.1
gcatttctagattcaaaaaacaaaaaacaaaactaaaaaaaaattaaaaaaaaaatttttttttttgttcctgttcctgtcgtgtctttttaaagggtgattttttcagatttccctctcacttggtttttttctagcattcttctgggggggggggggggccctattttccttcttttggcccttctttggccgggggtgtcggcgtccctgtttggggaacccctttctttcccccccttacttggcttgcctctcttccccctttcgtcggcgggcttccttccgttcaggccttctcccctttgctttcccggggtttgtcccccctggttggcttttggcctcgccctgtcc

SEQ ID NO: 56973 - DNA, 705 bp, Zea mays
  Clone ID: MRT4577_151949C.1
agagtagggttccacttccggcaccgagatctccgctcgccgccgccactccctccgtctttcagtccatccctcctcaaggtcagcgcctccccggacggccgtactcccgcggccttttcctcgattcacccggggccggggttcttcaggttcagggatcattttaaccttcacttctctgagtagatttggctacaaacaaggcacgcaatctgtagactgtcattcggccacaatgtctgtagatttggcccacaaaatagtttcgactctcagaagatctgaaagatgcaagaacacccgtgtaatatacaatgatgattctgaagaagattccgagactgagataatttattctgaagaagttgcctctccttcaccctcagaaattaatgttgcttctgttgatgataactccggtgaacaagattctcgcagtgtgtctcgtaaggatcgaagaactcggtctaaagttaagaataagaaggccccaaaaactatttctcaaggatctggcactaaggatcagtctcagtgtgggggtcttggggttgaaagatcgaatgaggaagttgatcttgatgagcctcttattgctttgaaacagaagaaagaaaagatacccccttctaaggcaaaaagaaagaccggtgcatcatcttctccacatgctacaaaactagatacatcaacaaagagaga

SEQ ID NO: 56974 - DNA, 201 bp, Zea mays
  Clone ID: MRT4577_15194C.1
gcggaggatccagcaacggcggctcggccaggaaccacgcgcggcgcgacgtcgacgtcccgacgaggaagaagaagagcggcgggggcggaggagggttcttccctcagatcgtcctctcgctcggcaacaggcggaagggcgcgccccatagggcgccgctcgcgtaacggacctgcatgcacagatgtcggacggact

SEQ ID NO: 56975 - DNA, 293 bp, Zea mays
  Clone ID: MRT4577_151950C.1
tcagacggcggccgcaccggccaatgaaggggtggttaaaatgcagacgcgtgtctttaaccagcatataactttgctgaacgccgtcacgcacgacaagaaaaagagctacacttggatggcagtgcagccgacacaacagcaaagaagctcacctaggggcaacaaaaaagtggctgaaaacagcccagatggacatcacgcacagatgaaaccaggacctaaacaccttccttcggaagctcaacagcgcaagcgggctgcaagaccgcccaaaggaaagcactcgcgct

SEQ ID NO: 56976 - DNA, 535 bp, Zea mays
  Clone ID: MRT4577_151951C.1
ggggggggggtttttttttttttttttttttgggttttttttttttttcttattaagacgcataaaatacagatcgatggggctaatcacaatcggccatcaccatacttaaaactaacttaactagttttctaagccattttatggggggaacgtccggggtttttttttttaatacaatatttaatcgttcgcgctagcaggtgtgccttacacctatattttaccacacctcgcgactatttcataattacgaacatcacaacatacgtatgctaaattaataaaaatggtcgcgtaacagcacaccgacacaacaaccgagctggccataatcactaagcgtgcctatgctaaaaaaaaaggatcgtcacaacctccatatctattaatccatccactaaaacaaaataatagcgggagcgaatcaaagtatgattaccatattgaccataacttcgcgcaaacagcaacgattcttgcataaaactttttccgagcacccggcaagcaccacacggaatttattgcttta

SEQ ID NO: 56977 - DNA, 1215 bp, Zea mays
  Clone ID: MRT4577_151952C.1
ccacgcgtccgcccacgcgtccgctttgttaaaggactggaactcttgatacttttggttgtatatctagtctatggaagttcctatcgcagctcaaacatatacctatttgtcacctgctccatatggttccttgttgcttcatggctcttcgcgccatttatcttcaatccatcatgctttgaatggcagaagactgttgaggactggacagattggaggaagtggatggataacagagggggaattggcatgtctgtggaacaaagctgggaagcctggtgggtaactgagcaagatcacctcaggaagactagcatccgagcttttgtgttggaaatcatcctttcacttcgatttttgatctaccagtatggcattgtctaccatctgaacatagcagatcaccacaaaagcattatggtatatggagtatcatgggtggttatgctccttgttcttgtagtgctgaagatggtttcaatagggcggcagaaatttggaacagacctacagcttatgttccgcattctcaagggccttctcttccttggttttgtctctgtgatggcagtcctatttgtcgtcttacaccttactatttctgatgtcttcgctagtatccttggatacttgcctactggatggtgtcttcttctgattggacaagcatgctcaccattgattaggaggaccctgctgtgggactccatcatggagctcggaaggtcatacgagaatataatgggtctcgtcctcttcctgccaattggtttcctgtcgtggttccccttcgtctctgaattccagacacggctactgtttaaccaggcatttagccggggcctccagatctcaaggatccttgctggtcagaaggatgttagcgagttcgagttcaagtgaccaattttatccctcttgcaagcaaaccaaactcactttcatgtatttgttgacgatgatcgattttgggtgtctgtactctagtatattttcatcacgtttactactataatactgtctgtacttgagaatgttttgcctctgtaaactgacatgtagaatttctgtaatatatttatggaatttgataacttccctcaaaaaaaaaaaaaaaaaaaaaaaaaaaaaaaaaaaaaaaaaaaaaaaaaaaaaaaaaaaaaaaaaaaaaaaaacttttttttatcaaaaaaataaactaattatatagtg

SEQ ID NO: 56978 - DNA, 620 bp, Zea mays
  Clone ID: MRT4577_151953C.1
ctaaggttttttttttttttttttacttatatggatcccttattcatattcatcaaacccactctggttatcaatgtataatatacatattttatacaatctcaaactatagggccagaagccatattgcccttctcagaatgctaatagcacgcccaaagaatcaaggaaggctccaccttttcttgccactatgtagcacaacctctaaatctctaaccctttgctttgggccttcttttccaacatgaaggtctatcaatacacattcacagacacacacatgtacatgaagtactatgagatggcaccttaccatcgatggtactccagatgtgataacttgagggccaagaacccattcgctatcctttcaaaacactgatggcatacccaatacctatcctcccaactgcgtccacaatatacagcagccaaagaacacaagaaatgctcttttcctctcccactacctctaatcaagcaatccttaagttctcgtatacactcaacttaaacaagctatcaagaacagcaattggggcagcgtaccaagccgttttcgttgcactccaggcagcggcgggctcgcccctcttcctccacgaacaccttgcggg

SEQ ID NO: 56979 - DNA, 422 bp, Zea mays
  unsure (1)..(422): unsure at all n locations
  Clone ID: MRT4577_151954C.1
cggaacacccgggactacccacgcggcctaaccacccccggcgcaaacccccccacggccggctcaaaaaaagattaccgccgcgaccacacaaancacctncaacaccggcaccagatagcccaccaccgcccactgagaaaaaaccaacaccacccaccccagacaacacaccgccaccaccagaaaaaagacccaccacacaagccccaaaggatacaacaccgacccccaagaaaacccccacaccaaccgcacccgacaaccacgccgacaccgccagaaaaaacaccccccccaccggcccccgtgactccaccaacaccccccgaaaaaaagccgccgacacccgaaccaggcagcaaaaccccccccccaaaaaccgcgagaacaccacccccaaaggccaaaaccccaacccc

SEQ ID NO: 56980 - DNA, 886 bp, Zea mays
  Clone ID: MRT4577_151955C.1
ttgggtacctcgaggccggccgggaactgggtttgctcaggacaataaaagctaggcttgctgccccagattctcgttgcacacgcccacactcgtttcttttttggctgacatacctactgctccagcatccacgctcgctaattgctacttatccatactaatttacgccacacgcaaccacacgacacaatgaagtactctaccgtcctcctcttcgccattggcgcttcggcccagagcatcaccagcacctccggatcctccgcgcccatgcctaccgggctctcatccgctgtccagtgtgctatggcttgcaatgcaggcgacgtcaactgccaggccgcatgcttgggcaacgctcgccccaacgcttcccaggtcatcgagaccaacgagtgcgccgccaagtgcgaccagggcgatggctctcctgcggccactgaagcctactccaagtgtgtcgacacttgcatcaccaaccacttccccagcagccagaccgcattcgtcgacagccctgcgggtgctggtgccgctgctcccagcgccgctccttccagcggtgctgctgctggtaccggtgccaactctgctaagcccactgctaccggagaaccccagtccccatctggctctggctctccttctggctctcactctggatctgctggcgcgccttcgtctactgctgcggctggcgcagccgacaagacctctgtccaattcttcggtgctggtcttgccggtctcctcgctgttttcgctttgtaaacggggtcacgcgctacgctttgcaattggccggatgtttctcaaacgcatggacgatcaaggtgatcagggcgatcactagggtcgaggtttatacgagcatagtcatttt

SEQ ID NO: 56981 - DNA, 531 bp, Zea mays
  Clone ID: MRT4577_151956C.1
cgttttgcgcggttggagactccaccttttgcgctagcgacatgacctgaaagcggcgttacggggcgccgaatctgcatagccccggaaggcgtcaaacatgtctaccgcgctccatgggccgagcgctggcacaaggacaaggttatcacgaagtaacacgggtgggacatggcgctacacgaagcataggacgctcgatcaaggatgaacgtatgatcggatagagctccttccgagactgaaatgctacgtgtaccagtgttctatccgtcctgctgcggtcacgttccacgctcaaggatcatcgaataaggatacgaccgcgaggcggcggaaagacttcaggagatctacaggcatatgcctggtggtggacaaggaggctcccgcctagtaccagaagctgctgcaccaggtccgacacaaggaggtgatcgacattatgatccagcactaccacagcgttatcgcttccgaccactcgggctgcgaattgaagaatatgggtgtgcgaagctgctatatcag

SEQ ID NO: 56982 - DNA, 290 bp, Zea mays
  unsure (1)..(290): unsure at all n locations
  Clone ID: MRT4577_151957C.1
tttggtattgttttagcgattgagagaataccattctctgcacttctatacatacagatcacttggatgaatcatgtcccacagtctgtttggtttttttgcttttttatgcttcaaatattcgagcttcttgttgggggggggtcaggatattgggttgtcaccaagagctatttaagttttaatattgcccccatcatcggtgatgttcaaagtccttatcgtntttcctagcattcccttgcccccttccctctttgggggttcaggtcggtgctctgctgtcccct

SEQ ID NO: 56983 - DNA, 317 bp, Zea mays
  Clone ID: MRT4577_151958C.1
ctcttgtcttttcaacttccaccaaaaatgcgtcatctaactaaatgacagggtggtggcgcaccaactcattttaactattttcaccattctcctatactatgaaaatacaactttcacctccaaatactttctacctaccgtgtgcctcataccatttagaaattacttatgaagtacctcatgaaaaccttatttcacaatcacaaatctttctcaaccaaatggttcttcataactggaaagatctcttagcaacatttgaaacatctcatgacctactccctcatgctgaacaccttcaaattctgaacata

SEQ ID NO: 56984 - DNA, 327 bp, Zea mays
  Clone ID: MRT4577_151959C.1
catgctctacaactactgcggcgggggctttttttttttttgggccttccgcccgagaaaaaaaacccctttttttcttttcccgccaattaaaacaccctgggtgtcctccgctgcccacacactccttgttagtttcaactttctggacatcatacatctctatacgcatcaagcttgttccgttattggtaaattgagatcacaatactacaaaccgtcaaggcgtttgttggcacgggaccccatcactcgtacaaaaaccttgcttgtaaagaaaataaaggtgtgtttttcctcggcgggggggccctggggaaccccccc

SEQ ID NO: 56985 - DNA, 247 bp, Zea mays
  Clone ID: MRT4577_15195C.1
cccacgcgtccgggcaagatcggctgcagctcagagtggaaccccaagatgagaggaacctcgcttattggcccaaacaccctgattctttcagatgggaatgcggatgaagaatttctcctccttgatgtaacattgtgtttgtttgttatatttacttcctgggtattatgtttaattgttacttttcatgatcgaatggaattgaaatttatggtctaaaaaaaaaaaaaaaaaaaaaccataa

SEQ ID NO: 56986 - DNA, 819 bp, Zea mays
  unsure (1)..(819): unsure at all n locations
  Clone ID: MRT4577_151960C.1
aggtcgagagaaagagaggccctgaaccggaagcaaggaagaggcgagcgacgacgaggaggaggaggaggttgttggtgggctgttgagaggaagcttctggaagccgccatgggggactcgagcgggtcggtgtccatcgacgtggagcggatctacttcggcggcaaggagcatcctgtgagaacaagatacggccctgtatcggtctccgtgtacggcgacgaagacaagccagcgctcataacgtacccggatgtagctctaaattacatgtcctgcttccaaggattgttcttctgcccagaggctgcgtccctgttgcttcacagtttttgtatttaccatattactccgcaaggccatgagttgggagcagctccaattccatcggatgtacctgagctatctgttgataatctcgcggatcaggtcgcggatgttcttgatttcttcggtttagggtctgtgatgtgcatgggtgtcaccgccggtgcctacgtgcttaccctctttgcagcaaagtacagggaaagggttcttggcctgatgttggtttcacctctatgcaaagccccatcttggagtgagtggttgtataacaaggtattgttaaacttactttattattgtggcactagtggactagtgaacgaatgcttccttcagcggtattttagcacggaaggttcgtggaagtggacaagaacctgaatcggaaattgtccagccttgtagaagnttacttgatcagaggcagggtgttaatgtatgtcgattcccttaagcaatcaacgaaagacatggacttgactgaag

SEQ ID NO: 56987 - DNA, 410 bp, Zea mays
  Clone ID: MRT4577_151961C.1
cgagcaaggagttatagaggatgatgaccactcaccaccgtaagatcgatatgatccgtcccaaggaatttattcctgccctttttgttatcgcgcgttgttttattaccacgcaccagtcaatagtgtggaggcaatatacattgattccccttgactggacaatacaaagataaccttatgtatttcaaaaaaaaaaaaaaaaaaaaccaaaaaaaaaaaaaaaaaaaaaaaaaaaaaaaaaaaaaaaaaaaaaaaaaaaaaaaaaaaaaaaaaaaaaaaaaaaaaaaaaaaaaaaaaaaaaaaaaaaaaaaaggggggggcctttttaggggaccaaagtttagtccccggggttggcaagttataaatttttttttggggcccccaaattcaatttaagtgcccgg

SEQ ID NO: 56988 - DNA, 483 bp, Zea mays
  Clone ID: MRT4577_151962C.1
gtaaagagaggacacttgatcctgaagtcatgattgatggctggttcacactggagatatggtggagtagcctcatcatatcagattcttaacttgctagtataaagaatgatgtgctcatgcttctacagatttattcttcagagtgtttatctacaagggtggatagtattcttgactatctcatttctatatccgtatactggaacaactactaatcttgtcttgtcgcctgtgcctacccgaagcatgctgctcttgagctctacgatgtacaatacatcgtctcctttagctgccatcagatgtagtaccatccacgatccataaaacatatgatgcatggattctccatgatccacacctatagcttacttaacactgtgacagctatagaggctgtccatctagactgtctgacctttgcactatagcgccaagttattagtaagatgacgcgatcatactgactgacacctgaaa

SEQ ID NO: 56989 - DNA, 328 bp, Zea mays
  Clone ID: MRT4577_151963C.1
gctcaggctgcacgactacccgagctgatcgaagaatctccaggatccgagcacattgaccaggctatcaaggacgccatggtttctttcaaacatgagaagtctgaccccgtggttgcctacgtcagtaaaatggtttctattcctgagagtgaacttcccgagaacaagagacgtgccggaacccagatgagtggcgaagaggctcgagagctcgcacgcaagaagcgagctgaagccgctcgagcccaggctgcggctggcgagaacggtattgacagcatggcggactcgatggatgccatcaaccttgatgattacgcccctg

SEQ ID NO: 56990 - DNA, 831 bp, Zea mays
  Clone ID: MRT4577_151964C.1
ggcatcggcctgccgcgccctccgcgcggctgtgactgctgtcaccgcgcgccgcgccggcgacgccgcacgtggcctagagccgctccccatcccgttccgcaactacgtcgattccaagccctatgcctacttcctgtatacccccttctccctcacccggctggctcccggcgcctccgcccccagcgcccagccgtggggtgccgcctggacccggccgccccgccccacctggccccgccccaacctcgacggcttaccatcagccgtgtacgggtgcgcgtgcgcggcggcggaatgcggtggtacccagtgcgcgtgcgccgatgtggaggccgatgcagcgggctcgggcttggaggccgggatggggagcctcacggagtgcggtgatgtctgcgcgtgtgcgccgtcatgtgggaaccggcggactcagcgcggcgttgctgtgcggctgtgcgtcgtgcgccacctgcacaaggggtgggggctgcacgctgcggaggccctcagctgcgggcagtttgtgtgcgagtacgccggggagtttttgacaactgaagaagcgcggagacggcacaaggtgtatgatgaacttgcctctggtggcaagctctgtcccgcgctgattgtcataagagagcacctcccttctggtaaagcatgcttaagagtcaacattgatgcaaccagagtgggaaatgtggctcgctttatcaaccattcatgtgatggaggcaacctgcacccagtgctggtgaggagctctggtttgttgctcccaaggctctgcttctttgctgccagggatatcgtggagggagaaga

SEQ ID NO: 56991 - DNA, 789 bp, Zea mays
  Clone ID: MRT4577_151965C.1
ggggtataatccgctacacggtacctggtttgcctgtatactggcacgcggcagcacctgcagccctgaccggcgacgattgggcggccgtcgctgcctccttactccaggtgtccagctcttcttcgtgccatttgccggccgtgagcaccaccaggggagtttttgacaactgaagaagcgcggagacgacacaaggtgtatgatgaacttgcctctggtggcaagctctgtcccgcgctgattgtcataagagagcacctcccttctggtaaagcatgcttaagagtcaacattgatgcaaccagagtgggaaatgtggctcgctttatcaaccattcatgtgatggaggcaacctgcacccagtgctggtgaggagctctggtttgttgctcccaaggctctgcttctttgctgccagggatatcgtggagggagaagagctcaccttcagttacggtgatgctagggttaggcccaagggtttgccatgcttttgtggaagctcgggttgttctggtgtgcttccttcagaagaaacttaagaactgatgccatcacctgggatgtcttacaaatgagtttgattctatttctgacttcgcaataacattggcttcatgaggaattgcctggcccattcttttagccatactgtaatgtgtgcaacaaacaaaaaaacaagctgtcagtttttggtgaagaactggtcatgtttgtaatgtgatttgttttggctggacatgtgtttcctgcttacagttgattggcagattctttgactgccg

SEQ ID NO: 56992 - DNA, 2316 bp, Zea mays
  Clone ID: MRT4577_151966C.1
cctgcaggctccggtgcggaactcccgggaaagaaacacatttagcagtccagactctaatatcatccaacgattcatggcctgttggcatgttgctggaccgtcactggttcacaggcctctagaggatacttggccagagcgggtgcgccgtgcgcgtgcgcggcggcggagtgcggtggtatccagcgcgtgtgcgccgatgtggaggccgatgcagcgggcccgggctttgaggccgggatggggagcctcagggagtgcggcgacggctgcgcgtctgcgccgtcatgtgggaaccgacggactcagcgcggcgtcgctgtgcggctgtgcgtcgtgtgccacctgcacaaggggtgggggctgcacgctgcggaggcctcaactgcgggcagtttgtgtgcaagtacgccggtaaagaagcaggttctgttccatgacggacgaaatgattccggatgaagctgtgcgcccgtgccgcattccaaactgcaaaaattgctggacgcggctccgtaccatgttgaacaaactgattttatatcgagcgatgaggcgatccaaacatgctgttaaactcctacttaccaaacaaagccactgatcaatggctctgtgaagtcgtctgccaaacgagcactataaccacattctattataagctacacagtactaaacaacaagacacattaagaaggacatttgggtagatttttaaccatgtttggtctcgccggatatcatagacatattcgtataatttgttcacttgtgtttccagttagttgttcatctatgcctagctttgctttggttctgttcttgtcatagctgaaaaaagaagcgaattcattgggcaaagccttatatatagttgatacataaggattcatgtaaaatacatttgcagtccggtacagtttttagccttgtgccctttgcaaaaaggactacaagaaccatgcctttttccagcgtaagctgctgttgacttgttgaatagtttattcacagggagtttagactaatgttaatgtggtactccatctgtcccataatataaggcgtaaccactttttgttcttgtcccataatataaggcgtgctttctctagacacacgcacatcgacgcagtgtcatagaaaaaattaaatacatttcttagtctttaaaccagaggtagttacgccttatatactgagacagagggagtaatagagtttaggcgcgtcagctctaaacagtaaactgatagtacattaacgtttatgattagttttgcgccacattctatccaaaagatccagtgagtagattagcttgtggaataatttaacttcttgcccctgcatcattttaagcttatcaagtttcaggaattctccacacaactgttgatttagtgatcttttatcatcagtttataaggttgcatcagaatgaaagattggattttgtttagcctgacattcttgtgtttggctcatacaatcatataagaggtgctttatgactggatcagttattatccagaatagtgtgttgagcttgtgcgctgatgtatatatttttgaacgcattatgtgatgatatttgaatatataatattacagattgttggtattatttagaaactttaactaatacatattgtctttaaaaaaattacattattttttatttgttccccacagtttcaggtcacgttgagttctgactgttgactagcgaacctatagtcactgttgctttcttttgtggtcatctttgtatttaaactgcagggagtttttgacaactgaagaagcgcggagacagcacaagctgtatgatgaacttgcctctggtggcaagctctgtcccgcgcagattgtcataagagagcacatcccttctagtaaagcatgcttaagagtcaacattgatgcaaccatagtgggaaatgtggctcgttttatcatacagttgccttcatgtgatggaggcaacctgcaccccatgctggtgaggagctctgattcgttgctcccaaggctctgcttctttgctgccaaggatatcgtggagggagaagagctcaccttcagttgctgctaagggtttgccatgcttttgtggaagctcgggttgttctggtgtgcttccttcagaagaaacttaagaactgatgccatctcctaggatgtcttacaaatgagttcgattctatttctgacttcgcaaataacattggcttcatgaggaattgtctggcccattctttagccatactgtaatgtgtgcaaaaaaaaacaagcagtcattttttggtg

SEQ ID NO: 56993 - DNA, 358 bp, Zea mays
  Clone ID: MRT4577_151967C.1
ttttttttttttttttttggggggttttttttattttttttgggttttattacttctcattttttggggaaaaaacaaagaacacccccggtgaaagacaacaaaagccgacagggcaacccgtgccgcttttaaaacaacaacttgatatagggaaccctgaaagggggaatgcaaaaattttcccctatcactaaaaataccaggtccttttaaaagccagggccaactaccgggatttccccgctttggggttcaaaagtctgggcccaaaaaaggttttgaagggtcccaagaatggaaaaaaaagggccttagccccccttttaagagagcccaaggtcatttcccgttttat

SEQ ID NO: 56994 - DNA, 410 bp, Zea mays
  unsure (1)..(410): unsure at all n locations
  Clone ID: MRT4577_151968C.1
aacatagaattcacaatagtgtaccaacggtggcagccaaaatatttgtgcctcctgtatgctccttggattttctgccaagatctgttacattgaccattttcccagcaatgttggganagtgctattagtgcgcttcatatcccagggcacttaccaccagtcatgccattggntaccatgaacatatttgggggggggagcatgatncaacaggtgatagccagcttgatggcgtgtccgtccctgatgctgcaagaactgttggccttaccgcttcagacgatgccagtgatgatgccacagatgatgacgcctaacatgatgtcaccatngatgatgccgagcatgatgttaacaatggtcttgccgagcatgatgtcccaaatgatgatgccacaatggccact

SEQ ID NO: 56995 - DNA, 328 bp, Zea mays
  Clone ID: MRT4577_15196C.1
ggggggggggtggtgtttttttttttgtattccgcatctacgcggaggcccgaacccagcccccgccatctgaaacaccccccgggggcaaaccaatccaaaaagaccaatacacccaccggagtagaagggcaccccctatccttcaaaccccgggggggggggggaaatcttaccccccgaaaaggaggcgggaaccaggagcctccccagatcgaaaacgggccataacacaccctaccagaaaaggcagtgcgcccccagaaccggaaacccccaccaacccagggcaaggggcccctgaacgctcccgccaaacccgacatcg

SEQ ID NO: 56996 - DNA, 665 bp, Zea mays
  Clone ID: MRT4577_151970C.1
aaataacaaactgcttcgtacggccccggccgcctgcggcctgccgtttacagcttacaccatgcgcccgcttccggcgtccgtggcgtcccgactagcggccgtgcttgcggatccggtcggcgttccgctgcccgtcttcaactccctcctctctgcgcctgccgcctccgtggacccttcccacgggcacctcccgctctacctcttccgccgccgcctactcccgctccgccgccccgatgccttcactctctccgttctcacctcggccctcccctccgccgccgccaccctccacgccctcgccctccgccttggcctcctccacgcggaccccgtcctcgccaactctctgctccgtctgtacatttgcccaccggtctcctgtcagggcctcgcgcgccgcctgttcgaggaaatgcccgcgcgcaccgcgtcctcctacaacaccctcatctcgcactcgcacgacgacgtgtggggccttgtgcggcggatggtcgccgacgggtgcgcgccagaccggttcactatgtcagccgtgctgccggtgtgcacgtctgcgcgctggggcagggagcttcattgctatgccgtcagagattggatgtgccgggacgatgatttccatgtgagcagcggcctggtgtccaatgactgca

SEQ ID NO: 56997 - DNA, 290 bp, Zea mays
  Clone ID: MRT4577_151971C.1
cggctcgagaatcttcaatggaccctttgtgaagctcaacaaggcttcgattaacatgctgaagcttgtagagccatatattcgctgggggtaccccatctgcagtcactaaatgaactaatctacaagcgtggttctggcacaatcaataagaagcgaattgctttgacagataacgccttgattgctcgatctcttggtaaatacggcatcatctgcatggaggatttgattcctgagatctatactgttggaaaacgcatccaagaggcaaataacttactgtggcc

SEQ ID NO: 56998 - DNA, 477 bp, Zea mays
  Clone ID: MRT4577_151972C.1
aaacccaattccaataaaattaacagcaacaatttggttttttaacaacaggggtagttggaaaaatgtcgttagccctaaacaacacaattacaaactcgtttttgctaacctaaaaaaaaacctgagttttttacaactaactccaaagtccaaaggggtttaaaggaaatgcctggaccatattaaatgcctatgcaaccaaaatttttaaacaggggtaaaccttaagcatcccaactaaaaaaagttgtcctggatctaatgcagggttaagaaatcccaaaatgcattatcaaaacccatcaccaaaatgttgcaaaattagggcaaaaatatgcctgcctgagctccatgctaaaaaattctggacctaaaaaggcccccaaattgatatactacacatactgggtaaacaataatttaaagcaagcccattttacccaaattgggaaataacaagtaaaaaggggacct

SEQ ID NO: 56999 - DNA, 504 bp, Zea mays
  Clone ID: MRT4577_151973C.1
taggggccctttttttttttttttttctttttttttttttttttttttttttttttttttttttttttttttttttttttttttttttttttttttttttttgggctgaacctggcagaaccagccttatgtaaactccaaacaagtttggaaacaaaaacttacatcaacttatttatatcctttcattctaccaccacaaaagttgatacacgagatacgatctaccctgtctacaacaaaacttcgtttgggttattatatagcgcctcagcacacatcaaattatattaaaatgtcaacaacgaggacctatatatatatatttgaaactaatcaagaagcaggtggggggttctctgggatacttttttccttcttcgagcgctgcaataaaagaataaggactcttctgttgctctttgctatctttctatggtgatgaagaaccaactgtctgaggactacatgactgcacatggcccttttttgaaaccggccggc

SEQ ID NO: 57000 - DNA, 881 bp, Zea mays
  unsure (1)..(881): unsure at all n locations
  Clone ID: MRT4577_151974C.1
cgggccccgcttattacgacgctactgggacgcccccggaattcgggcacgaggccagcaccagcggaactgtgctgtgcaagcactcagcttcgcctccattccgctcacttcccgcggccactccgctccccaaaccctaacgccctcgagcggagcgatctctttgcttcgccagtgccgcgcccgggcatgccgccgccactgggtggcgcggtcaaggccgactgatccgtgcgcttgggagccgccaccgccgccgccgccgccgctgccattcctccctcggtgcccactggggtggagcggagactggagattctgccgtctgtcgcaagtcacacactaggtttctcgggcgctgacattgttggaagatgtggaggatcaagctcgcctgtttgcttcttatctttgtgcaagtgcaacgagtggtccttggaacacatgacgtgtacatcgtggtgatggaaggggatccggttgtgagctaccgaggtggcgttgacggatttccggcaactgctgtggatttggacgaggaaatggacgttaccagtgaagctgttacatcgtatgccctccacctccgaaggcaccatgacaagctcctagactcacatttaataaaaaggaacgtatgaaaagctttatagctaccaccatcttatcaatggctttgcaattccacattttcttcactgcaggctgaattcttgaagaaaanccccagaatttaaccnttttaaaaaaaactgaaggttccaaattgaatncccccccccncctttcnccgattgccactgggttntggcaacagagtganttaaaaaccgngaaaatttntaacggtttntgaatccgnattncccaattcaact

SEQ ID NO: 57001 - DNA, 358 bp, Zea mays
  unsure (1)..(358): unsure at all n locations
  Clone ID: MRT4577_151975C.1
gttgctattgattttttgagggagtgaggcagaaacatgcatttggtgaaggtgctaattatggtgnntccatngnnnngggcagcaacaaagtttcccagttttttttttttgcccacctctttttatccggggccgcgcttttataaaaaaacaaattttcccccccttatttttagcgtttttttttttttttagggcccaaaaaattaaagcgcgcggcgcggatttacaaacggggggatgggaaaacccggggggaccccaattttaaggcgttgggaaaaatttctttttttgccgaggttgtgtataaagaaaagcgccccaccattttttttttcaaaaattttgcccc

SEQ ID NO: 57002 - DNA, 1414 bp, Zea mays
  Clone ID: MRT4577_151976C.1
tcgaagtcgcgtaagcaagctaaaggtaaccccccaaacctcaccgccgatcccaccgcccggcgccgcgttctatggcctacacctcctccctcaacctcccaaagcacctcctcctccccagcccccgccggacaaggcacaggccttcctccttcgtccccgccgccgcggccaaggtcaacggtgacgcgcccgagaggccggcacccaatggcaaggcacgcatcaacggccagggcaagaagggagtcaacgggcatgcggaccggatccacctctcggtgagcacgggcggcggaggccaggacggctccggcctgcgcgtggcgttccagggcgcgccgggcgcctacagcgagttcgcggccaagacggcgctgcccggctgcgacacggtcccgtgccgcgccttcgcggacgcgctggctgccgtggagcgcggcggcgccgaccgcgccatcctccccgtggagtccaccatggaggggacggcgctgcgcaactacgacctgctcctgcggcacggcctggtggtggtgcaggagatcaacctgttcgtgcactactgcctgctggccatgcccggggtgcgcgccgccgaggtgcggcgggtgatcagccaccccatggcgctggcgcactgcgggcgcgcgctggcccgcctcggggtggaccgcgagcccgtggaggacacggcgggcgccgtggagatgctgcggtccaagcggatgctggacacagccgccatcgccagcccgcgcgccgccgacctgtacgggctccaggtcctcgcgcacgggctccaggacgagtcctggaacgtgacgcgattcctgctcctctccaggccgccgtcgcctgcgtggcgctgggcgtggacgccgacgccaagaccagcatggtggtcgcgcaccggggcggctccatggtggtcgtgctcaaggtgctctcggccttctcctcccggaacatcaacctcaccaagctggaggtcatcaacaacgaaggcgcgggatccggacccggatcaggcgagcggccgccggtggtgatactggacacgagcgcccggggcgcacccacgctgcgcgccttcccgcacgtcctctacgtggactgcgagggcgccgcgcacgacccgcgcgtccgcgaggccatccaggagatggagaggttcgccgtcttcgtgcgcgtgcttggatgctacgccgccgactccaccgtctacgatctgcagtgagctctcagatatgatctagctactacttactattcagaagagaaagcagcgcgtaatttctgtacagatgcaataagaagaatcttccttcctataattatttgccaacaaggtctgctttttagcgactagttctaatcttgttaaaaaaaaaaaaaaaaaaggccccta

SEQ ID NO: 57003 - DNA, 263 bp, Zea mays
  Clone ID: MRT4577_151977C.1
gcgacgaacagctgcacggcaagacgatatgtgtatgcacctgcaagccttgctcccaccttttcattagtgaagatctcaacctaacttaattatcgattgcgctgcgcagcgtcaagttcgcaaccaaatgcttcatggacgaagaggagggctctgttgcgattgaaggcgaagcaatggctgtcctgcctacactggagctcagctctcagtcgactagaaactaagagtggcctcaaaccgggtcactagtcacaagt

SEQ ID NO: 57004 - DNA, 453 bp, Zea mays
  Clone ID: MRT4577_151978C.1
ccggccgggccggcgtcgcgtttccaacaggccagtcccctcccactcccagtcccatctcgacgacatggccgcagccgcagggccatcaagctctgtgaaggagacgctcccgccggccctcggctccacctcccagccacctcccgtcttcgatggcaccaccagggtttgcaggacaagatggagctggtggccatcgatctgcaggacaaaccggcttggtacaaggacaaggtttacgcacagggcacggtactgtttctcggatgttcctgtctagctagctaccactaccaccctgagcatctccgtgaacactgcactactgtttctcggcagcaggtgccttccctggagcacgacagcgaggtcaggggcgagagcttggacctgatcaggtacatcgacagcaactttgacggccccgcgctgctcccagaggatgctgcg

SEQ ID NO: 57005 - DNA, 872 bp, Zea mays
  Clone ID: MRT4577_151979C.1
cgggatattctcatgagatcaaaaggccgctcgaagaatgtagtcaccccctctcgccgtccgccgctactcccctgcctcccccagagctcgttagggttttctcttttttcgggggagaaatctcaagaggcggcaccatgctcgtgtaccaggacaagctttccggcgacgagcttctgtcggattcgttcccgtacagggagctggagaacggcgtgctctgggaagtcgatggccattgggtcgttcaaggagcagttgatgtggacattggagccaatccctctgctgagggtggtggtgatgatgagggtgtcgatgaccaggccgtgaaggtggttgacattgttgacaccttccgtcttcaggagcaacctgcttttgacaagaagcagtttatctctcacatgaagcgctacatcaagaacctctctgccaagcttgaaggggatgacctagatgttttcaagaagaatgttgagtctgccacaaagtatcttcttagcaagctcaaggaccttcagttctttgttggcgagagcatgcatgatgatggcggcgtggtgttcgcctactacaaggagggagctgctgatccaactttcctgtactttgcacatgggctgaaagaggtcaagtgctaatcgcactgtatgctaaaatctatgcggtcgtcagtatttttgctctgctctatggttgtcagtcgactctccaatgttgtgtcggtaactatcagatgttgagtgtcttgaaaactttctgataattgtgggatttgctttgtaatggtaatcgtgaaattggtgtgggttatgttttggtcaatgcctcagcttttactccctagttgaaaacagagattttgt

SEQ ID NO: 57006 - DNA, 501 bp, Zea mays
  Clone ID: MRT4577_15197C.1
gggtggtaggtacacacgcccaatggagtgtgcctccaccaccgagacatcgcctgtgtgacagtgatgaagaaatgtcccttcatcgccaactaaacagtctaggactgaacttgactgcatgcgcacgccaatcactctaaattgcggtagtggctgcacctagctccaggttgatatggttagtcaacacttgaattttatgcatgcttgcctgaaacattataatcgctttcctggaggtagaacacacatggcatgcccttttggctgctgggcaaagctcaccgcagacctgacgtgtgctgtaatgctcacatcatatgccaccgctttagctactatcacagaactatttgggataccggcaccaggctgtttggaagacgaccccaaaaatgtcaacctttttcttgatgaaacctaacatgaggacactactggactatactctgcaaaaatgcacaacttttttggcaagatgaaagactctgtaaactc

SEQ ID NO: 57007 - DNA, 405 bp, Zea mays
  Clone ID: MRT4577_151980C.1
ccggccgggagccggcgtcgcgtttccaacaggccagtcccctcccactcccagtcccatctcgacgacatggccgcagccgcagggccatcaagctctgtgaaggagacgctcccgccggccctcggctccacctcccagccacctcccgtcttcgatggcaccaccaggctgtacatctgctacttctgcccgttcgctcagcgcgcctgggtcaccaggaacttgaagggtttgcaggacaagatggagctggtggccatcgatctgcaggacaaaccggcttggtacaaggacaaggtgccttccctggagcacgacagcgaggtcaggggcgagagcttggacctgatcaggtacatccacagctactttgacggacccgcgctgctcccaaaggatgct

SEQ ID NO: 57008 - DNA, 704 bp, Zea mays
  Clone ID: MRT4577_151981C.1
tcgcaccggctgcatcttccgcgtaggagttatgtcgtcgtcacgcacgtaaccgctgcatccatgctgtgccgtgcaggcgcgcgcgctcaacgtccatggatgccgcggctgacggtttggaaggaccgcgttgtttagaatcatggcagcgggcgcgctggcgctgggcctcgtcggcctgctcgcctaggcacggcgcgcgcgagcgggtggcgctggcgcctgcacggcacagcatggatgccgcggctacgtgcgtgacgacgacataactcctacgcggaagatgcagccggtgcgccgcgcgcgctcaacgtccatggatgccgcggctgacggttgtactcttgtccgttttttaaccgggccgcccgggcctacgtgtatgtagtagtactagtgcagtcagtgccactcacgttttgggtgccggtgctacgtgcggacgtaccgccgccgcctcggactctttctactattctcttctttaatttcctctttaatttcctgtaccactgccacctcatcgagatgatttatttatatctttattccaaaaaaaaaaaaaaaaaaaaaaaaaaaaaaaaaaaaaaaaaaaaaaaaaaaataaaaaaaaaaaaaaaaataaaagaaaaaaaaaacataaaaaaaaaattataaaaagaacaaaaaaaaaaaaaaagggggggccccccaaaagt

SEQ ID NO: 57009 - DNA, 810 bp, Zea mays
  Clone ID: MRT4577_151982C.1
cctcgagggccggccgggagccggtcaaaaaaggcgaggccagtcccctcctactcccagtcccatctcgacgacatggccgcagccgcagggccatcaagctctgtgaaggagacgctcccgccggccctcggctccacctcccagccacctcccgtcttcgatggcaccaccaggctgtacatctgctacttctgcccgttcgctcagcgcgcctgggtcaccaggaacttgaagggtttgcaggacaagatggagctggtggccatcgatctgcaggacaaaccggcttggtacaaggacaaggtttacgcacagggcacggtgccttccctggagcacgacagcgaggtcaggggcgagagcttggacctgatcaggtacatcgacagcaactttgacggccccgcgctgctcccagaggatgctgcgaagaggcagtttgctgacgaactgttcgcgtctgccaacgcgttcaccaaagccctctactcgccgttgctgtcccacgcggccgtgtcagacgaagttgttgcggctctggataaactcgaagctgacctatccaagttcgacgacgggcccttcttcctaggccaattcagcttggaactacgacatcgcccaaggcaggtccaacctacaggaattcatcgacgagatgaacaagatcgaagcgtatgcgcagaccaagaacgatcctctgttcttgcttgatcttgccaagaaccatcttaagattgcctgaagatgtgacaaagcagccttagtccgttgatcggtggaagacactcgtcagtggtgagttga

SEQ ID NO: 57010 - DNA, 1466 bp, Zea mays
  Clone ID: MRT4577_151983C.1
atcatcgaggccggccggcggccggcgtcgcgtttccaacaggccagtcccctcccactcccagtcccatctcgacgacatggccgcagccgcagggccatcaagctctgtgaaggagacgctcccgccggccctcggctccacctcccagccacctcccgtcttcgatggcaccaccaggctgtacatctgctacttctgcccgttcgctcagcgcgcctgggtcaccaggaacttgaagggtttgcaggacaagatggagctggtggccatcgatctgcaggacaaaccggcttggtacaaggacaaggtttacgcacagggcacggtgccttccctggagcacgacagcgaggtcaggggcgagagcttggacctgatcaggtacatcgacagcaactttgacggccccgcgctgctcccagaggatgctgcgaagaggcagtttgctgacgaactgttcgcgtctgccaacgcgttcaccaaagccctctactcgccgttgctgtcccacgcggccgtgtcagacgaagttgttgcggctctggataaactcgaagctgacctatccaagttcgacgacgggcccttcttcctaggccaattcagcttggcggatgtagcgtacgttacgattctggaaagggttcagatatactattcccatcttaggaactacgacatcgcccaaggcaggcctagcctcgaggaattcatcgacgagatgaacaagatcgaagcgtatgcgcagaccaagaacgatcctctgttcttgcttgatcttgccaagaaccatcttaagattgcctgaagatgtgacaaagcagccttagtccgttgatcggtggaagaccactcgtcagtgttgagttgaatgtttgatcaataaaatacggcatgctgtaagggttgttttacaatattgataatacactctactgttcagttgttgaactctatttcttagccatgccaagtgcttttcttattttgaatcacacgcgctgcgagcagtttctgtctaaagggcaagttgcggctctggataaactcgaagctgacctatccaagttcgacgacgggcccttcttcctaggccaattcagcttggcggatgtagcgtacattacgattctggaaagggttcagatatactattcccatcttaggaactacgacatcgccgaaggcaggcccaacctccaggaattcatcgaggagatgaacaagattgaagcgtatgcgcagaccaagaacgatcctctgttcttgcttgatcttgccaagaaccatcttaagattgcctgaagatgtgacaaagcagcattagtccgttgatcggtggaagaccactcgtcagtgttgagttgaatgtttgatcaataaaatacggcatgttgtaagggttgttttacgctatttataatacaatgtactgttcagttgttgaactctatttcttagtc

SEQ ID NO: 57011 - DNA, 2886 bp, Zea mays
  Clone ID: MRT4577_151984C.1
gtggaagagggtgcttgaggttctcgaggccggccgggagccggcgtcgcgtttccaacaggccagtcccctcccactcccagtcccatctcgacgacatggccgcagccgcagggccatcaaggtgggtgatcgatcgctctgtgaaggagacgctcccgccggccctcggctccacctcccagccacctcccgtcttcgatggcaccaccaggctgtacatctgctacttctgcccgttcgctcagcgcgcctgggtcaccaggaacttgaagggtttgcaggacaagatggagctggtggccatcgatctgcaggacaaaccggcttggtacaaggacaaggtttacgcacagggcacggtgccttccctggagcacgacagcgaggtcaggggcgagagcttggacctgatcaggtacatcgacagcaactttgacggccccgcgctgctcccagaggatgctgcgaagaggcagtttgctgacgaactgttcgcgtctgccaacgcgttcaccaaagccctctactcgccgttgctgtcccacgcggccgtgtcagacgaagttgttgcggctctggataaactcgaagctgacctatccaagttcgacgacgggcccttcttcctaggccaattcagcttggcggatgtagcgtacgttacgattctggaaagggttcagatatactattcccatcttaggaactacgacatcgcccaaggcaggtccaacctacaggaattcatcgacgagatgaacaagatcgaagcgtatgcgcagaccaagaacgatcctctgttcttgcttgatcttgccaagaaccatcttaagattgcctgaagatgtgacaaagcagccttagtccgttgatcggtggaagaccactcgtcagtgttgagttgagtgtttgatcaataaaatacggcaatgctgtaagggttgttttttatgccattgataatacactgaactgttcagctgttgaacactatttcatagcaaaaaaaggttaaaagtatttacctaaattcaagacatatgaagggaaggatggtgcgctggggagagggcagcctcgtactgtgctgctcgccagcttcatctgcctctgctgtctgctgaagaagcgccgccgcgcgccgccgccgccttagcactacggagtcccgccgcccccaggtccgtacaaggaggatccataaggtggaacgtgacaaagttggcagcaaaatgcgcctcctgctccaccccctgaacatgtggtcaaagtgcacccttcgcctccgccagcgagttccaatcgatctccaaacaggccagcgccgccaccaccagcgatgctaaatagtagtggtggatctggttctaattactctggtggcgagatcctacctccaccatcccctggtgctgttcttggcttctcgaagagcacattcacctacgaagagctgttgagggctactgatggattctcggatgctaatctccttggacaaggtggttttggctatgttcacagaggattgctgcctaatggcaaagagattgctgtaaaacaattgaaactgggaagtggccagggagagcgtgagttccaggctgaggttgagattatcagccgagtacatcacaaacaccttgtgtctttggttggctattgcatttctggaggcaagaggctgcttgtctatgagtttgtccccaataacacattggaattccacttacatgcgaaaggtcgaccaacaatggagtggcctgctagattaaagatcagtttgggtgctgccaagggtttagcttatcttcatgaagactgccatccaaagatcatccatcgtgacataaaggcatctaacattcttcttgacttccaatttgaagctaaggttgctgattttggacttgcaaagttcactactgataacaacacccatgtttcgacaagagtaatgggcacctttgggtatttggcacctgagtatgcatcttctggcaagctaacagaaaaatccgatgtattttccttcggagtcatgcttcttgagcttattactgggcggcgaccagttgacacaacccaaacatatatggatgacagcttggttgactgggcaaggccattactgatgcgagcacttgaggatggtgaatatgatgctttagtggatcctcggctgggaaaggacttcaatcctaatgagatggcaagaatgatagcctgtgcagctgcatgtgtacgccattctgcacgtcgtcggccacgtatgagtcaggtcgttcgggctttggagggcaatgtgtctttggaggaccttaatgaaggtgttcggcctggccatagccgcttctttgggtcatacagcagctccgattacgattctggccagtacaacgaggacatgaagaagttcaagaagatggcattcaacaacaactataccagcagccaatacagcgcgccaaccagtgaatatggacagataccgtctgcatcaagcagcgagggccaccagacgcaagagatggagtcgggtgcaatgaagaaaggtggctacagtggtggctacagctcaggatacagcggagcctcgtaagggaattccctctttttttttgtttttcttttgatgttttcattgctgcatttgtaaagtctggccgaattatatgaccaaagctgctgacttgcgcgtgatgtatctgagtttgaccgagtatagttctatgtagctgcaattgtttattctttcatgaaagttgttcttgaccaatgtttgctgtgcagttcgaagagagctaattgaatgttgatatactgtccaaaaaaaaaaaaaaaaaaaaaaaaaaaaaagtactctgcgttgttaccactgct

SEQ ID NO: 57012 - DNA, 194 bp, Zea mays
  Clone ID: MRT4577_151985C.1
cggactagctgccggatatcctttgagcctacacaatgcctttgctcacagctatcacacatacgagaactaacttgacagctaagactcttagcgatacattgagatgcattgtgtctccacaaactctatcaccatttatcttactcctcgtactgagcctcgacacgtcttcttgctgcccttccttgagt

SEQ ID NO: 57013 - DNA, 686 bp, Zea mays
  Clone ID: MRT4577_151986C.1
atccggtcctgatgaggcgtcaggtggttgcgttgcatgaagagaaggacctgatgaaggagaagtttgccaagctgctgctcggggaggacatgtccgggtccgggaaagagggtgccctccgcgctcgccctctccaacgccgtcaccaacctcgcaggtggctagccatctccttcctgtcgaattcgatcgctgcacaggccacgactctttctgtttagtttttttttaaaaaaaaatttcatgcgcgccctgttcgctagcctctgtattcggcgagcaacggaagctggagcccatggccccggacagaaaggggaggtggaagaaagaagtgtgggctggattctgtccattgccgatcacatcgtcgagttcgtggccaagaaacaagtcatggacaacgacaccgagatggaggtcttgatcggtctccatcttcttcatctccgggcggcggtaacactctcttctgctcgtcacacacagctgatgggcacgcagcagagacgggatctccaggcgaacattccagcgttgcgtaaacttgacacgatgcttctcgtaagcaccaccactccgtgcataccacgtgagcgagcctctctccctttctgctgtgttcttgcttacccaccgagcagagctagcgctgcatcacacaggactacctggaaaacttc

SEQ ID NO: 57014 - DNA, 842 bp, Zea mays
  Clone ID: MRT4577_151987C.1
ccttccaacgccaaccaccccccaagaaaccggaaagcgaacggcatggcgaccccccgcagcgcagcacgccacgctccctcctctccctctcgcaggccatgacgcgccaccgtccttggcctccttcccatcctcctcctcctcatcctcttcctcttcgggtagtggcagcggcaccacaagcaaccggcagcggcgccgggaagaagatggcgaggctctccccgggggcggcggcgccgcaggtggacacgggcaagtacgtccgctacacgccggagcaggtggaggcgctggagcgcgtctacaacgagtgccccaagcccagctccctccgccgccagcagatcatccgggactgccccatcctctgcaacatcgagcccaagcagatcaaggtctggttccagaaccgaaggtgccgggagaagcagcgcaaggagtcctcccgcatgcagacggtgaaccggaagctgaccgcgatgaacaagctgctgatggaggagaatgaccggctgcagaagcaggtgtcgcgtctcgtctacgagaacgcgtcggtcaagagcctcaagactaagatccacaaggcttctgcggccaccacggacacgagctgcgagtctgtggtgacgagtggtcagcagcaagccctagcagccccgcgtccgcagagggatgcgaacaacccagctggtcttctcgcaatcggtgaggagaccttgacagcgttcctgtccaaggcgaccggaaccgctgtcgaatgggtgcaaatgatgggaatgaagcctggtccggattcatgggaatcatcgcttttcgcacaattgtattggcgtaca

SEQ ID NO: 57015 - DNA, 403 bp, Zea mays
  Clone ID: MRT4577_151988C.1
gggcgaaacaaacttcagggctttttttacttaaacaaacttcaaaaaaggggcaacacttgcaagaagaagggccattacccccgcgaaaaaaaggcccccactatctaaatcttttaaaagggccccttggccatagggctctcggaagaaaaaaaggggttgctaaaataacaaaaaatggccgcaatttctctctatttcattttacgggcccaggcctcccccctttaaaaagaatatttcgaaaccccaccccgagcatgaagaatgcccaagttgcaaagcccttccaactaaaatacgggcccagaccagcaactggcaggggaatcaacagaccaggcaaaatcggggggtcctttcagacgtatcccccaaaccaaaggggtaactggaaagc

SEQ ID NO: 57016 - DNA, 268 bp, Zea mays
  Clone ID: MRT4577_151989C.1
agcagtggtaacaacgcagagtactttttttttttttttttttttttttttttggaaaacaatactaccaattttttgaaaaataattttggaactatggtcaacattaaaagcacgtaacatatcggagggggtggtaaaaggacacgataaaaggaaaaggggttcttggaaactaacaaaaagaaagagggggcagagctcccggggaccctggggggtaccactggcttccgggcactctggggtggtaccactggttaagggg

SEQ ID NO: 57017 - DNA, 313 bp, Zea mays
  Clone ID: MRT4577_15198C.1
gctgattcttgcgggcagggcatctttcgctttttctttctcgggggcccagcaatttaaacacaaaaagccatcccgggtttcacgccgcaggttcctttggccagggccccccgccacatttatttttatcaaagacaaacaccctgttggattgggaccaaagggcccccgtaactagcggcccctggcaggcagaaagaagggccttttcaaccccaccgggcccccaccctgtcggggacccgggggtccaccccgaattttcggaccccctccttgggggcccccagcttgctttagggaggggttc

SEQ ID NO: 57018 - DNA, 467 bp, Zea mays
  Clone ID: MRT4577_151990C.1
gatatctctgttctcgccttctagcgaacgagccaaacgcgatacctgatgtgaattccataatcccgagaaacatcacagactatgaactcaagctgcgccaaaacccctctgaagtaggtgaccactgccgtgggcgtgacaccttccgccccccaccgccacgctagaaaaaagaggaagagctcccgctagagagacagccctctacaagcatcggctgggagcaaaatggtgcagcggttctcctaccgaaacctgccatagctacgccatgcaagccgaacaagacccgcgacttcaagacccatgtcgggaaactggcgtaccacgacaccaagaagcgcgagagcggcgcgaagtgcccagtgaccggctacaagaaccacagccttccacaccatcagtcctgctaaggacaccatcatcactatggacatgaaccaaaggactgcgaatcggccata

SEQ ID NO: 57019 - DNA, 398 bp, Zea mays
  Clone ID: MRT4577_151991C.1
agggagcggccaccaaccggaatcacgacgatgttggcggttcttcccatctccctctctctccagttgttcacgatggctcaggcagggtggcgacactagatcttcatgcaccggggcaagggtcccgtagagcacatatcgggtcgtgcgcggattcccagcggcgggcggatttcactgccatggcgacggcgaacgagcggaaccacatcggcggcacccttccagcacgctgcatgcccatggcgatgaggttcatcgagaatctctcgactttggtgtagatcgaaagggaagcacggctgtcccatatataccccgagggagtctagatatgctcggccaggagcaacggccaccccaagaatcacgcaatgttcccttggcttcaattc

SEQ ID NO: 57020 - DNA, 317 bp, Zea mays
  Clone ID: MRT4577_151992C.1
cggccgaatcggcgacgccacgcgtcgatgggattactgatatctggcttgggcagggtgctgcacttgtggcagaactacatttgtgtgccttgggcttgtggctctgatctatctttagagctatatgaactgactattattcaacaggaggcatataacttactttataatgaataatctggcattggattacctatgctgatatttgccacatggggttgtttggtttttatggattggctgtgcagactattggtggggaccacggctactaactataactcaagcaacgacattgctgggtgtgatcttgt

SEQ ID NO: 57021 - DNA, 865 bp, Zea mays
  Clone ID: MRT4577_151993C.1
gtccgattcattggttcatgcacaaagccacctcagttttacataattacagagtgcatgtctagaggaagtctgtttgatttcttgcacaatgagcataatgtgttggacctcccaacgcttctgaagtttgcactagatgtatgccaagggatgtcctacttgcatcagaaaggcattatccacagagatttaaagtctggcaaccttttattggataaaaatgatgttgttaaagtagccgattttggtctagctcgttttcaggatggagggggtgatatgactgctgaaactgggacctatagatggatggcacctgaggttataaatcatcagccctatgacagcaaagcagatgtatacagttttgctcttgtactttgggagctcatgacatccaagattccatataataccatgacccccctccaagcagctgttggtgtgaggcagggattgcgaccacaaattccagaaaatacgcatccgaggctcataaacttgatgcagagatgttgggaagctactccgactgatcgcccttcatttgaggagatcattcctgaactagaggatatccaggcacaagcacagagaacatcaggggaaacgagccagacagaggaggaccactcatgcagtaaagattgattgaccccctctgtacatacatgttgacaattctctcatctgatcactaaaatgctgagaaagtagcatatcatcagttttgatgccatagaaaaaaagtagcgaatcattttgtcaagttttgtcagaaccttttggggccgacggccaaagctcttggtattatccttgcttcactcttaggtcccatttttcttgatatgaagatatc

SEQ ID NO: 57022 - DNA, 422 bp, Zea mays
  unsure (1)..(422): unsure at all n locations
  Clone ID: MRT4577_151994C.1
tgcctctagcatggcattccggctgatggcctgatgcccgttgacacgaccgttgggggaggcgatgatgctcttacacaccttctttagtgacactggcgctgccaagctcgtccaccgtgctgatattggtgaccttgtgccctctgcgctcactgaagtgaggactggcacctatcgctccggtcttccatcctgaccaccttcatnacaggcgacggatgatgcaaggcacctactgtcatcggggtctctatgcccttgtggaggatactggtgccttgtgccttgaccgcatcttgaagcttgcagatctgtgctctggacttcacagctttctcttattcaacgccgctgtgtggaggaacgttctcctgtgctgtgcctctactacttctggatcgcctgtctgttgactatga

SEQ ID NO: 57023 - DNA, 667 bp, Zea mays
  Clone ID: MRT4577_151995C.1
accctcggagtttgccgggatcccaatctggtcttgggcagctcggagcgggcatcagcacacagacccattacaatcctagccgatcttcttgctctcactaaagccgggtgcttcgtaccacacgaccgcgcgctcggaaaacttcgcggagggcgaaggaggggaaccatgggcgacgcatacgacggtggagaaggcaggctttgatccgacggctcccagcaatctgtttgtcttgcgacagctgggcgagacgggcgcgccggcgaccttagtccaggggcccagggccttcgcgcggatgctctagccgggtgcttgatgtcgacaagcacaagccaggatgaggagaaggtgccccatggtgaaaagaatgtgagatgatgagccacctgataagaagcgatggacaagctcgacactggcttttactgcccattctgcaaccaccatagaaccggtgggcgccgaagaggcatgaataatctgctcggagaaggatcttgtaaaaactgtcaagagaacttaaggacaactgttaatgcactcactgagcctatcgatatatatagagaatggattgatgagtgtgagcgtgtcaacactgttgaaggcgacgatgatgcttgagcttgccccatgtgatgagactgttacctacaat

SEQ ID NO: 57024 - DNA, 459 bp, Zea mays
  Clone ID: MRT4577_151996C.1
tccttttcccagacagacagactccctagtccccacacaccaccatttccccccacggcgcccatccgtccgtctccgtggctcgcctccacgccccgtaccggcgatggccgccgaggcggcgtgctgcgacgacagcgcctgctcgacgcccttcgtgagcgcgccgtccagccccgcccgggacagggacagggaaagggacacctacccgtcccacttcttcttcagcgcgccgaccagccccacccgcggcaaggacgccgccgtcccggacctggacttcgacttcgacttcgacttctcgtcgcgcttcccgtcgccgtccgccggcgccatgtgctccgccgacgagctcttccacaacggccagatccgcctcgccgccgcgctgctgctgcagccggacggggacgcggacccggacccggaccccgccgcgggcgcgcagcacgagaa

SEQ ID NO: 57025 - DNA, 637 bp, Zea mays
  Clone ID: MRT4577_151997C.1
ggtgtttgttttttttttcgcgcaaaagcccatattattgggtgttgcatatcattgtacctcctcatcatggcgccatggcggttgcaccacagagttgccagccagtcatgataatggaagcaactcatgctcttcttgcatgcatgcatgcatgtactccaccattttttttgtgcattacgatctagctagcagctacgacaactactggaataggggggaaacacgatgaaaattaaaaaaatacacacacaaatctaattaaacatattatgcgattaaaactccaaacctgaaacaaagcttgggacggagggcggtgagaaacaaaaagcagcgtacgcttgtcgtagtgtgtgaccctgaaccgatcgatcatgcatgctacgggatctagctagctatagctactccaagaacgtctccatgaggtccgagtagacgccgccctcgtgcggccctcgatactccatccctgcttgctgctgctgcggcggcgccgtggaggccgacacggacgggaacgcggacgtggacgaggacgagctcatccgcgcgggcaacgtgaagctcctcttgaacttgttggtgctctgggccgcggggctgtccaccttcctggccttgttcgagt

SEQ ID NO: 57026 - DNA, 184 bp, Zea mays
  Clone ID: MRT4577_151998C.1
aaggtttctgctatatcgtcgtgaggcccgtactagctcgaattcgctcgaggccgcgagcctgtccaatccggtcccccgggtctcattcccaccccgcctactattctcctcgctcgcgctgacgggcttccacacgtaatacgagtctgcgccgggatacaagactacgatcgtgatagct

SEQ ID NO: 57027 - DNA, 577 bp, Zea mays
  Clone ID: MRT4577_151999C.1
cactttccatctgcaaccagcagagcgagtacgttgcactgcacgagcgaaaaaaatggccaaggttgccgccctgacgatcaccttgctcgggctcctggtgtccgtgacatgccagggcagcacttaccctgcttcgtcgtcgtcgtctagccctggctgcattctgcgagggtggatcccgttcttgcctccttgccacgacgaccaacccccaacgccaaaccctctccctcctccctcagggctcaccgtgggttactacaagaactgccctggcgctgaaggtatcgtgaggaaggtcgtggagaaggccatggacaacggaaaccgcggcattggcgcaggactcgttcgtatcttcttccacgactgctttgttcgggggtgcgatgcttccgttctcctgaggaacaccagcggctccagcaaccagacggagatgttcggcctgcccaacataaacaagcctcgcgggttccaggtcatcgacgacgccaaggccgagctcgagaaggcatgccccccacggtgtcgtgcgcggacatcgtcgtcttcgccgtacgcgacgccacac

SEQ ID NO: 57028 - DNA, 285 bp, Zea mays
  Clone ID: MRT4577_15199C.1
catataggaccaacaaccttttatgctaagtagaaaacgcctatgtgaaatgacaacatgtgttgataaatccagaagcccgagaaagtttaggtcgattttgtacaaattaattggtggaggagaaaacaggccaaacaaaagattgcgcaaaattgatcgacgaaattgaccaaaccgaggctcaaaaatcaaaaattaacaagccttaaaaggaagtgggggtttgagggatctgagtgattgggcttagcggattgagctgtgatgtcccatcgatccacc

SEQ ID NO: 57029 - DNA, 343 bp, Zea mays
  Clone ID: MRT4577_1519C.1
ggggaaaacaactcttgctagattaattttccttgaccagggagaaggttgggattttgatcttcgtatctggatatccttaaataggaaactaaacataaaaatgattgctagtgatataatctcgcaatgtaatcatagagaagaaaagcttttagatgttcgtacggacatggagatccaggaaaactttcagttgctaaagaggtgtttgcaagaggcactccatgaaaaacattgtctgattgtcttggatgacctttctagcacagataaaaaccagttggatgaattgaaggaaatgctgaaaggtacaaatgagtctatcaaagttttagtgacg

SEQ ID NO: 57030 - DNA, 726 bp, Zea mays
  Clone ID: MRT4577_151C.1
ttaactccatccaaccgactcaactagcagactccctcgaattctcccatccgtagctcaggccccctcgccctctctatcatctcgaacgctgctgtcaatggccatctttgagccatgtcgacaacctgcagcatcctcctcacgctgtcattgctcgatagagtgccttctctgtcgtgggtacataacggcacttctatacttcgctctactgagttctcgtgaatacatttcgcatacggcgggtccctcttccgcacatattcgcgttccgccgtgttacaaccgcatagctgtggtgcctagagagaagatcagcccttcagagtggcatgctgtattagaatcgatatcctcaggcagctcctgtattgtcccatcccagatgatgatgaagctgttcgccccaggtgatgattgacgaagcaatgatcgagtcctgcttgacggagttccgacgcaatgatgagaatcatgctgctgttgacaatgctgccactacctcgcctgcagttgagataatctaatcactgtacgtgatacagagtactagatgcgaatcctggggaccatcagactgacatgtgctgatttcattgaagctatcacgagtgggctcatgacctttgttgactcaagcttgtctgacattgacccttacgactctgggatcaagattatgcagattgtggctgccaaacccattcctgatgtgtctgaaga

SEQ ID NO: 57031 - DNA, 168 bp, Zea mays
  Clone ID: MRT4577_152000C.1
aaacccgggaaaaacctcccaggttttttttggttttaaaggtcccagaattcatagggacctttttgaatggttcatttaaaaaagccaaccgggcttcataaacaatttctactggttatccgggtggatgtccgaaaaataaacagaatgactcccccaggggct

SEQ ID NO: 57032 - DNA, 384 bp, Zea mays
  Clone ID: MRT4577_152001C.1
gccggccgggcctgggtaccttcccctaccctatgtagctatatcatacgtaattagccatggcgacgaaaaaatgggtcggttttgctgttcttgtgtgaatcacggttcatgccatcgctgggcttagctgccactctgcacgaaccgacatgtgtcaactacaccaagggaccacatgacgacttcctgtcgaacctgaccccaacgaaggaggacactgggatgtacctcctcacgtgcaagatcagcgaggcaaaacggagccaaatgtattggctgtcgctaacccaaaaatgaactgcgtcacctctgacatcacctacgcggcaagcccttcaccgaagcaatgttgacgccgttgtaactgaaatacaaacgcct

SEQ ID NO: 57033 - DNA, 193 bp, Zea mays
  Clone ID: MRT4577_152002C.1
cgcgtccaattttaggcaacacgcagcagtagttacattgggcatagtgttgtaggctttaaagggaaccatcaaaaccctaaattacatgtatgagggattgaacgtgtatataaagtattcagtggtaccactttacaaagctggcccggagattgataatgttcacaaaaaagaggtgtcccttgataat

SEQ ID NO: 57034 - DNA, 296 bp, Zea mays
  Clone ID: MRT4577_152003C.1
gtggggttttttttttttctttctttctttaattcctttttcttggttcttctttttttcttttgggggggaaacattgccttgaacattttattccccatggttgcaaacgtgtccactgttttggctaaaatacagctggccggcaaccaaattatatatggggcttcataacatgttcaccccccgctttatcgctcaacaattagcaaacccccctgttcccaagacaagggtgtttccaatgataccccaccaaaataacaggggggtggaaagaaccccccccaaaactc

SEQ ID NO: 57035 - DNA, 375 bp, Zea mays
  unsure (1)..(375): unsure at all n locations
  Clone ID: MRT4577_152004C.1
ctgcacatattgaacatcagattggttgtcatccttaccaatgtctgttgcaattcctacaatggnnnnttgattacagaagacatcatatgttgttcctatgcgaactatactgaatacatctacacatagttaggccagaccctgttttcccttaacattttctgtattgtggacaagttgtcaatactgtcttcttaccatctagccgtcttcttacataaagtattcgataatctccctaggcacggtctattgaagctcttgccaaaaaggattttgagaacttgaggcaacccagcgatgaagaagaacccaagccaccagctcgaagaggtaggccaccaaagaattcgaaagacggagggtgatgcg

SEQ ID NO: 57036 - DNA, 237 bp, Zea mays
  Clone ID: MRT4577_152005C.1
gcgagagggtgcaagcaccaaacaaagccgtcgccgtcgacgggacggaagggagggggggatctagtagaacttaccttcttctgcacttaaaaccggttgatgttccctaagaactaccggcctgggttccaagggtggcgcggattatccactacctgcccgtttgtctagtaagggcgcgcaatgtcttcctggcgcaggtgctgttctacatcgtggcgctaaatgtttatt

SEQ ID NO: 57037 - DNA, 282 bp, Zea mays
  Clone ID: MRT4577_152006C.1
cttcggtattgctggcatacattggacaagctgcatatcttcgtatctacccagaaaatgttgcaaataccttctacaaatcaattccaggtccgttgtactggccaacatttgtggtggctgtagctgctgctataattgcaagccaagctatgatatctggtgcctttgcaattattgctcagtcccaagttctaggttgctttccacgagttcgtgtcacccacacatcaacgaagtttgaaggacaggtctacatcccagagatcaactatgtcttga

SEQ ID NO: 57038 - DNA, 126 bp, Zea mays
  Clone ID: MRT4577_152007C.1
gccacgcgtccgctccctatatggttgttcagtggatatacagatgcaggcatatgggtttcttgaactagatacagtatcaatacaatctagctttcaactttaacaccatggcatgcttgatac

SEQ ID NO: 57039 - DNA, 671 bp, Zea mays
  Clone ID: MRT4577_152008C.1
ggccggccgggatgattatcagatcaatgactctttcgaacgctctgcgctgtcatcactgacagagcaaacatgggcactgcccctgagtgctagactcagcggtacgaaaggacttctctggcctagaatcatccgcctttagttgttgatatgtccagccatctcatataatctgcctggccctcgtcaccacaggccccactccactagaactgtgcccgacttctcatgactaacacccgtcggctctctatttctcttcttctaatcaggcatggatatttatcgctacaaacatgaccacggctacgtcgatttcgtccgggtatcttatctacaactgaccgtcctgttccaatgacttgccactactacaaccaaggtgcatctgaagaactcgcaaaacggcgctaggctgaacgctgacgacccaatactgcactatcctccttactatcatgctttaccacaaggatatataagattatgtccctaccactcttacatgctaccccaccaatagagattaactaccaactgtagacacttctacacttacttatatcacaacaatgagcgagacatgccttggaagacatcacgagcctgcgcggtcaagtatgcagccgtccaactagaattgcatgcacaccacaatgcatctactg

SEQ ID NO: 57040 - DNA, 829 bp, Zea mays
  Clone ID: MRT4577_152009C.1
atccaatggatcacgaaaccccgcggcggcggctatcttcttccccttcctcctcctttcccaattcttgtatcctgtgattgtaatccctaaattgctacacgaattcgtgagaagagtactagatcgagagaagatattgttaggttgctaacatctggtattcagagccagtaaatttcacccaccaccacctccctcgattccccaatttcaaccggcgacagcaccatgtccgatccggagaaggctcctcgttccctcgtctatccatcagagtgggatgccatgaccgcagatgagcagatgttgtggtttctcaagcatctatcggcacagatggatagtatgaagtccaagctcgcggctgcacgcgtgggcgcgggcgatccggcagaggccacctcgcgtgtcaatccggttgcctcccctgctactgcttcggctacctcaacctctgccctggtcgcgtctcacaccgaccgcgcaaccacggctgctccacccaccatcgccgaggaggtccactgcaccgccaccgcattcgaccccaatcccgcgatcggcaccaacaacgccatagccacccttcgaacgaacggagtggaaattcaggaggagaaccaggtggtggcaacagcaattcaggctgttagcatcaacatcggcggcaagttcactactcccgcacctccactggtggcgtcctctccagaagtctccaccgagcctgctgtccttcccgacgtttcctcgtcaactggacaggctgaggagatcctccatcatgtgtcttctgatacatcgctacgacgctcatgactgttcg

SEQ ID NO: 57041 - DNA, 573 bp, Zea mays
  Clone ID: MRT4577_15200C.1
tgaaacgagtaaatctatgatcttaaggctgcgactaataaaaaaaaaaacaaacaaaagatataaaaaaatgaaaaaaaaaaaaaaatataaaaaaaaaaaaaaaaaaaaaaaaaaaaaaaaacttaacgtggacgcgcctcaaaaggttgggagccgcaggccggacctcctccttttccgcgtccggtcccaaaggccaattgttttaaaggggcaggggggacccaggttaaccaacccactgcctttaaaaagctgggtgggcaagtccaaccggggttaaattatttttgaaggggttgggccccgtaaaataggcccatcggtggaattttataaagggagattggccacagggatctacaggacccaaagccttggggcccttttgatgtttgttaccgggggcataatggtcccagtgatggaacccccgctgtgggttaaggccctggttgaaaagggaggcaggaactttatgagcgatttcatgatggggggggttcaaggtgtggttcaaaaaactgttgtggctccaatggagggggggaagctgtttattgaaaacca

SEQ ID NO: 57042 - DNA, 572 bp, Zea mays
  Clone ID: MRT4577_152010C.1
gctaatggtttttgaagtaaaaaaagtgagttctccatagttctctaatataggttgtaattttgttttgtatttatccacataaaaaataagtcacaaaaactatataatgcagtcaatatttttgtttagggagttgttaaatgattgccaaatgtagagagaaaatgagattagatgacaagttgttaaatttagaaagtttatttagagaattgttggagaatagttttcatgttaactacctaaattattgatttaggaagtcttttagagaactattggagttgctcttagctgctggcagcgcctggtggagatgcagattgcggaggccaacggcgctctgggagctggaggctggtagcttgacttggaagatgatgggcctcacagtgatgggcctttgagaggcccaatactctgaagtgcctgaaatgtgagttaaacgtcgaaagacgtttaaacgacacgaaacggacatttaaacttgtttcacggactttcaaggagatgtgatcaaaacgtccagatgcttcgaactcataaacacatttttaccggttaaacta

SEQ ID NO: 57043 - DNA, 504 bp, Zea mays
  Clone ID: MRT4577_152011C.1
gattgtcctttctttttttttttttttgtttttttttctttcttttttttttttgttttttcattattctttgtgtttctgtttttttttctgcccccacggaaataggcactactttactgataacttaggggcaactccccgcagaaaaaaaacataagccgacagagttttatgcagacaaaactaggggggggggagagaacttaaacgacaaaaaatttggggggtccctttaaaaccctgaataatctttgggggcccacgaaagggtaaatcatgattgaaccccgacattgttgtgcaccttttttttcggttcatctcagccccctacaccaaaatggccattttttttagccttttgggtaagggacatgaatgtttctttctacacccaaaaaattttgggggggcaatttttttggggttcctgaaaaaaaaccaccctttgggaaaaaaatttttgggaggagcccggagaaatctttttcacaactgttt

SEQ ID NO: 57044 - DNA, 244 bp, Zea mays
  Clone ID: MRT4577_152012C.1
agggcaaactgcgcaaacattaacaaaatgctgacattcacatagtttaaaacattccaccgtacttagcaagttatcagagctcatcttacgctcaaaccgcaaaccagacccatcccacatactaatagcagtaggtccaggattccccatacccgagagagattttgctgctgaaacagaatcaaaaggactcgcacattgcagccctatattcgacagtctgttgtgaggccgtatcctt

SEQ ID NO: 57045 - DNA, 1288 bp, Zea mays
  Clone ID: MRT4577_152013C.1
cgcacgcacgcactcgcctccgacagcgaccgcgcaacgtccttctcccgcgcctcccggccggccggtccctgttccctctcctcccctcggagcagcaggagcaggagcagccgcgttcgtcctctgcgctgcgcggcccgccggcctgaccaagcaaagcttatcggccggagccggacgaacgaacgatgcagcaggacctcagaaactcagagagaagaaacccggaacaggcgcatccagtgatgtcggcgagctcgaccaactccgcggcttccccggccgtgtccggcctcgactacgacgacacggcgctcaccctcgcgctcccgggctcctccgccgagcccgccgccgatcgcaagcgcgcccacgccgaccacgacaagccgccatccccaaaggcgcgggccgtgggctggccgccggtccgcgcgtaccggcgcaacgcgctgcgcgacgaggccaggctcgtgaaggtggccgtggacggcgcgccgtacctgcggaaggtggacctcgcggcgcacgacgggtacgcggccctgctccgcgcgctccacggcatgttcgcctcctgcctcgttgccggagccggagccgacggggcggggcggatcgacaccgccgccgagtacatgcccacctacgaggacaaggacggcgactggatgctcgtcggagacgtccccttcaagatgttcgtggactcgtgcaagaggatccgcctcatgaagagctccgaggccgtcaacctatctccgaggacatcatcccggcagtgattgttgttggtgtggacgccatatgccctacgcggcttatctctccgaattagttcacagagtgtgtgctggaagaggcttggctgctcaggtcctccatgcacacgtcatacaccgtacgtagggtgagggttcagtctgttgctgtgtgttctgtacaggccacaccacacacgcccccatggaaaactttttcagtttcgagtgcccctccctctcggccggacggtttggtttttggacgacgccggcgaggaggcggcgctagcacactagtagctccgtttccgtgtgttctttcatacttggctttggtttccgtttcagtcttcggccctcggtcgtcttgtctcgactctcgagggatccatgtatacacgaacatggtacatgctgtgtgctgtttccattgtataaggtcaaagaatacaagtacgatctgtttctgttctcgtaaaaaaaaaaaaaaaaaaaaaaaaaaggaaaaaaaaaaaaaaaaa

SEQ ID NO: 57046 - DNA, 769 bp, Zea mays
  Clone ID: MRT4577_152014C.1
ggtacaaaccggccttccggtccctgttccctctcctcccctcggagcagcaggagcaggagcagccgcgttcgtcctctgcgctgcgcggcccgccggcctgaccaagcaaagcttatcggccggagccggacgaacgaacgatgcagcaggacctcagaaactcagagtgaagaaacccggaacaggcgcatgcagagatgtcggcgagctcgaccaactccgcggcttccccggccgagtccggcctcgactacgacgacacggagctcaccctcgcgctcccgggctcctccgccgagcccgccgccgatcgcaagcgcgccgtacctgcggaaggtggacctcgcggcgcacgacgggtacgcggccctgttccgcgcgctccacggcatgttcgcctcctgcctcgttgccggagccggagccgacggggcgggacggatcgacaccgccgccgagtacgtgcccacctacgaggacaaggacggcgactggatgctcgtcggagacgtccccttcaagatgttcgtggactcgtgcaagaggatccgcctcatgaagagctccgaggccgtcaacctatctccgaggacatcatcccggcagtgattgttgttgctgtggacgccatatgccctaggcggctaatctgtccgaatttgttcacagagtgtgtgctctggaagaggcttggctgctcaggtcctccatgcacacgtcatacaccgtacgtagggtgagggttcagtctgctgctgtgtgttct

SEQ ID NO: 57047 - DNA, 161 bp, Zea mays
  Clone ID: MRT4577_152015C.1
aaaaaaaacaaaggattcatccaaaaaaacggggagtactaccaactggggcggcccgtctagaggagccacactgacgacacgcacaaccgacgcgacaactctgtatagtgcaccgagacatcaacaagatgggctacttttacaaggtgtccaaggac

SEQ ID NO: 57048 - DNA, 617 bp, Zea mays
  Clone ID: MRT4577_152016C.1
gggaaagagcccgagcccatctgatcctcggattcagttcttttccccctaccaaaaggccgagcccccctcaggcctcagctccgcctccgcgctgccaaccatactcgtcaagccgtcacactttgtctctctcgtgccccgatactctttttctttttttttcttttctttttttttttttttgcttccgggagcagcaaccgtcgccgtggccccggcttggatattccatcagttttcgggttcttggataggagaaagcggggcgctcaattccccccctcctgatccttgttccttgatcgccgccatgagcaacacgctgcttcgagtctacccttccgacctgaagatgccattcgagctcaggaagcagaactcagcgtgtcttgagctcgtcaacaagaccgaccggtgggtggctttcaaggtcaagacgacgaaccctaggaagtactcggtgcgctctgcctccggtgtcgtgccgcccaggggatcctgtggcatcacaataacgatgcaagcgcccaaggagatgcccccggactaccactgcaaggacaagtttcttgttcagagcattgctgtggaggaggggacgacgcagaaggaca

SEQ ID NO: 57049 - DNA, 862 bp, Zea mays
  unsure (1)..(862): unsure at all n locations
  Clone ID: MRT4577_152017C.1
ccagcgtccgggccatcccgccgcccaccctttccccatccgccgaacccttcgcctgctgctgtgctgcgtccgtctggtccgaggcgtttccgttcctgacgccaagaacgagctcttctacgtacgcctgcacgttgagtttagatctctgcgtccccaggcagggccgaatcgagttgaaggcaggcggcgagaagagccaaagatgggactcgacgcaaacaacgctctgctgcacatcaagagcgcgttgcgttcttccgccaggcttgcctgccagtccgcgtccgagtaccccgtggcgctcggcgtcggcacgctgctgctgttcctgcacaggctctgccctgccctgctcgctctcctcctgtcctcgtcgccggtgttcctgctaaccgcgcttctgctcggggcgctgctgagctacggggagccaggtgacggcgctccggcgaccggagacggagagggctcgtccccccctgatgctgtggctgtggctgtggctgtggctgtatccacaccatccgttgctgagtcttgtccagcagttgccgtggaggttcagcgtgtcgccgccgtcgcccacatgccaaggagttcttctgcgagccccgttgtccgcgccgaggaaacaacgtccggtaccaccttcttccatgaagcccaccgtgacgagggcagtatcgtcgcatctgtctctgctgacgacgctcttcgccgcgcggaagttgntgttgtggaaagagaggagcagccggccaccaaggaaatctgcgagaatgttcagctgcggcagtttcggagcagcgctggtgaagggtgttcgatcgaagtggacagcanagcttctggagct

SEQ ID NO: 57050 - DNA, 1532 bp, Zea mays
  Clone ID: MRT4577_152018C.1
gggaccctcgaggccggccgggatcctttttatgccaaccgaaactccaccctcctccagagaccgagcccatctgatcctccgattcggttcttctccccccaccaaaagaccgagccctcaggcctcagctccgcgctccaaccgtactcgtcaagccgtcacactttgtctctctctcgtgtcccgatacttttttttttgcttccggggagcaggagccgtcgccgtggccccgccttggatattccatcagttttcgggttcttggattggaccttccggatcactggtttcttggataggagaaagcggggcgctcaattcccccctcctgatccttgttccttgatcgccgccatgagcaacacgctgcttcgagtctacccttccgacctgaagatgccattcgagctcaggaagcagaactcagcgtgtcttgagctcgtcaacaagaccgaccggtgggtggctttcaaggtcaagacgacgaaccctaggaagtactcggtgcgctctgcctccggcgtcgtgccgcccaggggatcctgtggcatcacaataacgatgcaagcgcccaaggagatgcccccggactaccactgcaaggacaagtttctcgttcagagcgtcgcggcggcggaggggacgacgcacaaggacattgtccctggcatgttcagtaaagcgccaggtaagttagttgaggagttcaagttgagggtggtctatgtccctgccaaccctccgtcaccagtgcctgaggaaacagaggaagatgacggatctcttgattcagatgtggaccatgaagtggggacaccatcgacgtccaactgtgcagcaggacaagggcatacatgtagatcacaagcttcagatgacgagggtgactctacatccaagttaggactggaaagtagatatgcagaggaaaacaagatggttcagaaagacctgatacaggatgcctctatatccgagttagaactggaaagtagatatgcagaggaaaacaagaagatccagaaagagctggatctcctccggaagacacatgcatctcctggggacttctcggcgacgtctgtgctgcttgtcttcttgttatcttcacttgttggatacctgatgttcggaagcaaaacttagcaagttcttagaagcaagataatgacagcacatcattctgcggctccggcacagctctatcgtcttttgtgtattgctccttttagtacaaaatatatatagttaagtagtccacaatacatgacagatactcctcccttgctagtcccgtatgaacagatactcctcccttcttgagtaggtgtttttttctttctaagggctagtttgggagccacaaaaccggagtggattgaattgtctgaaatctccttcttaattaattttaaataaaaagtgaattttaactttgaatttggcataaaagcaactggtgtcttctttttaccttcccctctctctctatctccctgcctgatggctatcttcaggtttcaatt

SEQ ID NO: 57051 - DNA, 316 bp, Zea mays
  Clone ID: MRT4577_152019C.1
cggacgcgtgggtgagatatattcgttttagagtctaacgctgggagtgagatcgaatacaaactgacttgagaagcgatgatcccgcaaatacttgtgtgaacgatccctttttttttctacgagccacataagctccggcttcttacgcgtaagctggcggcaccttccatgtctaacacgcgcagagggcacgcttaccgggaggggctgattgcaccgacaagagggcggctgtggctcattacaagtgttaaactcacgtcttgaggacgggctatgggttagctgattcactcatgccgtacacctctgt

SEQ ID NO: 57052 - DNA, 662 bp, Zea mays
  Clone ID: MRT4577_15201C.1
gggccgggattccacacgatagaacgaaggagtagagtaaccgtctctgttcaagtgctcatcgtactggcacagacacccctccctatcctcttccggtctcgacctcgcctctcttcattggccgcagtctggtcgtgaaacccgacctgtgtgcatcaagatgactatctccaggccgcttgactacaggaagagaacacgagtcgacaacaatatcacaaagatggactctgatcgcgatacaaccaataaggcaaatcgatcatcctcgttgcacctattcgtcttgatgtctctgtcttcgttgtggtggccgcatctgtctttcatatcgtcacagaagcatctgacggtgcctctatctctgaagacaagtggtcacttcactctgtatcactctaaagtctcgaaacacgctctgactcatgctgtttgtcacttaaaaaatatacccgtggatgtcgtatctggcactctacaatggctccattggaatgcagcaccatgatcagatctatgttataatgtatactccatatatatgcaacgatagtgataatgttaagtcatcttatgctgacacgataatatgttcaatccatcattgattacgtagcgcattatttgactcaaaaaagagcccctagaggcctctagct

SEQ ID NO: 57053 - DNA, 229 bp, Zea mays
  Clone ID: MRT4577_152020C.1
tacaactgggtcgcttctccgtctacaacagccgccatcatggagggttggtgagttctccggtgtccacaactcttccagaaattggatccagattattccttatgtgaggtatcttctggagttttcccgagacccagtcacatcttcttgctactgccctgatcataagctggtctgtcactgagatcatcaggtactctttctttgcaatgaaggaggcatttgg

SEQ ID NO: 57054 - DNA, 475 bp, Zea mays
  Clone ID: MRT4577_152021C.1
ttttcccctccatgacccgcggctgatcgcttcagcgccctccgcatcaagcgctcggcatggcggactgcacgctaccggaactacgaggcatgatctatcgtccggcccaccttgccttggacacgagaggtcgcggatctgagcgctacctacaccaccctctctacgggaacagagagggggtgaacacccctgacggaagtagcgtgctccgctgcgagtggaatgaagcctttgttggatgatctcacgcagagggatgcgaccctttacaggtgcgtctggaggatggtcaccctacctctgctatactcaggcgtgctccgggccaggtgctgtttttttctcccgcctgtcgccgtgtttggcaaggacgaagggtgcttgaactcgatcgaggtctacggtgatgtgcgtgattgctgtatactagcgatgggcacgtgctgatttatcatcttctctctgaact

SEQ ID NO: 57055 - DNA, 180 bp, Zea mays
  Clone ID: MRT4577_152022C.1
ggtttgtactgtttgtggatgatcatggaaattcatgggttagttagagcagtggaagtgaaattggaagctttcttggttgggctatggcaatgatttatatggggtgggaggattaaatagatttagttaaatatgcatagaggtcatgtttaggggatgataatattgatgtttatt

SEQ ID NO: 57056 - DNA, 301 bp, Zea mays
  unsure (1)..(301): unsure at all n locations
  Clone ID: MRT4577_152023C.1
cccttcccacntctccacttcttcatctttngattcactccactaacctcggggatctccgagcattacctcactctcacctttccatatctcacccatcatattttggactccaacaacattatttgtgcttctaaccctcatcatggccactacctcacagcatcttctatnttccttcgtaacattatcaccaaagaatttgattaacatattctcaactttcaaaacaacaactcttcctactatatagatggcacccccaacaactttaattctaatatagtttacattccaccaa

SEQ ID NO: 57057 - DNA, 234 bp, Zea mays
  Clone ID: MRT4577_152024C.1
cagttataatcaatttaccacacttgcttgaaggacatggtctaaagaggcttgtgggagtgtcctattataagaaatccctcattataaagcttgcgagcacaaacatacccactgtcatggacattcacgcattttcttagagattctcaccacctatactatctgatcctcgcattgcttataacatctccaaactgaagatcacaccatatcacttggggttatttatta

SEQ ID NO: 57058 - DNA, 212 bp, Zea mays
  unsure (1)..(212): unsure at all n locations
  Clone ID: MRT4577_152025C.1
cggacgcgtgggcgcgcgcgcatggctggcttacttcggacggccgcgggcctcgcgcccccgccctcgtgttccccgtccgcacgggagccgcgtgggcggtgcctgcggctggcctgctcccggcgcgcgccggtccggggggggctgncctgatccctgccgactcacaacgtatcttgtcgagccgggcggcggctcctgctcctgtg

SEQ ID NO: 57059 - DNA, 386 bp, Zea mays
  Clone ID: MRT4577_152026C.1
cccggggctcagtgttcagctagctcacacactatactctgctctcgttccttctctagcagcacgtacacgttgtggtgtagctggatcgatcaacaagaaccccagccacgaatccacgatagcattcccatggcgtcgttgaatcagcatcggtccatggccacggaccgagagctgttccggacggtgcggcaggcggcactgaaccacgcgaggcagctgtaccaccggctggtgaggcgcctgccgcacctcctggccgtgacgctggtcgtgggcgcggtccagctcgtgccgccgtcgtccgcgccgctgccgccgctcggggcgctgctgcgcgaggcggcggcgcgcgcgcgcgccgacgcggggctcgtggccgc

SEQ ID NO: 57060 - DNA, 167 bp, Zea mays
  Clone ID: MRT4577_152027C.1
tcgccctgtctccccgtagcaaggtgacactgacagacagttgcgtgcggtctggcgggggggcatgtagctcaagcaagacggctatgtacctctcacccttggcataaagacgtgtaaaggaaaacatatatatatactccccggcaagcaagatgtgttttttc

SEQ ID NO: 57061 - DNA, 457 bp, Zea mays
  Clone ID: MRT4577_152028C.1
ccctcgaggctcggccggggacataccctataggactccagacgcttcttattcggagagaagccgttcacacgtctttggcagtaggaaccacagaagagcatcccaggaggtgaggctggtgctgagtactcgacgaagacatccacgcgacgtatgcactgccacaggcatggctgtgtgacatgtgaagggaggagccaagacacgctgccatctctgcaccaagcagctatgcgagatgctaggtgccagaggagcacaggacatggtcatcctcaagctgtccattcagcgcctggcgcggtagatcgcacactactttaataccgatctacgcttccagagctatgatgtctgcgttctggaggaggttgattgcagcctaccttgccatgattttcaaggacaccaacctctgtgccatccacgccaagcacgtgaccatgatgcccaa

SEQ ID NO: 57062 - DNA, 207 bp, Zea mays
  Clone ID: MRT4577_152029C.1
gcatgaattggttccagaagcactcggagcgcaaacgaaaaccaccggggttaattcagacagggggaactcttacaaagagacatgtagagttactggaatggacatactgcgatgaaaatacaacagatggtccatacaacaaggctgctttctacgaatgggagatggggggtagggggtggtgccaaaaaacccctgagggag

SEQ ID NO: 57063 - DNA, 351 bp, Zea mays
  Clone ID: MRT4577_15202C.1
cggacccatacgcccacgcgttcactttctgcctactataagcaccacaaggggtccggcattcaaccaactacactgattgaactcatatccttatttgaaacaccaactaccattcagccagctaaacatcaacctacctaaaactaattccttttcatctaacgcaacattgatcaacgaactctactgcttattacactgcagcaacaactactaccatacagcctaatagctgacctgagccctgatacattcatgacacaatatcagctcattgccgctctaccatcacgatctcgactaacgaattgcaccacttttacacactgcaacaattagcttccatta

SEQ ID NO: 57064 - DNA, 567 bp, Zea mays
  Clone ID: MRT4577_152030C.1
ggtacacgcggccccccctcgagctttttttttttttttttttttttttttttttttttttttttttttttttttttttttttttttttttttttgggacaaaaaaaacaggattatcggggggaaaaaactttaatatttaaaccccccaaccggaaaaaaaaaaaaaaggggccttggggggaccaaatatcccacctttggccccccaggggaaaggaaaacaaacaaaggggaagggacaagtatgcaagctttggaacgggggggaaaaacaactttccccgccccattttttttctctaactctaaaggctactttgaaaaaccttaccggaggaacggcaggaacaagaggatgggaagaacggggggcccgcaaaaggcccgaaaaaccaccctttgggaaaagggggggaggcaccccccggcaggggaaggccgccccaactccaagggggtgggggataaaaaaagggaggtgcaccaggccaaccggatttggccggagaaattgaaagtgtaacctgctttttcaggaggggagggcgccccaaaaaatgccct

SEQ ID NO: 57065 - DNA, 374 bp, Zea mays
  Clone ID: MRT4577_152031C.1
aaaaaaaaaatgcaaggatcagccagaattcatccggtatgagaaaaataccagacgggacaacaggatccgtgagaaaaaatacgtacaacgcagagcatggctctaaggaaatgctacatagctaacataagagctctgaacaaatactgaacagaacccatcctggttaagaaatccctagtgagtgaagagggaaaaaaaaaatgcggagcccagaaacaaagccaacatccgacactgcacgctgggggacagcaaccaattactaacaaatggctagggcaatatatggatcaggctcgatggcaacgaactattttacagaaaacacgcatgaaccgcgctcagtgcccagggggacagagggaggt

SEQ ID NO: 57066 - DNA, 389 bp, Zea mays
  Clone ID: MRT4577_152032C.1
gaaagacaaccatttcagactctcgatggtcgtcatcgctcatccatggcaccgcatcgccaagatttgatcggggccatccattattcaagtcgttttgagtgagccgcccaatcgtgccggagagagcagcacatcgttgatcagcgtgtcgaggttcgcgatcgacctcgccgccgcccccgcggcgacctctttccactccgccgccctgcgcgccatctccttccccttgtccccacccatcgcctcccgtatggtcgcctccacggccttccgccgcacgtcgtcgccgaccttcatcgccacgccccactcgacgcacttgtaccggcagttggtctgctgctccgcgaagaagggccaggacagcatcggcaccccggagc

SEQ ID NO: 57067 - DNA, 117 bp, Zea mays
  Clone ID: MRT4577_152033C.1
caccggtctatctacccggcggtcttaccgtggtaccatcgtgtaaatgagggtagttacggactacagcttgcccagaggcaccctcccaccccggtgtccaaccttacttgcaac

SEQ ID NO: 57068 - DNA, 214 bp, Zea mays
  Clone ID: MRT4577_152034C.1
aatctataggatttattctctttaatgagattttttttatcattttttaattttatcttcttttttttcaactaacattaccaaatacattctttgttggtttaactacttgtcttaattgtctttttattcaaacaaacatccaaaagcacaaaaaatggaactggcgggaaaaaaacatacactctatgataatcaacaccaaatttaagcc

SEQ ID NO: 57069 - DNA, 885 bp, Zea mays
  Clone ID: MRT4577_152035C.1
gccggccgttcgaaaaagcggaactttgcaaacttcgccgccgctccagcttccggtctctggtcaagcggccactccaggctccagcttccgccaacggccaccacgcgtcgccgctcggccgctagaaagtatccggaacgcgccacgtggacctcctcctccgcttcgagaagctctcacgagtcacgcacgacggcggagtggcggaccgacccgatcagcagaagcattaaacccccaaaacctctgagagacgaaaccccaaggcggagccggaggacccgatggaaaagaaggatctgctcgccgtccggaagaggctgcctgcggcggcggccaagcggaggcacaaggtggtgacgcccgctaaggccggcgccgggcgtctcgcgaaggtgatcgctggatacctcgcgtccgactcctacatgtacgcgccgctgatctccgctccgccatctctcccaccgccgcctccggcgtcttcggtggcgccatccgcgacgcctcttatttccactcctgagaaagaaatcactggtgcaaaaatacagaggctctttgcaagctacattcactgtctagaagtatctgtggacatgttcttggagctgtgcttctagcatgacctttaagagctacaatacaatagttgtttctatgatctgttatgttaatgactaggtactgtggcttagcaatctgccttcttctggagttctcatgtgatcgctcactatttaatatagattgtttagttaagtagctttatcttgtggtctatgttcactaatgcatccaaacttctcatattgcccagtatatcatctgttcctgtctatttttgttaaggattcgatcaggagcgattgagcgctccca

SEQ ID NO: 57070 - DNA, 152 bp, Zea mays
  Clone ID: MRT4577_152036C.1
catgctgtacgcgaggcaccatcgtgagccgtcctaacatgttctattaatttttggcccataaaaactcttatcaatggccgcttcagcatacggtatgagattttggaccatgttggtcacatcgggatgaactcaggaaaaccaagctg

SEQ ID NO: 57071 - DNA, 599 bp, Zea mays
  Clone ID: MRT4577_152037C.1
cgccgaattaagcctccatgtggtccaaggctcttacgacggcgttggacgtggtaggcgcccttctggtcggctaagcgactgcagtgcccgcgcgcattacggcggtgtggcgtgatcataactctggccatgttccactatcatgctgtgccaccgcgtcgaccgtgggtgcgatggcgccttatacacctgggacgccttgatcgaggtcgccaacaagttgccccaggcttcggtggccacctggggacgagccatacgcgcaggccattaactcgccggcttgttggtggctacgcgccacgaaaccactgcagtatggaggactgttccgggcggaccttttgtctgtggattctgcctgttgaaggaacagaaccctactgacccaccctactatggacgaggacccatacaggtaactcatgagtacaactaccggctcctcgggcaagcgctaaacctgaacctgatgggcaacccggacctgcttgcgagcgatccactggtatccttcattacaggcatctggttctggatgacaccgcagactcccaagccgtactgccacaccacgatgacctgtgcctggactc

SEQ ID NO: 57072 - DNA, 651 bp, Zea mays
  Clone ID: MRT4577_152038C.1
cctcgagttttttttttttttttttttttttttttttttttttttccaattaatttttttttcttttttaaactgtaattttggggcacccggggagaccaatttttggttccttcaaattggggggcccaaccttaaaggggcccttaaggcccaaaacccccttaccaccggtggcaccccccattggaaaggaccttcctaaggttaaacccctttccaccaggttttaaaacaagggatttggttgccttaccaaccttaggccaagggccacacccttctttgccgttgggcccagggttggaaaaccttttattctacccttggggattacaaacccctccacatttattttgaaggacctggaaaaccccgcccttgcaaccccccggttgggcctgggggccaataacggaaggcttaatttttttctgggggcgggcttttcctttttggcggggggccatacccttgtccccaccccaggcggccggaagggggttgagggggcctttgtttcctttgccggaaataaggaaaaggtttttcccccccgggtggcccccccagtcacccggggccgccccgggggaacccagggccaggcgaacttggttccaagccaaccctcccttggggccaatttct

SEQ ID NO: 57073 - DNA, 346 bp, Zea mays
  Clone ID: MRT4577_152039C.1
agggcatggtatgctgcttgaaagccattatgaaccatggcataccgtgaaagggctagccccccagaacaggggcgctgcagccccggatagagacaccgggagaaagagaagcacggacacacgcgaagcgccaacaagaagggacaaaaggcagggggggggggggggggggaccccccggggggggggcggggagagggggggggggggagggggggcgcaaggcgggggcggggaaccgggggccccgggcacgggccgcgagccgccgagcgccggtgccaacgaatgctggtggcggcccagggaggccggacgatcccagaagatgcctgccagatcg

SEQ ID NO: 57074 - DNA, 391 bp, Zea mays
  Clone ID: MRT4577_15203C.1
agagcatacgggatgccccggccaagcttgaacccttatgagcggcgccgccctttttctattttttttttttttctctttccaaaagtgtgttttttaaagaaggaagcggaccaacaccaaaccaaaacctggtgcggtttgtactttatgaagcaacattccctagacctttaacccgtattatggttcaccaccatcaagctttcatatcccacaagcagtgtttacaggggaccccaactctccctgggtggcattttttatgttgccgcaaaaaaggatccattccccgctaacgaggcctattcagcttcctaatttccaggggctcaaccagcgccctattaaaggctgtaaaggatttaaggaccccccgggccctggcttt

SEQ ID NO: 57075 - DNA, 146 bp, Zea mays
  Clone ID: MRT4577_152040C.1
aggaaccgcatcggcccgcggccgtacgctcccgagctccatccgtcgcgcctcgaccgagatcgtccccggcgattgcttccgctgtggccgcttcatccactacgcggtgcctgccgcggcctccgaaccgctgctgtatccgt

SEQ ID NO: 57076 - DNA, 237 bp, Zea mays
  Clone ID: MRT4577_152041C.1
atcttcatgtgcgccgccaacgcgccggcgcgctccgaccctgcgcctcagcctggtaccgtgcctgtgccgccctgagccatcgggcctacgccctgcggatctgcctggtaccgtgctagtgccgactgcgcatccgaccttcgtctgggactacgaccatcgcggatacgacttgcgacttaacccagcacggaccgccgacggccggacggccgataggagccactgacccga

SEQ ID NO: 57077 - DNA, 243 bp, Zea mays
  Clone ID: MRT4577_152042C.1
agctcattaaatcaatatactagagatagcaactaaaccggttctaaaccatgcgcgtgttgttctgagacttggttatactggcatcttactgaacaagccgaatctaggcatacaagacgaaacagatccagccagccaccacaagactatataccgactccaagcaatgtgcctccaaagaactagtcacagtcgacgcaaggctccactcaaacacccgagctaaatcagcaccagcag

SEQ ID NO: 57078 - DNA, 2281 bp, Zea mays
  unsure (1)..(2281): unsure at all n locations
  Clone ID: MRT4577_152043C.1
caccgnntcggaaaacccggccgggggacgcgtccggttcaaaaccattctccactgttcctccgctccctctgtctcgtcgtctcccatctccggctagggtttgccctttccaccgcgtccgacgcctacctcgcccgcgccactgcagggaccaaggatgtcgcaacagcaaggtgtggaggagccgccgccggcaccgctgccggcggcggaaggcgaggcacaaccggccgccgatatccccatgagcgaggccgcggcggtggaggatgaggaggaggaacccgtcgtgggggaaggggaggacggtgcagacggggccgccgacgccgtcgattccgtcaatgcttcagcgaaacccgaagcagagggcgcggaggaggggggcagcgacagggaggagcggaatggtggcccgacggcggatttggttggcgaggttgtgaagttggagaatggggacgggcctgtgacggtgggcggctcggtggacgagggtcgaggtggagatggcggtgacgacaaaggcctggctggtcagaatcagcctgctgtgaaccagcttttgctggcgccggctgaggaggatctggcattgtccaagatctcagataattccttcatgttcgattacaccactggtggcgatgactcagggactgaggaggagcaggctgccttcatgaaggagctggagcgtttccacagggagaaaatgttggagttcaagccccctaagttttatggtgaaggattgaattgcctcaaattgtggagacaagttactggattgggtggctatgatcaggtgacatcatgcaagctgtggcggcaagttggagagtcattcaaacctccaaagccatgtacaactgtttcctggaatttccgtaacttctatcagaaggcactccttgaatatggggtacacaaaatcgacacacgaaagtatcttgttgctccatttcatcttccacgtctacttggtggttggggcttatttggtggaagcatgagatctgaatctggcagcccgacaatagcaaatgcctagggccttgctgattgcaagccttctcgacgcttccgtgctaatgctcgactgtatcaagttaaactcattggttgacgtggttctgtgtgtatgcgggatagaactcctaaaagcagtggttctgccaagaaagaaaggacaccatgcgttgaagatgatattgggataccttataaatcctataagctacaaaaagactcaatggatattgacatgggccctcttgctgattgggtgaaaataaatgttaggaaaaccaaagattgctatgaagtctatgcattggttcctggccttctgcgtgaagaggtacatgttcagtctgaccctgctggtcgtttgatagttactggagagcccgagcaattggataacccatggggtgtcactccattcaagaaggtcattaggttgccttcccgcattgatcctcaccaaacctctgcagttgtcaccctccatgggcagctatttgtgcgtgcaccatttgaacaatcaaaataatgttgatgccacaatgaagcacaatactacaagtttgccttatgagtgggattatatcgttatgacatgagcttagaagtgctcaccctgaccgtcgtccaaaactagttccttgctgattttaatgcttcaagcctcctccatgctagatctctcatgtatcaagttaaactcattagttgacatagttctgtgtgtattcggttgtgcccattggctgtgaattgtagctaaagcaaagttactaagcctagagtttaggatgttgatagtctgatgctcaacatgtccatggtttcttttcaatttagtctgcataaaatgtactgtttgtagcaatgtagtatgtagcttgttcccagtatttaagctccggaacatgaagagaggtagagattcattgtatgtaactgttgctgttgcattgcaattgctattcaacttgtattgtcaaacagtttaggatgttgatagtttgatgctcaacatgtccatggtttcttttcaatttagtcggcatagaatgtactgtttgtagcaatgtagtatgtagcttgttcccagtatttaagctccggaacatggagagcggtagagattcattgtatgtaactgttgcccctggtgcattgcaattgctattcaactttgtgattaccgtatgtcaaacaatcttttactctatggcctcctaaaaaaaaaaaaaaaaaaaaaaaagag

SEQ ID NO: 57079 - DNA, 381 bp, Zea mays
  Clone ID: MRT4577_152044C.1
gataactaggaggttcggcatgggtacatgtattgtcattattgtttgtcgcgagtacctttgtaaatttagaaatgagtctaaccatattttcttagttatgtgtgagatactggaggccaccaaagctagaaatacgttgattactatatattaatgcagagcatggagcaaagctgatcttttaaaatatacatgttacctccttatttctagccacacggtcacgtttggacgaccaataataggcttgcaacccttcaaattgtgtccatcagcttcccaacgtgcatatcgccatcctctgcttcgtgtcccatgtcaccacccccactcttcctcttttcatgcaatgcaaattaagcagatccaacgtggatg

SEQ ID NO: 57080 - DNA, 447 bp, Zea mays
  Clone ID: MRT4577_152045C.1
atcaaataatcaagcctgataataatgagccatttccggaaagcacaataagtgttgagcaagagtgagactagtctccattatcatccacacaacattttgagccttttcggaaagcccaataagagttgagagccggagtgaaactagtctccatcattatctaaacaacatcccgagcctttttggaaaaggcaactagggggggaaataattattttttttgttacccgagataccaaaaaattttacttttcttcttttctcaaataacttggggctaaagggtttataggcttttggccccttaaattatatatttcttttcgcctagtcatgccgacaaagtgctcaacaacatccttggctaccttttttctttcctttcagatttttttgactttggcttcttcttagttaaatagggcccaaaaaaggcactttttt

SEQ ID NO: 57081 - DNA, 421 bp, Zea mays
  Clone ID: MRT4577_152046C.1
attcggctcgagcttggtcttccatctcaattttttgataccactgtcgattttcataatgggggggcttaaaacattgttctggggagtgctccatcacttgcttcagatgttggtgagagctcccgtacagtgctctatccatgttatacaactactgaaaactcactgtcatccacgtttacattggttgactccgcagtaaaactttctgggtatcaggatggacctccagaggtatgttcttcatgtttaacagctgttgtttagaacaatttgacatctgatatgccaggttcttcaattctcgaggtgctgacttcagaacctgctgaaatatttttgccgcctgaaagaatcacttcaccatctgtttgtggttcagagcaaccaattggcaattaatgcacaatgagttctg

SEQ ID NO: 57082 - DNA, 385 bp, Zea mays
  Clone ID: MRT4577_152047C.1
aggacgcgtgggcggacgcctgggcctgcatgcctctccttcatcaccaccaccaagctgaacaacagccagctcgagaaaataatgaagagccgcagcataggcatcatcggccgagcccttggcgctagccctcgcgctagtggcgggcaccgccccacaggtagcggaggcaaagaagaatatagccgcggacagcagccaggcggcggaagccaacaagatccaggaccacctctgctcgacgctgtgcgaaggcaagaaagggacggacctggtcgtgtgctaagagtcctgcactctctcccaggaggccaacctggtgccgtacagcaggatccagtgcaagggcaagcgcaccgagcagaaaggcatcacggcgcca

SEQ ID NO: 57083 - DNA, 856 bp, Zea mays
  Clone ID: MRT4577_152048C.1
gccggccgggtcgggaaaaaagcagtccaacgcgaagcactccactccactccactccacctgttagaaacaagctagctcaagttctctcaacttcttgccaggaaagcgcgcaggaggtcgacgggaacgaccatggtcagcgccaagagacttgtgcaaatggccaagaagtggcagaggatggccgccacggcaaggaggcggatcgcactggcgccgccggcaaaaggagccgccgagggatcgtcgccgccgtgcagcacctcgcgtgtagctgtagccggcaagggccactgcgtggtgtactcggcggacggcaggcggttcgaggtcccgctgccgtacctcgacaccgccgtcttcggcgtgctcctcggcatgtcgcgggaggagttcgggttcgccggtggcgacggcaggatcacggtgccctgtgacgccgccgtcatggagtacgtcatgtgtttgcttcggagagacgcgtcggaagaggtggtgagggcgttcctgagctccgtggtgagccggccttgcagccactgtggaaatggctcgctggtgcagtccaccacgggagttcgccagcaagctgctgtttctagcttctgagctgaggattaattagcacttagctagattgttttattattattattattattattattattattattattattattattattattattattattattattattatccttgagtgatatatgtaaatagtttggagtttggaaatgaaggttagatacaattgttcaaaaaaaaaaaaaaaaaagattacactgcaacaagttctctcgtatctaccaaccgtcttctgaagcaatttaaagag

SEQ ID NO: 57084 - DNA, 228 bp, Zea mays
  Clone ID: MRT4577_152049C.1
gctagctgtaatagtgactatcttatctgctagatcaaccgtgttgtcgtgttttgattctctgtttgttggatggtctacaacctggacagcaacaattatttcttaagaacttcaccattatattcacagccgtgtgctatcccatcgaataagccgtataccaacggtcgggcggcgcccctggcggtgacgctgacagcggtgttgacgaccaccactacgagc

SEQ ID NO: 57085 - DNA, 516 bp, Zea mays
  Clone ID: MRT4577_15204C.1
atggcaaaatggaacggctattggtattggtggtctgacggccacactcacttcaccaagttgctttgtcttgatgcaccttttgtgatggctcctaggggtggcattgggtacgagtatagacaagtaaccatatataggtctgcaccctacattggtgtccgacgcataccggcagcgacgtacggtagaccaaggtggccaaccaggtggtcaacgcgttttccaccattgtgtgagtgttcgagcaaccacgactcttctacaagatcacaacctcgtgcattcgtgctccatttcgggtggcacaatacgaagcttacactgctaagcttccgcgacatctactacaagaacaccgccaagcaacacgacacctattgtgtgcgctcttcttcatcttcaacagccaatcacatcgagactggccgggtcgttagcttctgcaatgataacgaagagcgtagacgacggctcctcgcgcatgagcgcgtagagatatggcggccatgctaa

SEQ ID NO: 57086 - DNA, 464 bp, Zea mays
  Clone ID: MRT4577_152050C.1
ggacctttgggctggtttatgtgcttgtctaggtctaacgcgttcgagtgagctacttggtggtgttttgagtttgttgtatgtaggggttagcggtggtggtggtggtggtcacgggtagtagtagtagtagttagcgggtccttttggttcgcttcggaaacgatgattttggatattgctcgattacggcaaaatcggcagaagtaataaagacgtgcgaggaatagacgaaggttgaagtctatctagggagaagtagtgtcgtagtagcagtccgcaggcggcgccaagaccgcagtctccgtcactagcgccaactgcctaccgctaggcggccgtccaccgctgctcgtaatcgacgttgcgcatcttttgacgtagtacgctggcactcgatcatcgaacccgagatggtcctctctggacgcccctctaaaaaaaaaaaacaaaagggttggttg

SEQ ID NO: 57087 - DNA, 1149 bp, Zea mays
  Clone ID: MRT4577_152051C.1
ctgccgacactaccagtacgaatatacgatactaattgcctgggcagggcccgcgctccctttgcttcctccaccaccgccttgtcccggcggggtaggcaaaacaagataaacatcaaccccaaccccaacgactccaagtcaagagagcggcaagagcacgtgccggccgccgatcaaatccaccgagcaatcgcgcgcggccgccgaggtgccaaggcggcggcggtcggtcggtctgcgatatacgatggcggcgccttactacggaggtcctccggcggcgccggcccccgtggcggtggtgtccccgcagttctgtgcgccgtacgtggtgcccctgacggtgaccaagaaggccatcagcctctccgacggcgacttcaccgtcaccgacgccaacggcgccaccgtgctgcaggtcaagggcgccgtcttcagtatccgccaccgccgcgtcctcctcgacgccgccggccagcccatcctcaccatgctggagaaggtattcagcatgcacaacagatgggaggtgttcagaggggacagctcgaacgagagcgacctgctcttcaccgcgaagaaatcctcgatattccagctgaagacggagatggacatcttcctggcctccaacaccgcgcagcaggtgtgcgacttcaagatcaagggcagctacttcgagaggtcgtgcgccttctacctcggcaactccagcagcatgatcgcccagatgaaccgccagtttaccgtcaccaatgtgctgcttggaagggacacgtttggcgtcactgtgttcccgcacgttgactacgtgttcgtcgctgctcttgttgtgatactggatgagattcatagggaacggtccgactgaggaacataccacaccacaccaccaagcttctccaccgttgctcgaccatgctatgctatgtatcatcatcacaggttattcttgtcaattatatactttccatgtatgtatatgtaagtattaatgagttaatacactatctcctgatgtataagtttttcttcatccatttgaatatagacataaaaatcaaatgactattattttgggatgaaaaaaaaaatctacgcgtccgcggacgcatgggaaaaaaaaaactcgagggggggcgcggt

SEQ ID NO: 57088 - DNA, 523 bp, Zea mays
  unsure (1)..(523): unsure at all n locations
  Clone ID: MRT4577_152052C.1
cgaaattcccgaacagacccccgcggcannataaaaaacancatccatttttccaacanccatcattccatgtttctaaccacctttaacatcttcaccgcggttcctttcaaaacccacaaccacctccntcaacatcctcaatttctataccttcacaactctccaatatcctacaaatccatctatttaaccacaacttaattcaccttattgtatgataacaatttgccctactatcttatctcatcttctactgatacaccattctctatctcttatactaccttccttctctatccacatctccattctacactttttttttttcaatcacatatacatcctcctgattactattcctacctaccttaaccaaacctcatatttattccaactctccacttctaataaaccatttttcactccatcaacctcattaatttcaaccttatactcctttctaaatctcacttactaattcccttcacatcttaaacaaatccattccaactttatttat

SEQ ID NO: 57089 - DNA, 435 bp, Zea mays
  unsure (1)..(435): unsure at all n locations
  Clone ID: MRT4577_152053C.1
ccggccgggatggctgtctccgtccggttgtagcgaagtccgacggcgggatccgattgtggcgaagtcacgcccgtgcagtgcgcccacagcaaaaagctccgcggcggtcgcgtgacgtcgcggcaaacggcaaacagcgaattcacagcagcaaacagtgtgaatcctgcaatctccaaacccaagcccggcggcgagatccgcgcggcaggcggacggggccgctcgaccgccttcgtgccttccaattcatgacggtgcggccggggtgggtggtgtgggtggcgcatggctcggcggcggcgtggcagcgcgtggcgtgcgacccggagacgctcccgcctgaccgcgtcctcgcgctcatctgctgcgcgccgctcccctcctcgcgcgcctcgccgncttcctctgccttcccttgctccccgggcc

SEQ ID NO: 57090 - DNA, 254 bp, Zea mays
  Clone ID: MRT4577_152054C.1
tcttgttcgccaggccacgccgcaaggaagcctgaggccgagagaggactgaacaagcgtctcacaggaaactggtgagcccgaccaccacgcggatggtatcgggcgaccgcacaggcgacccccttatttgcttccttcgtcacctcggctcagggtgcttttgccgtcttgtcgccatggcgcgcgaccccaccgccacatacctgccaaacctccgaccctggcttgtagaccttctccctctactctga

SEQ ID NO: 57091 - DNA, 1041 bp, Zea mays
  Clone ID: MRT4577_152055C.1
aaatatctaaaacatagaaccccacagttctaaagccgtgtgacctatattctccatttcagacataattacttactaattccttagttattttcaattggatgagagagtgtcggatgcttcttcagatactatttcttggtccgtcaaatctgcttgacccaaatgcaagttctgctcaaatgtggcaaaaataattgtctcaccaattgtcagcccgcctgcttccagcaaagtttcagagaaggaaaagatggaatgtaactcaatttttggtggccacacaagtgtggagacttgaattcatatatatatttagttaggctcaatattagtgctcatagtcgattacagagtttgtcaatgagttgttagttttgactttagagtacactagcatgtgcattatttgacgaatacaaaaaaaattaaaggcaataatggaatttatgtataccaaagttgggcccagaggaaattcacatcaacggtcgcacaaactttggcctagcctcacaagaaacaaatgagttgtgtttgctggtctgaatgaacaaactaccgattgggcatcaagttaaacgtcaaagggctaggcagatctggaagttacctaatgattttaaagacgtgctcaagaggcatgtcctcgttctgtgccccaacggacgtggaggcggggtcgtccccacgaccccggacagcgaacgagaactcactgccggtgtaggtgaggctcttgcgtagcttctgcctccgttgttgctggtggtacgacgccacgtgctccagcactttctcccagatcgatcgcccctaaggcgatgccatggacgccgccatcgtggccgcgaaggacgaggggagtcggggtgcaagggtgtggacggcgccggatgttcgggggtggggagtggagggggaggccaagatggaggcaagtgggcagaagagagatgtgggagaaaattgcggatcaaggagagcagcgaaggtagtttggggaaggggttttttttcccggcccggccggcctcgagg

SEQ ID NO: 57092 - DNA, 317 bp, Zea mays
  Clone ID: MRT4577_152056C.1
gctctaatattctctcacttttttacacctattctcaaccccgttgttgtgcatcaaacttttttgggggtacaacaatctacacacttccatacataaacactaacaatatttacattttccagcaccaagtaaacacaatacacaccatatgctgctacatttcacctcaaaatgcttgaagatctttttcttgaactcacaatgtttcaaattttcaaaaagaatgatacagttattttaacttgccgatcaacaaaaccaatatataacaccatttttttactcgaactatttaaaccccatatttctcatta

SEQ ID NO: 57093 - DNA, 898 bp, Zea mays
  Clone ID: MRT4577_152057C.1
ttttttttttttttttttgttgtcacgagtcgcaactacacttgtcacaccatcaactgcgcgaattacagcaagaaaactacgtacagagaattagagatgtggcaaagaatgcatgcaacgcaatgcacccacactagatgatcagagctcagagcaaaaggccgcagctgcacagcgctaccgcggcgggcctgagcagcccggtccggccagcgacccctcgtcacctctctcctgaccactctcccgacaagcgagctctccgcggcggctgagcgttcgcaggcgacgtcgccgccgcagactccgacgcccacgtccggcacgacggcccggtcggtgacgcacagccccgggttgccgctcaggtccaggttccggccgagttgcctgaggaacgcgctgtcgaacgggacgacgccgtccagcccgttcttgctgaggttgaggtggtacatgcgcttcaggcggctgagccccgccgggatgcgtccggtgaggctgttgttctccagcgacagcgtggtgaggctggacaggagggcgaacgtgtccggtatggagcccgagtagccggagttggcgaggcggagctcctgcagccgcgcgatgttgcccagctcgggcggcagcgggacgcccatcgggttgttctccatgatgaggtactgcaggtcgcggagcccggagaggccggcggggaggcggccgcgcagaacgatgttgctgagcgccaggaaggtgagcgccctgaggcgggtgatggcgggcgggacgccgccggtgaggttgttggagctgaggtccagcttctgcagctgggcgaggtcgccgaggcggctggggatgcggcccgagaaggagttgtagctgaggtcgaggccgacgaggcggc

SEQ ID NO: 57094 - DNA, 652 bp, Zea mays
  unsure (1)..(652): unsure at all n locations
  Clone ID: MRT4577_152058C.1
gtcttggcacagcaacgacggagctactggttcagaggaaggtgataaatcgccgtgtgctatattagacgatgacaacagcaggacacctgatgattctgttaaggatacacatgcgtcacgagttgcatgctcgtcacatacgaatgaaaaaggtgtcggcgaaactaaggtgggaactccgttcagcccgatgaatgctcttattgaaatcaagtactctgaagctagtcattcacagcaagctggagatgacactgctatgaatcttcttgctagtgtggctggggaaatatctaaatctgaattggtttccccagcttcttcacccagaagttcttctgtaaagaaattggcccgtgatagtgacaacattggaaaggttaaagtagaaagtgacacgggcccatcacatccagggcaagcagatgctaagaaaggcgccatggggaaggaagtgaaaattgatgcttgtttggttgcaaaggaggaacaacgccaaactatgccatctcctgagctaccagattcaaaagcagttgtatcttcagctaagattgaaatctatgaagttgaagccaagattgcaaacaaatgcaactctcagcatgcttcaattgattccaaaggagaaagtcangatgcctgtact

SEQ ID NO: 57095 - DNA, 416 bp, Zea mays
  Clone ID: MRT4577_152059C.1
gtcggcggccgcccttgacgctggtcgacatgagcatggactgcaatgtcatattgagcacctgcgtctacttacgaacgaacactacttcagcaaaggctgagaccgctcaagcgagagatgcgcggaactggctaaggtgctagggattgagggtagagaaccacttctggcattcattcgtgctcaagaaagcgggggtgctgagagcagagttgtatgcgctcctgcgacctttacaccatggtatggggggatgggtgaccagtcaaaagttcacaaacgtgttcattcacattagtcattctcagaccgggacaaccttttaagatagaatggcctgtgcttgacaagcccctgattgggctaactgatcaccacagcagcaacacaaaagctggttcttcgagctgtgg

SEQ ID NO: 57096 - DNA, 134 bp, Zea mays
  Clone ID: MRT4577_15205C.1
attcggctcgaggtatgggggacagctaatattagagcccgacctgtcgctcctaagcacggatggtttcgaactgattaccgtctactgcaggcgcgtgcttaacagagcccatcgggacatgggtacacaca

SEQ ID NO: 57097 - DNA, 426 bp, Zea mays
  Clone ID: MRT4577_152060C.1
attattaatagggtaatttaaatcaaaggcccaaattaaaaaagggggccgaaaccaaaaaggcggacgggacaaaagagggggggggcgtaaacccggctaaaggaatgggttggggaaacccaaaggggaggagaagccctttttaaaggaaggcacccaagctaagaaaggaaacaaggggttaaaggaaaaccaaggcaataaggggaaggaattaaaggaggccaaaattttaagggggtaaaaaaacctgtgagtaacaggaaaattaatagggacaacaaagccgggaggaacattggcccccgaaggaaaattgggagaataggaaccaagggaggatttggaaaacaacaaccatggacggaacaacgaaattggaaaagggccggaaaattcaaagtttaagggaggaagggaact

SEQ ID NO: 57098 - DNA, 187 bp, Zea mays
  Clone ID: MRT4577_152061C.1
ggcttgcggtggatacctaggcacctcgttctcccgccacgggtcccccatctccgtgaccgacgcccggctcgacgtgctctgcgcgcgcatcaggaagtactacttcctgcgccagagttgggtcgagaccggccgcgcgcccgaggaggggaaccccgcgcacgacgcccggatgtttcattac

SEQ ID NO: 57099 - DNA, 390 bp, Zea mays
  Clone ID: MRT4577_152062C.1
ggattaaagttagtccgggcacctacactgaacaacaagagctactagcgggatccacctacgatcatggcagataacaggcctagcatcgcaatatgaatacaccgctgtaatcatggagaaaagagacgaatatggagatattcgtacgggagaagaggaccatacgtcaaactggtgcagtttaatcagaagcttaatgaaggcaagactacagaaacaagtacctgaattgcgtttctaatatgcaatacccggcgtggctttcaccgccaatctcagaaacagagggttccaacaccctatggtggactgactaccatcatcatggagctaggcgaaatcaccctacatacattaaccatctgcatgaatgccgatctttcccat

SEQ ID NO: 57100 - DNA, 562 bp, Zea mays
  Clone ID: MRT4577_152063C.1
gccggccgggatcccggaaaaggggaaaaaaaaaaaaagaattaaaaaaaaaaaaaaaaaacccaaaaaaaaaaaaaaaaaatgcccctaagggcctcgccccgctctggacctattgggatcccccgcttatgaaaaacctcgatatccaggttgtggataccaaccaaactcaagccttatacacaccaccataattccccggtatactgcagtgtaccttatttcgcgctcatgtgaggcggagaattaacggcgtctccgagtgtcaaaaaccctaaaaggaaaacaccttaatcacccctggaggatatccccctttaggcccgttgcccataatccctcttaggccctgagcgatatgcactgcccaaaagccggccgtacctgaatgtcgaatggtaaaaggacacgtaaatattttgtaaaaattcacgttttattattgtgaaaaaagctctttttaatatccgctaagcctcaaccgaataaaccccaaaatggctcaaatcgttaaacccccttagaattagacggcactacccgtgaggggggtcacccc

SEQ ID NO: 57101 - DNA, 488 bp, Zea mays
  unsure (1)..(488): unsure at all n locations
  Clone ID: MRT4577_152064C.1
gcgcccagtagcaacaggacacgggggccagggcacctcccgccgcgcccgcagaaccagcagcggcggcagttccagccgccggcgcccaccacggcgacggcgccggcgccgcagactcagacggcggcgagctgggactcgttcgacctcctgtcgtcggtgccgacgtcgacgtcggccccagggacgagcaccaccacgcctcacctgagggtggagggggagctcttctagagggctgcaggctgcaggcgctagcctgactgccagctgcctgatgtgtgcttgtccatacgctcggttcggccgatactttggccttggcatggtgtgcatgtttgtcaatcactcaatcgccattctttgctttgctttgctntcccgtacctttcgatctttcgatctttcttttatttcctcatgaccttattaagtatatggggcatgatctccatgcatncaccaaaaaaggggcaacaactgca

SEQ ID NO: 57102 - DNA, 601 bp, Zea mays
  Clone ID: MRT4577_152065C.1
gtgtgagctgcatcccgggcaaaccctgcctttcctcgctgcccctgccagggaaccacacccgacctctactgggtggaaacaatcccgtcgagaagccgtggggcgacgcgcgcgaagggcaagcagcggctgtggtggcggtggccgagacggtgtcaaggacatgagattcttcactctggcgtcaatctcctctggcggacactttctcgttggtaatctttaacctccctgtctcttctatcatgttagggttcttgatttggttcttgcttgttagagtatatgggccgtatgtgtgctggcccattagggttctatattttgtactcgttactgtagctagggtttgatgttgcattctgtgaaccaacatggtaccagagccttgaccagccgccgccgcccgccacccttcccagcacagccgccgccacccccatggctggccggccccctctccccacctccggccagtaccggctttgccggtgtctgccccgcgccgatctcccttcctcccgcgtcccagaccaccgtgctcggccatgacgacgccctgctcttccccctggtttttttggtggcaccattggca

SEQ ID NO: 57103 - DNA, 523 bp, Zea mays
  Clone ID: MRT4577_152066C.1
cacaaatctgtttaataatctctaataagaactgggcatcaaagaacgcctcagtggttctgctgttttgcaaggaactgtctgtcttgtcaacaaaggatcaactcttcagctgaaagaacgtgtaaataagccagaaaccatcgtgtgccactgccaccttaggccttcctcagagccttgacccgagcagccaactcatcgaaatctggcaactttgggtgcacgtgagcgctcctaggaccatcgggctgaagcgaggtggaccgagcaggagccttctcgcatcttcgcccggcccgggccagcagattcacgagatagctctaccagttctgacatcaagcatagaactaggagcgacacatcttgtaactccctcctcctgtcctccatgggggaccgggggacgacaaaatgatgcgaacgcgtgattagcctccacatgcatggaaatcttactgttaggatctgatggagtacataaaaacttcagtatttcactaacccaaataaaactttg

SEQ ID NO: 57104 - DNA, 2112 bp, Zea mays
  Clone ID: MRT4577_152067C.1
cctcgaggccggccgggagcgcaccaccaccaccaccaccaccacagacatcatcagatcaccacccagtgcagcaaaagaaagaaagaaagaaagaaaagaaaaaggcaggcgcgccaaaatggacaacggcggcagcaacggctccgccaccgcctccgcctgctgcaacggcaaaattaaccgcgggccgcacgtggcgatgctggcgacgcccgggatggggcacctgatcccgctggcggagctggcgaagcggctggcgtcgcggcacggcgccacggccacgctcatcacgttcgcgtccacggcgtcgcccacgcagcgcgcgttcctggcctcgctcccgcccgcggtgtcctcgctgtccctcccgcccgtcgacctctccgacctgccccgcgccgccgccatcgagacgcgcatgtcggaggagtgcgcgcgctcggtgccggcgctgacggccgtcctcgccgacctcaggcggagcacggccgggcgcctggcggccttcgtggccgacctcttcggcgccgactcgctggacgcggcccgcgccgcgggggtccgccgcaggtgcatcttcttcccatccaacctgcacgtgctcacgctcatcctccacctgccggacctggacgccgccgtgcccggcgcgttccgggacatgccggagccgctgcgcctgcccgggtgcgtgcccgtcccggggcccgacgtgctcatgccgctgcaggacaaggccgacccctgctaccgctggatggtgcaccacggcgccaagtaccgggacgcgcacgccatcctcgtcaactcgttcgacgccgtcgagccgggccccgccaaggtcctgcgccagccggagtcgggcggccccagccgccggtggcccgcggtgtacccgatcggcccgctcatccacgccgacgccgggcggaaggacggcgcgtcgtcgtcgccgtgcctggagtggctggaccggcagccgccccggtcggtggtgttcgtctcgttcgggtccggcggcgcgctgccggcggagcagatgcgggagctggcgctggggctggagctcagcggccagcggttcctgtgggtggtgcggagccccagcgacgggggcgccgtcaacgacaactactacgacgcggagagcaagcgcgaccccttcgcctacctccccccacgcgtccgggaccgcacctgcgccgccggcgtggggctggtggtcccgtcctgggcgccgcagacccaggtgctggcgcacgccgccacgggcgccttcctcacccactgcggctggaactccgtgctcgagagcctcgtctacggcgtgcccatggtggcgtggccgctctacgccgagcagaggcagaacgccgtgctgctctccgacggcgtcggcgctgcgctccgggtgcccgagtcgtccaagcggagggagattatcgcggacacggtgcgcgaggtgatgcgcggggaagggaagggcgccgcggtcagggccaaggtggccgagctgcagaaggccgccgccgaggggctccgcgacgggggcgccgccgccgccgcgctggccgaggtggtacaggggtggacgacgacgacaggtggaggagagaaggactaggtggtggtgactggtgatgccgacgcgattggcgcctgccacctgccgcctgccgcctggtgccacagcgatcgtcctcatccagaccaactccaacttgggccgggccaaacgattcgtttgttccttgtccttgtgtataactttggttcacatgctttgcttgctgtatgtaatgtgacctacaggcctgcactttggcacgtagttaattagtagagtactcctagatagctgatctgtgtcatgacgatacgatgtagaagaaggctaccgcttttaattaatttggcactttgtaacttacaactatactgttgggccaggagcattattctcccgaagatcctcatatactacaggagtaatgctgaagattggcttcagcctatgccgttgacagacgtggacacaaagacaacaacttgaaacaaatattgtgcgtgtataaaagagtgaggtaaagtaatatcccttaagat

SEQ ID NO: 57105 - DNA, 1074 bp, Zea mays
  unsure (1)..(1074): unsure at all n locations
  Clone ID: MRT4577_152068C.1
ccgggcctggcccgtttgctctgcgtcctcggctgtgccatgttcccgccttgtctcttctctgttcgcaaaggcaaaaacacttcgcaataaggacctcatcgaaatatatttgagcccacttataacgtgcattccaggtcttatatccaatgctccagatgactcaaaaggctatttgttggaggtatttacggactcatttagagattgcaaggtggattgcaagctaatgttgccatatttggatgcagttggaggaatgctgtttcctgagaaaacaagcatatggcttgctgaaaatgattcaggtgtgttgggctatcatgacacatggatacatgagctacctggaattttgctacaatcaattgataaagcccccttagttacaaaggttgctttggagcttcttctaagaattgggcaatacttccctgcagtggactgtggaaggctgcgccccttcatgaagttatttggtgttgagtcattaccaggagctgtggatcttggtccttgtgttaaacttcctcgtgatttccaagaacttgccatttcatgcctttattattttcccagtcttccctgacgtcattgagccattggcctcatgttgcttaagtgatgcgccgacagcaacaattgaactcacatgttgtttgctttattgcaggctcaaaaaccatcgttgcataacatgaatggcttgcttagaattattgttacacttgatgccggaactagtaagctcatgaatggaaatgttgtaaagcttatagctggttacttggttgatgcatctttggtgcgtacctttttttttcagttctagagctctgacattaatacttgggtgattcgatacattctttccattattttgctctaactaatcttcaggagaacgaggcatagtattttattgtaaattcaaaagggtggttaagttggcatgggagcaatattattttactcaaaattccgaaaggatttgatacatttccncccattattgtgcttctcaaaattttcaagggacagggaggcatagtattttattcaaaattcaaa

SEQ ID NO: 57106 - DNA, 262 bp, Zea mays
  Clone ID: MRT4577_152069C.1
gaagttgaatgcccaaattcctgaaaaagcaaaattaatactatgactacactcctttctttcatccattgcaaggcactccttagatgatagcagtggaaaaatgcttcgaatatacaaactgtgggctataaaccaatagaccaatacgtacgatctgggcctgcccaatcgcacacgccaatgaatgacgtcccgcctcatgttctctcttaaagagacaggtgctccatatcagaatggccaatccgagtctggcggt

SEQ ID NO: 57107 - DNA, 282 bp, Zea mays
  Clone ID: MRT4577_15206C.1
atggcgcctcctgtcgacgtggttggtccgagccctaggttgggcgaggtggaggctcctccgaggtcgaggtcgagtcagtcttccgaggccgaggtcgagtccgggcccctgggtcgggcaaggcggagaccgtcggccgaggccagggctgagtccgagccctggggttggacgaagcggagttcgtcgtccttcggggctgagcccgagtccgagcccaggggtcgggcggagcggagtttgtcgtcttctggggctgagcccaagtccgagccctag

SEQ ID NO: 57108 - DNA, 256 bp, Zea mays
  Clone ID: MRT4577_152070C.1
tcggtcttcacccccttcaagtaaggaagaggaggagggcaagatgtcgcagcggaagttccagcacccgaggcacggctccctcggcttccttcccaggaagcgctcctcccgccaccggggcaaggggaagtcattccccaaggatgaccccaagaagccttggcattttactggcttccttggcttccaggctggcatgacttacaatggcccggagggtgggaagcccggatcccaacctcattaaaaggga

SEQ ID NO: 57109 - DNA, 490 bp, Zea mays
  Clone ID: MRT4577_152071C.1
cggtccggacccccggtcgccccgcgtgcgtccacttccccatggcctcctcctctcttcctgcctcctcctccaaaataatgctatcctgctcccgttgctcctccggctgctctgctctgtcgcacctttccctcgactggctgaagacgcgggtcgcggagcggactcctcatcaggcgcgcgcgcggggggggggggggtcggctccccggtgcggctgtgcttccacatcacacaaaatggccttccaggagtctcctgcaccaacgaggtcgtgcgggaccagctctacgagatcggcgtaccttaccggggggccgtcgcccagaccgacggcgtgggcaccatcgggggcgtcgtcctcggccccgtcgtcaatgctccgggccgacgtggacgcgctcctcgtgcaggagctggtgggctgggctcacacgatcccggagagtggctaaatgcgctcttgcggacaccacgtgctcactac

SEQ ID NO: 57110 - DNA, 374 bp, Zea mays
  Clone ID: MRT4577_152072C.1
ttgcttccttctgcttgcaaattctgtagacaccaccatttggttttctatccgggacaggagaaaaggggagagagaggtgaggccccgtatcccccccatctgctctgccccgacgcaactgttaccaccttctcagtctcaatcaggaacaagatgggtgccggccgcaggatgaccgagaaggagccggagaagcaagagcagcttgcccgagctaccggtggcgccccgatgcaacggtcgccggtggtgaaaccttcgtttactttgggtcagggccagaatgtccacccgccacactttttcaagcgctcggtgcttaaggccttctcgtacgttgtccaagacccggtgatcgcccaggcgcttct

SEQ ID NO: 57111 - DNA, 877 bp, Zea mays
  Clone ID: MRT4577_152073C.1
ggccgcttttttttttttttttttatttttttttggccatgggaggactcggcatgtgttcccttggccatccactgcaactattacatattcctctgtccgaaataggaagacaagaaaatgcagcatgccattgacaaaggccctgccatatggaggttttattatctctgcatagcctccccatttcccccatccaccaccctgttcccatcgcatccattcacttgacctgtcattccacaacccagtcacagaagagtaggtgtgcaccccttccacatcgtccaccgtgccatcttgccagaactgcactatgtcgaagttcgaggagagggatgggtcgaagatgataaagggacgcaggtccttgacgtgttcgtccacaatttcttctgctggagtcggagtccagccggaggaaggtaccgccacccactgttcggtgatagggttgcacacgatgtagcccagcgagtcgtatgtgtctgaaacccgccaagcaggtcgatgaaacgcccgtggccgtggcgaagcagcatcccgtcgcggctgccggcgagatcgccgccgtaggcattagcagcagcagcatcgtggccgtcgccgcgtcttctgacgtcgaagtagaggaacccttgcagcgattgggggagatccctgcagtagaggcgatcagcgatgaggtcgcgccagggtttggagacgcacttggatcggcacagcgacttggcgccgaggcgcgagaggatctgcacgagggcgtcgtcggggagttggtccaccgagagcgacctcatctcaagcccgtccatgccgctgcctacagcctaccgatggagatggaggtgaggtgagggtgccggttcccggccgg

SEQ ID NO: 57112 - DNA, 176 bp, Zea mays
  Clone ID: MRT4577_152074C.1
gacagacaaaaaaaagatagataaagagcacgaatcacatgggagagagaaagcacgaagccagcatgcaagaagccaatcagccaaaggtgctgaaccaaccagtgcaaagaaaaagcagaggcatagctaccaggaacggcacggccggcacaagggggagaatgagaggtaca

SEQ ID NO: 57113 - DNA, 391 bp, Zea mays
  unsure (1)..(391): unsure at all n locations
  Clone ID: MRT4577_152075C.1
nacgaggtaccattagacttgacgagctactgttcaccgctgataaatacgccacggctgattcctcgatgaagaccgagctccgagtagacgcctccgggaaggtgctcgctctgattcccaagacgtcggctggagaatccagccgacgcccgcaccagaacgaccacaagcgcaaggctcccctgccgccttccaccaatcggcaggtggccacagtcgaagacgaacaacctgaaggacggcccgcgcccaagaagcagaagggcggcaggccggcttggcacccggctttctcctacgagcaagcacttgatgcctcctgctcgcctcatattttttttaagcccccccaccacacgaccagataatgtaattggttcactcgtat

SEQ ID NO: 57114 - DNA, 289 bp, Zea mays
  Clone ID: MRT4577_152076C.1
cgagccggcgtgtgcggcaatcggtgtggattctgcaggaatcgcccttgcggttcgtgggcgggccaacctttgcggccactgttgtggaacttgagctcttgcgatctccagtgggtctggcaacgtgggtcgctggctgagcccgccgggttcgtccatgcaagctggtgggggggcggggcttggcggctttgttggagggtgcccgtccttggcgtcgggtggctgttgcctgcccccccctgttgtttgctttcgtcgcggtgggggctctggttctctggtg

SEQ ID NO: 57115 - DNA, 280 bp, Zea mays
  unsure (1)..(280): unsure at all n locations
  Clone ID: MRT4577_152077C.1
taattcccnnggctacccactctttctctcactctcaccttcaccacactatttaccacagactactgtcgccataaaagtcccggggcttctacttctgggctccctgtgcttttcactctcactctcgttgcaaactgacacttaatctttcttatgcaagccgtaccattacttttatgagatgttcctgtacttaacacactcctcgcatggcctgttcatgttgctataacttttcacccactatctttttgatgactccgtctgcaactacctt

SEQ ID NO: 57116 - DNA, 369 bp, Zea mays
  unsure (1)..(369): unsure at all n locations
  Clone ID: MRT4577_152078C.1
atcaacaaattgtacattgttgatcacagaataggacacgggatcacataagtcgaataccaattanggacattgaaaaagctgtatattatgctcttgtatggatcaataggctgttggctgtcggtcatgtcattttcatcaagacagataggaaagttatattttttcctaactatatatgctcttacctattcctgttctccatagtacaaaagatgatattgattttgtggctggtttcatttgttggaatgctcttcaactttcttacgctcatttacattgcttttctctgcagtaaattgctggcttaaatgcatgctgcttgaaccctataatcagatagaccatcccgaatgcaagtca

SEQ ID NO: 57117 - DNA, 629 bp, Zea mays
  unsure (1)..(629): unsure at all n locations
  Clone ID: MRT4577_152079C.1
ggattgagatgaaaccgaacaagcccttattatgcttccgtctgtttccactccggatccgaagtccggacgccgtcagcacgtcctagtgtcccacacaccggcctccacgcagccacgggcatgtgggccctcaacctgaaggccggtgggtcttgcctcacgccgaggcatccccagccggcagcgcggtcgtcgcttgccgccgggatcggctcgctggctgtggggatgaggtggatgcggcagcctgtgcggtggccgaggttggcggtgagcgcgtcggggaggaagggcaacaacggccgagaggacggcgacgagcccaagaacaaggccgcctcttctggaaaaagtgatgcatctactcccagtggagatgcttccaacgaaacaaaccaaaatcagggtgaaccaaaatcaagtgacacgatgtatatacctagcaacttgtcatattggagagatgtgagagcaagctttgtgattccaaagttggtaagaccaaactttctggtctttgctatatcatccgtactatanagttttggcaaaagattttgacaggagcaaacattagatgcaaatagtctagtgcagacaggtcaggatggagcagcatatcgtct

SEQ ID NO: 57118 - DNA, 323 bp, Zea mays
  Clone ID: MRT4577_15207C.1
cgtaagctcggaattcggctcgagcggacatcctcgccggtgtttacaacgaccgccagaacgaggagggggcgtttcttcagagcctgcgccgggagcaccggccctacctggggatggccgaggcgttcccggtgttcctaaacctcacaggggtggccgacaccgacttgttgtcgcccatactgtgccggaccgcatgattggagagccaccccgagctaatgggcgcactactcctgggcctcatgaacattggacgaatgcttgggtaggggttggacatggaccgctacgagcgaaagctagttttcatgatccgt

SEQ ID NO: 57119 - DNA, 762 bp, Zea mays
  Clone ID: MRT4577_152080C.1
gccggccgggccgggatgaacactgtcacctgaactcctgccagaaggtgcatgatatctctcccgctgaccccttcgaggagctcctcgtgttgaagactcaccaaagccatatcgcgacgcgaccttggccccactagctaagatatcttcatgctaacgaaaactaggacgatgacgagcattccctcttctgaaatagtcacccaggcgctggactgtactcgcaggtgccgtacggagaaggactcccacctgctgaacacacgccagaagaatccatcactagaggtggagtgcatgatgcactacgtgccacccataccgaacacttaggcgtaagattggcgtgacctacctatcattacttcactttcatatgaagaaggcaacggtcaatacccggaggagcctctctctgactatagctgcgatatctgctagaaggacacgaagtagaaggctacggaagatgacaagctaacatagatacactcacgtcgcttgcttgaataacccccatgctgcgaactttttcacctgactcctcgacagatgaactaagctgggaccgactacagcaccgtctcggtcactccggcatatacagtacacacatataggccacgaccgccgcctcttcgaagggggacaagattgtgcagaactttccaaatggattgctctgaactgctgactatcagcacgatccatagaaccgactctgctcccagtgtattatagacaatcattgacccacga

SEQ ID NO: 57120 - DNA, 447 bp, Zea mays
  Clone ID: MRT4577_152081C.1
ggatcatacacacacacacatagtactaaatatcaaacgtctcatcagatgccaacatgctaaccaaattagaaaataaaaaacaaatcaaagcagtccacatacgcaattagtcaattacatcgggcagagcaatcacgacggctaagagcagccgaggatcactcaaattatgtacagattagtagccacagtgaccgtcgcagatggctaggacctaggaggacgcaaacgaaccaagtctacatcccatcctgccttcggcttttggctcagctccgagtactggcctcccatcagctgcaaaacctcggtccacaggcaggaggggtccgtcgtcgtcagcgcgtcggctatcaggcctgtgctgcacgaagtcaccacccagtaacctgcgtcgatctcgctcagcagctggtcatggtcccaagcagagtacccgacgta

SEQ ID NO: 57121 - DNA, 235 bp, Zea mays
  Clone ID: MRT4577_152082C.1
atattacgttaagctacaaaaggcgggttttttttattacatgttcatttttacaccggtacacacggtttactatatacaggacaacccacaaaaggattttcctttcccaataaatctaaagcttaagcgggccccaattccaaaaattgttcgggcctaacaccaaagcaaattgcatcgtttaaagaaagggacctttttttttttcgggcctatttttcccccctggcca

SEQ ID NO: 57122 - DNA, 2554 bp, Zea mays
  Clone ID: MRT4577_152083C.1
atccgaagtccggacgccgtcagcacgtcctagtgtcccacacaccggcctccacgcagccacgggcatgtgggccctcaacctgaaggccggtgggtcttgcctcacgccgaggcatccccagccggcagcgcggtcgtcgcttgccgccgggatcggctcgctggctgtggggatgaggtggatgcggcagcctgtgcggtggccgaggttggcggtgagcgcgtcggggaggaagggcaacaacggccgagaggacggcgacgagcccaagaacaaggccgcctcttctggaaaaagtgatgcatctactcccagtggagatgcttccaacgaaacaaaccaaaatcagggtgaaccaaaatcaagtgacacgatgtatatacctagcaacttgtcatattggagagatgtgagagcaagctttgtgattccaaagttggtaagaccaaactttctggtctttgctatatcatccgtactataaagtttggcaaaagattttgacaggtacctttaaatcagctcatttagcgattatgtaggaatgttgttagaatctgaaatgaaatttcatagtaactctggctatcatttttcctcagttgcgttcatttgttagtgtcataaaggaaagaagccaatgggtcaatttctgaagattgacttgcacttataacccctaacattgtacctaaatgttacaacctcagaaattgacacatgggactttggaaacataagaatgaccatgatacaaaatgtattttattccctttcagtttttcaacttaatgaatattatttttgtctgttgttccccgtttttagagaaagttgaaatgtgagacttggctgtcctcattcctcaactcctcagttgattgaaacattttctctctctctctctctctctctctctctctctcacactatcatctatgtgctgatcctggacttctttttatggttcttgctgcaatattcattattctagattatgttgaactttttgtctagcaacgcagatacacaaaaatgtgtatttcttcacatcaaacaacaacatactgctagatgagttgtctccatcatgtagtgtaacaagatcttcagtgccctatttcttatagatcacaatgtcttaggctatctccagcagatccactatcctcaggggcgatgccgggttcacgtaccctggtgcactggcaacagggtaaaaacgagaaatgctactagctagatacaaattcactataaatatttgctaaatcatttattttcttaagttgtgcactagggtatgtttggagctggcttcgcccctgcctatcacatcacctatcacattttctatttcaaactacactctgcaaacagtgtcatctacctttgttgtcccaattatttttcttttgattgatttacagaccagattctttttttcttctcctttaggccttgttcgtttgtgccggattggtgggtcggaacgattcctaaccggattgcttctctaatttatatgaactttgattagctgaaacgattacgggtgcaatccgacacaaacaaacaaggccttagcaaagcagtagcctcgtctctgcctgaagctaattggtatttttgttaagaagtccctcattacttttttttttgctaatttgttatttgtcatgcatccaaactaggagcaaacattagatgcaaatagtccagtgcagacaggtcaggatggagcagcatatcgtcttcctcggaagtgggctcattccatccctatgccagagtctggatgtgtgttggtcgccactgaagagcttgatggcaacggaacctttgagaggaccgtcatccttctcctaagactaggttcaagggatgcctacgatgggccgttcggtatcatcctgaaccgtccgctgtacactaagatgaggcatgtgaacccatccttgggcgatcaggcgaccccttttgttgactgttccctcctgttcggaggccctgtggacatgagtatattcctgatgagcgcgggcgatgggagaccgatcaaggggtttgaggaagtggtacccggcatctgcttcggcttcaggactgacctggagaaggccggtgctctgataaagaagggcgcggttaagcctgaggacctcaagttctacgtcgggtactctgcgtgggaccatgaccagctgctgagcgagatcgacgcaggttactgggtggtgacttcgtgcagcacaggcctgatagccgacgcgctgacgacgacggacccctcctgcttgtggaccgaggttttgcagctgatgggaggccagtactcggagctgagccaaaagccgaagcaggatgggatgtagacttggttagtcctagccatctgcgacggtcactgtggctaatctgtacataatttgagtgatcctcggctgctcttagccgtcgtgattgctctgcccgatgtaattgactaattgcgtatgtggactgctttgacttgtttttttatatataatttggttagcatgttggcatc

SEQ ID NO: 57123 - DNA, 664 bp, Zea mays
  Clone ID: MRT4577_152084C.1
caacatagaagttaacaattttactccaactcctgacctactggaagaaactgaaccgctcaaaaccccatatgagaggcgctccaatccaatggacaagatcacagaaacaatccagtcgcatctcaaacttcatttcgataccccaggtgtcccacaatctgaatccttaagtcatttagctcatggaatgaccaaagccagggcagcccgactattctatcaaatagctgttttggcaacttgtgattacatcaaggttactcagctggaacggaaaggagatgaactgtacggagacatcttgatctccagaggattaaagatgtgacttggtgatgttggaaacaattttgctgcggtggttcccggtgcacatctcgtgtttatattacagaatgcttacatattgcataggatgtcttgtagttaacacataatctatacatggtgatctggtgaaagaaagggagcgagatatgaggcagtagttttgtgttatgtggcaagcaaaattctaagctgttattttagaggtttcataatttaagtacgaacatgtgttatactattatgaaactaagttgtcctgaaagcacttactgaaagggagaaatttacatggtaccttgtcaacgatgaaacatacatcggaggacaacat

SEQ ID NO: 57124 - DNA, 385 bp, Zea mays
  Clone ID: MRT4577_152085C.1
tttttttttttttttttttttttttttttttttgggggttttttttttttggatcagtaaacatccataaaatagccccaaacatggggaaattcgttatgacaggccacccacccataaataaaaccatccaacacgccaccatatttttacactaaaaatagctgcccggaaaaaagggcaaaaatggacgacaatttaaggtaccactaaactcagcaggaaaagctttacaaaaaaggaagcaagattatgccaccaaacccatttcaattacaaatggggcggcaccaggtgataatttccgggggccagggaaaaaccaaaacctaacttataaggagcgaatgtaactgaaattaccccacctgttttgagggcaacc

SEQ ID NO: 57125 - DNA, 363 bp, Zea mays
  Clone ID: MRT4577_152086C.1
aggaagcacagccgcctgggtccggggcctcccctaaaccccggaaaccctgggggggggggggggaaaccagggctgggggaccgaaacctttgaaaccaggttcgggaaaccccaattccgggtcaggttttccccggcaaaccccggggggggccccgcgggggacaatttaggggaccccgggggcagcccccttggggggcggcctttcccgggccctgggcttggcccgggccttgggtcccctgaggccccccccccacttttttccggccccattgaacttggcggtgaaggtggcccttattgcccccaagaacctggtggaccccagcctctcccgttctttgaaagggggga

SEQ ID NO: 57126 - DNA, 680 bp, Zea mays
  Clone ID: MRT4577_152087C.1
taggggccttttttttttttttttttctttttttttttttttttttttttttttttttttttttttttttttttttttttttttttttttttttggaaaaaaatttggccccaaaaaaaaacccaagtttttggggggtttccccgggaaaacaaaaaggggtaataaaaggggaaaaactcccccaatcccccaaagattggaaattgggtaaaaaaagggtttggcccagccccaaagtttttaaccccacggggggccccggttttggtttgatgggcccccttggcaagcccccactttttccttgggggggggcccctttttttgggtcagggccttttgaaaccctaaaggggggccattcgtcttttttttccccccaaaaggaaaggtgggggtaaccccaaaaacttcgggatcgaaacccattacccctttccttccggggtttgaagcttccctctttaaaaaacccccctccttttttggcaaattcaacccgaaattctttggaaaatcttccatcttccaaaagattggccagcttggggtggaaaaagggaatttggattcccccctcttattaaaatcttcaaataaaccagagagggcccaacccgggggaaaagatattatatcaaagggcttcctggggggagggttcttttcttcagggg

SEQ ID NO: 57127 - DNA, 520 bp, Zea mays
  unsure (1)..(520): unsure at all n locations
  Clone ID: MRT4577_152088C.1
ccagaaataagaaagtacattttctaaaaaaaaaaaaaaaaaaaaaaaaaaaaaaaaaaaaaaaaaaaaaaaaattttttataataaaaaaaaacactctttgaagggaattttactatatatacttctcactcgtgcgctctttccagcccccttggtgggggcccccacccctcccctttttgggggtcgcgttttctctttttctgccgcccgtttttcacacaaggggggctcgttgtttaaaaccctctttgccccttcgaataaacaccttttttaccaaacatccgctttttttccccctctgttgatatttgagggaggggccctctcttgcgcgctttcccccatatgtgcacactgaccaccggatgggccccccctttagcgccgcacaacaccctgggggtgtggggtttccccgcagggggagatgtctactcgcgagcgctctctaaccctngccaccctcttttttccctttctttttccctacttccgcttttttttccccccg

SEQ ID NO: 57128 - DNA, 711 bp, Zea mays
  Clone ID: MRT4577_152089C.1
ggccgctcgaggcggcgggcccgaccttcctgtgatgctcacctttttggaattctacgagactcttctaggatttgtgaacttcgagctttaccattccataaatgtgaactatccgcctattctggatcctcgtctagaagctttggctgctgagctctatgcattgtcccggtatatgtcttctggaagactgccgggaaatccagagtctaatgggcttattgaagacaaagagactgaaaataataaagagagctcaaaaactgacgagtctgagctcagattggcacagcttcaacatcagctacctgctaatgaacctggtgcgttaatgcatcttgtagaagaatcaactgctgatgatacagaagaggaaagcgttaaagagtgcaggactttattcaaagatctgaagttctacttaagtcgtgaggttcccagggagtctctcttgtttataattccggcatttggaggaactgtttcgtgggaaggagaaggagctccatttgatgaaacagatcaagatatcacccatcagattgttgacaggccaacccagagccatgttttcctctccaggcattatgttcaaccacaatggatttttgattgcgtaaacattctcaaagtaattcccacagatgactatattgttggaagggtgcctccaccacatatatctccttttgtggacaacgataaaga

SEQ ID NO: 57129 - DNA, 176 bp, Zea mays
  Clone ID: MRT4577_15208C.1
tcgtcagattggagagggagacgaggtgggtgtcctaggggagagacccagttagctgcaggggtaggtcgtgttcggcgtccgtcttcggagagttccaagagattggtggtgcggctgtgggttccaagtggatccaccacatccagcgcctcattttgttcaatgtgtttgtt

SEQ ID NO: 57130 - DNA, 133 bp, Zea mays
  Clone ID: MRT4577_152090C.1
gtccgcccacccgtccgaagaagagaggagctcggccatggtttagcgccatggtccggtttcctggtggagattccctatcgctcgctggtgcgaaaggaaagaagctagcttttaccttggcgtttctggc

SEQ ID NO: 57131 - DNA, 470 bp, Zea mays
  Clone ID: MRT4577_152091C.1
gtaccttttaaacgggccgccttttttttttttttttttgatcacagctggggcttattattatggataatagagtatatacaactccataaaacaataatggttgggaatgaaaccggtaaaagaagaatcttgccccaaccaccaacattgtgcgattgatccggaatatatatatatctttttcatgacaacaaaacacatcgaactcaacctcatccacattggctttattcactatacacaggcaccgtcgtagtgtgctcagcctagcatctataccagatagcaatgcaagaagcatactgatccggatacaattgacttatccctagttttatacttaccatatataatgaactctaatccttacaacaccatattgcctgttactctagcttgacggttgctatttgtaaaaccttccttggacaagaacaaattattcgagggtttacagggtactcgtt

SEQ ID NO: 57132 - DNA, 603 bp, Zea mays
  Clone ID: MRT4577_152092C.1
ctcgaggccggccgggcgaccgattctcggcaacggatatctcggctctcgcatcgatgaagaacgtagcaaaatgcgatacctggtgtgaattgcagaatcccgcgaaccatcgagtttttgaacgcaagttgcgcccgaagccttctggcggagggcacgtctgcctgggcgtcacgcgtttgctacagagaggggccgcaaagctaggcctaacttgaaggtgggcatttgtggagaacacggtggagagccttcgtctgtggccttcttcgcgaaggctgggctggattacgtttcttgctcccctttcagggttccgattgctaggctagctgcagctcaggtgcttgtctgaggctgcctcctcgttggcaaccggattgcctgctgctggtggatgtggtgatcaacagtattattacagagccatgctatgtgaacattactagtagcagtgctcataaaagctacaatcccatctccctttttttccagtcatgtaaaacttccaaactgctccatggttcaaaactctgttcttcaatacatcatcaattatcgattatatatgtggttaaaaaaaaaaaaaaaaaagcggcc

SEQ ID NO: 57133 - DNA, 663 bp, Zea mays
  Clone ID: MRT4577_152096C.1
aactccggctcccatctccatctcccgactcccggacagcccgacccccgtcgccagtcgccaggcgccagccctcgccctgcatctcgcgagacctcgccccgagcccccgacgccgccgcggcgccacccgctgtccctcgccgtcgccgaccctgcgctgcggcttgtaaggcctggattcccgtggccaccaggaaggcaggaacacagcggcgtgaatgagtctgtaccctatttgtagcggaagtcaccgtcctgtaagcctccaccaacatccgctaaaacaaacgctaaaatagaggtcggcttccggagccgctaaacctggaaggctactgtgcgtccgctatccgtgttcgccgaccctgtgctgtcgcacgcgtgccagatctccggcgaagaggacgaccgcgcgaccaccgacgaggaggacgggcgcgcagccaccagggacgggcgcgtagccaccgaggacgcaagcacgacttctcatcggaaggaggagaagagcacgcgcgtctgctgccggctggacggacgaccgcgcgaccaccgatgaggaggacgggcgcgcagccacccgggacgcaggcacgacagctcatcgaaaggaggagaagagcacgcgcgtctgctgcccgctggacggatgaccgcgcg

SEQ ID NO: 57134 - DNA, 1285 bp, Zea mays
  unsure (1)..(1285): unsure at all n locations
  Clone ID: MRT4577_152097C.1
tctccgggcccctcccgagttcctctccgaagggaacatcgaggacattgtaagtgaattatgtgctgaattcttctccttcggaacgaacgacctgacgcagatgacctttgggtacagcagggatgatggngggaagttcattcccgtctatcttgccctcgcgcgaattgaaaagctttcagaagtaaacccgatgcttggcttccgtgggtgcaggcttggtatatcgtaccctgaattgacagagatgcaagcccgggccatttttgaagctgctatagcaatgaccaaccagggtgttcaagtgttcccagagataatggttcctcttgttggaacaccaccaggaactggggcatcaagtgactcttatccgccaagttgctgagaaagtgttcgccaatgtgggcaagactatcgggtacaaagttggaacaatgattgagatccccagggcagctctggtggctgatgagatagcggagcaggctgaattcttctccaacatgaccccttcgaggtcctggaccagaggggagtgggcgagctggtgaagtttgctacagagaggggccgcaaagctaggcctaacttgaaggtgggcatttgtggagaacacggtggagagccttcctctgtggccttcttcgcgaaggctgggctggattacgtttcttgctcccctttcagggttccgattgctaggctagctgcagctcaggtgcttgtctgaggctgcctcctcgttggcaaccggattgcctgctgctggtggatgtggtgatcaacagtattattacagagccatgctatgtgaacattactagtagcagtgctcataaaagctacaatcacatctccttttttccagtcatgaacacagcagttttcaagccagggaaactgtacagaagccaagagcccgcacatctccctaacattctcgaggaccattgccgaatcaaaggcccacacatcgtcttcttgttccggcagttgataagaacctagtacataagagaaagtacatcatcaaagtaaggagcaggtgaaaagcaccatctgcagtcagcagtatgcaacctggcacgtggcatactatgtgatactgtacatgagtacaggaaagcatagcttattacaatatccgtgagttactacgacacacaaattatagacatttgtcagcataaagaagttatgccgttttgtcgcgcagtgtcccacgccatgattaatccaaaccactgattgactccaaaaaaaaaaaaaaaaagcgggc

SEQ ID NO: 57135 - DNA, 585 bp, Zea mays
  Clone ID: MRT4577_152098C.1
cctcgaggccggccgggccgtgattccaacagcacatataagcatcactgaatgaccactatcctgcactcactgtgctagatgttcaaaccggagtagtaacagtccatcaccaccaatggatcccaaggttgcgctcttccttgccctgagcctcctgattgctggcactgcccatgcctgcgaacccaactgttctggcccaatcggaccaacgccgcccgtcgcgacgactccgacgtcgaacagacacagacgctggccgatcgacacgatcaagatcaacgcgagacgccaacgtgttatcgactcgccaaggccacttctaccccagtacgagcaatgctgcccgttcgctgcaacgactgccgcaactctacgccgaattgtgactctgcacagccatcaaggacaaaggcctctgcatccacctcaaagagccccttaaactcaacttcatcctcaacagactgcggcaggaaatgaccagaggacttcaattgccccaactaaggttgccatcactagtgagctccatctcgacgattctatttacgagcatgtcgtcctcttgcaatattagcg

SEQ ID NO: 57136 - DNA, 2147 bp, Zea mays
  Clone ID: MRT4577_152099C.1
tgtaaataagatccctatagggggaattggggaccgggcccccccccgaggttttttttttttttttttttttctaaaaaaatagtaccagctttttcgaggcttaaagtttgaggtggtctgtgcagcaagggcctcaacagcgacatgcacacctcacacacacaccaagaaaaccaaaaaaacacatgccagaaagaaaagaaaaaagcaaacaaagaaaaaaccttgccacgtatataatcgataattgatgatgtattgaagaacagagttttgaaccatggagcagtttggaagttttacatgactggaaaaaaaagggagatgggattgtagcttttatgagcactgctactagtaatgttcacatagcatggctctgtaataatactgttgatcaccacatccaccagcagcaggcaatccggttgccaacgaggaggcagcctcagacaagcacctgagctgcagctagcctagcaatcggaaccctgaaaggggagcaagaaacgtaatccagcccagccttcgcgaagaaggccacagacgaaggctctccaccgtgttctccacaaatgcccaccttcaagttaggcctagctttgcggcccctctctgtagcaaacttcaccagctcgcccactcccctctggtccaggacctcgaaggggtcatgttggaggatgccctgagcaagatagacgggaatgaactttcccacatcatccctgctgtacccaaaggtcatctgcgtcaggtcgttcgttccgaaggagaagaattcagcctgctccgctatctcatcagccaccagagctgccctggggatctcaatcattgttccaactttgtacccgatagtcttgcccacattggcgaacactttctcagcaactggcggataagagtcacttgatgccccagttcctggaaataccaaacgtcagctattaatattagctgcttgtttgtgcgttttggcatcaaatggatttggtcacttttttttttgaactgcagagacagtatgtacatcacacattaatatataaaaagtaaaaagacacatgcctgtggtgttccaacaagaggaaccattatctctgggaacacttgaacaccctggttggtcattgctatagcagcttcaaaaatggcccgggcttgcatctctgtcaattcagggtacgatataccaagcctggaaatttcggcagttccaaaatcagtcaatcaggcatcaccagtgtttttttttggctgtgaatagagtagcagaaatccaacctgcacccacggaagccaagcatcgggtttacttctgaaagcttttcaattcgcgcgagggcatcctcctggttggctcccgtctcagcacataattcacttacaatgtcctcgatgttcccttctggaaggaactcgtggaggggagggtccaggagtcggatggtcaccgggagtccatccatagcacggaaaatgccttcgaagtcagacctctgatacggcaagagacggtcgagcgcctgctgcctcagctcaagcgtgggagccataatcatctgcctgacagccttaatcctctcgtctgaagcaaagaacatgtgctctgtccggcataatccaattccttgtgccccattgtttcgcgcagtcaatgcatcatcaggggtatcggcgttagccaggaccttgagctttctaacatcatccacccaggccatgaaagttcccagatcaccactaagggctggtggggaaagcggctgcttcccaaggatcacctcaccagtcgacccattcagcgacagccactcaccttcgcgcagcacatgtcctccgatcgtcacgagcttctccgcatcgtttacgcgaatgcctgagcatcccgagacgcagcatttcccccacccacgtgcgaccacagcagcgtgggaagtcatgccacccctctctgtaagaatccccacagcagcgtgcatgccaccaacgtcctcagggctggtctccgcccttaccagaatagcagctttcccttgggaatgccatgcttcagcatcctcagcagtgaacacaacctggcccacagcagccccaggtgaggctggcagaccagtggcaatgacttgatccccggccgg

SEQ ID NO: 57137 - DNA, 1683 bp, Zea mays
  Clone ID: MRT4577_15209C.1
attggtacctcgagccggcgggatcgatactgaacactattttctctctgcagaagatactccatccttcctgtgatcttccctaccttctcttgtatcttcctccactcctgctgtgtatcttcctccactcctgctgttcggttagggattagtgagtattgctaacaattggtatcagattcgttcgatcctcggagttttctacctcgatctggattcctcgactgctgcatcgacatgtcgctcgatacgaagctcatcctcaacgccattagcgagctcttcgacaagttcgacgcgcgatggtccaccagggatgccgcgcgggaggcatccaggcgcgtccctgttccgacccagtgcacggttgtcggagccgacgtggtcgccgacaactggggcaacctcttcgacagtggcgtcgattccgacgagcagcgctacgaggaacccaacaacgccgacaattggggtggattcttcgatggagcagacgtgtctgccaacgccgagttcgccggccactgggacaacccttcctccaaccccgacgcgactgcctatgtcacaccagaggttgcggtggaatcggtgcacccagccgcacgcggacgcttcttcaacgacgattcgggtgccccgcttgactcggacgacgacagctccgtccacggcggccacggatccgtgatgtcccatctcctggagcgcgaggccgacaccgccttccttccccacttggatcagcgggatggagttgaggcgtggctcatcctgcgccggtgcactcccgcctccttcaacgtcgcctccaccgacccccaacaacgaggtctcgagcgccgttaccgcggacgcgctcgctaaggccgcgcccacgctcttcgcttcgagggcgcccagaccatcgctcaagtacctggagctgcttctcccggcagaaatcgacttcgaccacattgacctaccgactgctgccgccgcagggcacatcgtcgcccaggtcaccggcaacaacgcggtgtagcgggggaggaccaactcaggtgctaaaacctcggttcggagcgggcggctggaaaaggctgggtggcccgtgatgctaccagcctacagcgtatcgaaaatggtcatcaatctgtacaccaggatcatggcaaggaggtatccggacatgcgcatcaactgtgtgcgacctggctttgtcaagacggacatcaactggaatctgggggtcctgacgcctgaacaaggtgcgagagggccagtcatgctagctctcctccccgatgatggaccaactgggtgctattttgatcagacagaaatgggcgataagtgggcagcctattatttttcaaaatggtcaattcttagggattttgtggtgtttcatttcaggagttagccacaacacagaaagcccagaaatgctagggccatggttatatttgtcatgagctttatgcttggtcgattgtgtttgaacgtctggtgattgaatatttgtcgtctgctagtttattttagaactaaaccgctagaaataaaaaagagcggatggagtgttataactttcctgaattcatgatgacataaacacatacacatggtaaaacgtttttatgatcagttggtggggggggggggggggggggggggggggggggggggggggtg

SEQ ID NO: 57138 - DNA, 243 bp, Zea mays
  Clone ID: MRT4577_1520C.1
caacaaacagggaacatacatattccgggccagatttacaaagagggcgggggctgactatatcttaaaaaggaacacatacccttacgctcacagatctagtgtaaataaacaaaacaatctatttaacaaaattgaggcgggaattcacatcctttattattgtgtacctacaattctggcagaaacttttatttttaaaagggttgggcgcaggcgttaaattatctcacaggcgatttg

SEQ ID NO: 57139 - DNA, 163 bp, Zea mays
  Clone ID: MRT4577_152100C.1
gtcaaatcctagggctcaaccctggacaggcggtggaaactaccaagctggagtacggtaggggcagagggaatttccggtggagcggtgaaatgcattgagatcgggaagaacaccatagctacgtgacagtaataataatacatgcatgcgttcatcgtct

SEQ ID NO: 57140 - DNA, 321 bp, Zea mays
  Clone ID: MRT4577_152102C.1
atgggggttgctgacttgctgctcatcaggtggctggtccagaaggggctgcagaggtggttgaacagggggatcattgacaatccactgggccctatggttccaagcatcattgtgtcgctgaacagtgaaggaggcatcaagatactgctgcggaccgagaagaacaaggttgtctctttcaagaatgctgctgaactggaccaaaacctgtcccaggtgcgaccgctggatatcacgcaccccaagccgacggtgctccacaaggtattctctaaccacatccctcaccgccgggaaagcaatctcatggtcaggtaa

SEQ ID NO: 57141 - DNA, 399 bp, Zea mays
  unsure (1)..(399): unsure at all n locations
  Clone ID: MRT4577_152103C.1
cccacgcgtccgcccacgcgtccgcaaactttcgtgagttcatgaactatctgaagaacaggaacgtggatcttacaaatgtcaagctgagcctgtcagaaggtgaggaggacgagtggttcaggcacagggccagtagcctctcccagcttaacaacacggagagcagccaccccacgagtgcagaagactccaagtcccactcccaccccgctggcgctgctgacaaaggcaatggcactacaccaggcacgccaccatccacgagccatgataaaacaacgaccagcgcagcgacagcaggcacgccggccatgaagaggtcctcgtcgggcagcaagctgcagcgcaagaggcctncacggctggcagtgagcaagagccggctgggcaagggca

SEQ ID NO: 57142 - DNA, 631 bp, Zea mays
  Clone ID: MRT4577_152104C.1
ggaggattctgcttgctctgtggggagggagacagagagagagcgttagagagatctagtatagaggctagcaggtgcgcctacgaacgaacatgttggcgcggttcagcgtccaggtggtggaggagccgaaggatgttgcgaagaagggcagacgaactccgcctcctactgaccaaggcgctgcagctgcgcgggggcttgctggccgagtacgtagccgggcgcgctggtgcagctctacgaccacgaccacctcgcctactcccacaccagcgaagtactcgtccgccccagtgcactcgctggcaaggacgatgtgctctagatcgaggtcgaggggatgcatcgacaccctgggtcgagtcgtccgaacatcagtccatgccgatgcaggcctacagcgaggtgctcctcctcctagaggtctacgagagctagctcaccgcgcgcgctacccgcatgatctcatgcttcgccagcctctccgttcagaggctcttcgtcctcttccagaagtgaaccaactcactggtagttgcatctgaccccgaggtaacggtgccgatcttctgcgggctccatcccgacggttgtctggacttactcccgacacatccacatgctcaaa

SEQ ID NO: 57143 - DNA, 445 bp, Zea mays
  Clone ID: MRT4577_152105C.1
ccggccggggaggctaacacaccggaccgctctttcatcggcacacaaccttgctactgtagtttctgcgccgaggagcgcccgatgacacggacaaacatggctgaccacaacgatgacactgtgtcggacctatggctggactagatcagcgacaacctccacggccgtgactcgtaatcctcctctggtgactatcacgaggaaaagaatgcctcctcagttgatctgaccgcagaacctctgactgacagaatctaacgccttttcggtcgggagaggcccccccactccgtactccgagatgcccatcgtgccgatcttatcgtattcaccaacactaagacctctcgatccgcacttactggacccccgacgatctggctcctattcgaggccatgcagaaccatctcctaaccatggtgtgccactgtctcctcctct

SEQ ID NO: 57144 - DNA, 146 bp, Zea mays
  unsure (1)..(146): unsure at all n locations
  Clone ID: MRT4577_152106C.1
gtccgcgcactcgtcctgtcacacgcactattcacactccacacacatacatatagagagagggnatgtanatcttaaacgtgccttgaacttactaactaactggctaactagctcgaaccgcatagcaaatctaaagctgcaat

SEQ ID NO: 57145 - DNA, 597 bp, Zea mays
  Clone ID: MRT4577_152107C.1
cccactcgtcctaagcctggactgaaaatgcaccaggcacagggaagcgatctccttcgcccgccgtatcgggcgcagcgcctgaggcccccgtacgccaaagcctgcggcgtgatgcgttccgactgcggcgcgggacggggccagcattgctcgccgatgcaggcgcgtcgttgacgccggcgccgcacacagcatgaccacctaagagggtcgttccatttaacgatagggcaaaagcgagggcaacaaagacatgaacgaactgcgtgtgcggcaagggcgcgaacctggtggacatggcgagcatcacactgtcagtgccagcggagttcacggtgtctacagaagcgagccatcagtaccaggacgccgtgtgcaccctccccgcggggctctggcccgagatctactacagactgcagtgggcaggaggagtacatgggcgccaccctggtcgatacgcagaaacaagctgatgctcttcgtacgctccggcagccgtcatgtgcatgctctgaatgatggacacggtgctcaacctgttgctgaacgatcgaactggacaacgaactggcggccaatagctatgagcgc

SEQ ID NO: 57146 - DNA, 194 bp, Zea mays
  Clone ID: MRT4577_152108C.1
atctatgacgagcttgcacgcctgcgtgagccgggatgctctagaggggtcgacctatgcgttcgagatagacaatagacgtcctcattggtgggcagacacttacagcttccatatgcttctatgttctgtactgtagcgctgatgccgtatccatgagggcacagtgcttgctggcttctatggctgaactg

SEQ ID NO: 57147 - DNA, 322 bp, Zea mays
  Clone ID: MRT4577_152109C.1
gtttgttcatcaaaaaaaaaaaaaaagccgctgcttcgatcgaacaaagtacaccaaaggtgcaggacgctctactaacacgccatcagccacacgtacatcatgcctgacctaccagcagatgcatgcatacacaacacatgaaccgtgtacattgaacacaccgtacgattatgcctcccgatcgagtgctagcactaactatcagaccatcacttgcccatatttctgagcaggactaacatgtacccgtcaagcttagctttctttgtccaccatgtacgttcacaagcatgagtagtcattcaggttcataatgaat

SEQ ID NO: 57148 - DNA, 971 bp, Zea mays
  Clone ID: MRT4577_15210C.1
ccgggctcggatcagcgggatggagttgaggcgtggttcatcctgcgccggtgcactcccgcctccttcaacgtcgcctccaccgaccccaacaacgaggtctcgagcgccgttaccgcggacgcgctcgctaaggccgcgcccgcgctcttcgcttcgagggcgcccagaccatcgctcaagtacctggagctgcttctcccggcagaaatcgacttcgaccacattgacctaccgactgctgccgccgcagggcacatcgtcgcccaggtcaccggcaacaacgcggtgtccgtggtggaggaccaactcaggaggagcaaggattgtcaatgcttcctcacttgcgtcggagctgaagagaatgccaaatgagaagttgcgaaacgatttgagcaacattgacatctgggacgaggaccggatacaagcagtactcaacacattcttggaagacctgaggagcggtcggctggaagaggctgggtggcccgtgatgctaccagcctacagcctgtcgaaaatggtcatcaatctgtacaccaggatcatagcaaggaggtatccggagatgcgcatcaactgtgtgcgacctggatttgtcacgacggacatcagctggaatctgggggtcctgacgcctaaacaaggtgcgagagggccagtcatgctagctctcctcccagatgatggaccaacgggttggtacagagatgaaatgggcgataagatgggcagcctattatttttcaaaatggtcaagtattcatcactagtcgagggattttgtggtgtgcagttttcatttcctaatattcaattgtgcaagtcttggtcacaggagttagccaccaacacagaaagccatttactaccagaaatgctagaagcggccaatggttatatttgtcatgagcttcatcttatgcttacctctattggagtgacacatatgatcgattgtgttaaat

SEQ ID NO: 57149 - DNA, 286 bp, Zea mays
  Clone ID: MRT4577_152110C.1
ctttattctctgtttatacatgccacgtttatgaaggtatgtcctttataaccttcgctcaaagatcgttatgttctaagggaaataatgcttcgaaggatgaagaacattgacatttaacattttatgttgccttgttcttaattcatagcatttaagaacaagtccccaacattggtgcccaccttcggtgaactcacttccacttttgagccgatggctttgttcaacaatcaagctgaagttgctttggttactaaactggagcttcctgatacaggcggtt

SEQ ID NO: 57150 - DNA, 308 bp, Zea mays
  Clone ID: MRT4577_152111C.1
cccacgcgtccgaaaaaaaaaaaaaaaaaaaaaaaaaaaaaaaaaaaaaaaaaaaaaaaaaaaaagagaaaaaaaaaaaaaaaaaaaaaaaaaaaaaaaaaaaaaaaaaaaaaataaaaaaaaaaaaaaaaaaaaaaaaaaaagggcgccctttataaagaaccaaagttaaattacccttacttccaacataaaacctcttataaagacaaccttaaatcaaattaattgcccattgtttaaaaacctcaaaactggaaaaaccttgacatttccaaatttaataaccttaaaaaaaatcccctttt

SEQ ID NO: 57151 - DNA, 345 bp, Zea mays
  Clone ID: MRT4577_152112C.1
cactggtcgttcctccgcatagctcgtcgctctctctcccaggtccagctaccacagcagccctctcgctcaaaggatgagggacaagggggcggcccgagcaatggcggagcagcagcagccattgccgcagcctcggagcagcatgcaggaggctctggagaaggaggacaaggagaaggcggcggcggcggccgtccccaagaacggcaacgcgccccacaatggcggcggcgccgagcagcggcaaccgcgcagcgcccccacagtccggcgagcgacacggcccgagagatccaggcggtcaggagggtaccgccgcgagagggccgagacgccctacgt

SEQ ID NO: 57152 - DNA, 884 bp, Zea mays
  Clone ID: MRT4577_152113C.1
ggtcagccacgcgtccgcccacgcgtccgggttaagagcctcaaaggaggtaaggagatgaggatggatgttcttctgatggaaaatcttttgtttgagcgcgatgtgacaacattgtatgatttaaagggctctgccagatcaagatataacccagactcaaatggtagcgataaagtacttcttgatcagaacttaattgaagcgatgcctacatcacctatatttgtcggaaacaaggcaaagaggctgctggagagagctgtttggaatgacacgtcctttcttgcttccatcgatgtaatggattactctttacttgttggtgttgatgagaaaaggcatgaacttgtaatgggtattatagatttcataaggcaatatacgtgggacaaacacctagagacatgggtgaaagcttcagggatactaggtggaccaaagaatgtgtcgccaacagtaatttcaccaaagcaatacaagaagcggtttaggaaagccatgtcggcctactttcttgtcgtcccagaccagtggtcgcctccagtggtcatccccagcaagcaagctgagagtggtcaagacagggacgaacaggttgtcttgacagaattgtgagatgcatgcattacttttaggaacattcagggaataactcctcttttttgcaacatctatagattttgattttatttaaattttgttcattgttttttcttgtagctgtattttctgggtattcctacccttttctttttttggggaggatctatagaaagttttagcccaagtctttgaaactggtcattgtaaataccatccttcttctaatgaaatgatacacagctctcctgcgtgtttaagaaaaaaaaaaaaaagcggcc

SEQ ID NO: 57153 - DNA, 253 bp, Zea mays
  Clone ID: MRT4577_152114C.1
aaaaaaaaaggatttttttaaggagagtttgttttgtacaagaattttaaaaaataaaagggtttagggttgttttgggtcatggggttgaagggtaacacttcccaaattggggaaaaaggatgcacttcggaaatgtgcctagagaatttttccgtttggttttgtgttgaccttgcaaaatccaggcgggggtgggaaggggacattttttttgaacgccaagagctcaacgttactggggaatttgggg

SEQ ID NO: 57154 - DNA, 657 bp, Zea mays
  unsure (1)..(657): unsure at all n locations
  Clone ID: MRT4577_152115C.1
caaccccccatgcgcacgcgcctcaattgtttattgcgtcgccattgctggatcatcactagctagctagactagaggcgaagatgggggggangaaaaagtaacgtagatagactatggacagcgacggcgcatgttggcctccttgactatcttcttgcgcagtagccattaccatcagcgccaacgcgtggagcgacgccgggcacgccgtcaaccatctctacgacatgctctacatgatgggccgcgacgacatccccgtcggcgtgggcggcgacggcgggatatcctacgccggcgacgtgcaacgcgacgtcggtggctacctaccactgatcgaccagggcatgtcgacggacggcggctgccggtaccggcaggccatcccgctctcgggccggctggacgtcgacacgaactccggggtccggaagggcttcctcccgcggggctcccgggcgtaccggccgctccggcagcccacggcgcagcgggtgatggcggacgcgctgtccgccggcccgacctcggtgctcctcctgggcacgcacaccaacctcgcgctcctcctgatgtcgcgcccgcgcctgaggcggaacgtggagcgcgtctacgtctccggcggcgccgtgaagggcggcgggcaacctgttc

SEQ ID NO: 57155 - DNA, 129 bp, Zea mays
  Clone ID: MRT4577_152116C.1
aattgaaagatacattattctttgtgtcgatttattagtgccggatgttcacaatatgcatcatcttactattccggctcatatgcatggaaatagttaaacatttgcatactcctgtgattgctacaa

SEQ ID NO: 57156 - DNA, 392 bp, Zea mays
  Clone ID: MRT4577_152117C.1
cacccaaacttttactttcataccaagccaaacatactcctgcctctgtctcaattatacgtctctatgcactcaacctacctatattatctcaaataacgactgactttgctcttattcacaaatttgttctgcctgtaaagatctattcccatattgtcactaacatataacttttctacttataatcacttcacctttaattgacaccaaaccttctgtgaatctttttttaaacttccattttaatacatcaatacaccatatacttttattttaatacaccatatacatgacacctaaaaaaaacaataacaaacaactataatcctaccattccctctaacaaatccaaacttacctacactttcataacaaacctatatttctta

SEQ ID NO: 57157 - DNA, 219 bp, Zea mays
  unsure (1)..(219): unsure at all n locations
  Clone ID: MRT4577_152118C.1
ttgntttgtttttataagggaagggggatacgaaagggtagttcnnnnntttttttttttatgggggtaaccaacccctcaaaacgaacaaacaaaagcttactggtgggtatttggttcaacaagggcacccaaaaactgatcccttatttcaaaattccacgtttattatttgggcaccaaacagtattttgagtcctatttataaaacatttaggg

SEQ ID NO: 57158 - DNA, 997 bp, Zea mays
  Clone ID: MRT4577_152119C.1
attttttttttttttttttttttttttcccttctaagacgaagtgcatgccctgaaatcacagatgccacatgaggacgacggccagatccacaacgacgcttttttttttttttctttgaaatcacaaaaacttttgacatttttcgacatagcagacgaaactctgtaattattaattcttacagaagtatacatatatatatatatatattcagaggaacaacacactagggtgcagttcctaggaggatgaaggggcgtccggttgcttgccagggagcgctgcttcaaacgcagggtgtgacatgtactccgagtggagcctagcaagagtggggtagtttgacatgtcaattttagtgcgttcaatggctgcatagatctggggtgcaaggaatacatctgccagttggacttcatctcctgttgcatacttcccggcgcatccttttagttgtatcaggttctcaatagctgtgaaacctctctcgatttgttgttgagtccacaacacactctcccctgcaccaaccttctggtcaatgaacctcaacactgtgaggttatggagaggttgaataccagaagctacaatgcttgcaatctggtgattcaaagctttcttttgaaggtcttgaggtagaagaggaggctctgggtacttgtcctccaaatacagtgttatcgcgtaagagtcacctattacagaactgccatcaaccaacgcagggacgaacttcataggattaagcttgacgaattctggatcagactgctcgcccttgagaaggttcaccgccttgtactcgtaatccacacctttgagattgagagcgatgcgggcacggtgggagcacgagctgcgccagtacgagtacagcatcagtcgccccaccgtcgcctccgcctccgccatttgcagatcagtagattacagtgacgacttcgctcaaccgtagcccgagaccgagagcgagagcgacggaagaagagga

SEQ ID NO: 57159 - DNA, 492 bp, Zea mays
  Clone ID: MRT4577_15211C.1
gggcaggtggaccggcggcgtctgtagccacccccatcctgtgcacgcgcgtcgagcttgctcgatgcactctactgcaccccgacggccatcaccctactgctcacctaaatgcctgtcgttgcgagagcagtgttgccagcagctcacgcatgtggagccgcagcaccggtaccaggcgatcttaggcttggtcctccagtccattctgcaacaccatacggaaagcggccaggtaccgcctctggtggcggtgcatatagcgcatcaactgacggcgatgtgcggcctgcaacagacgactacatgcccctacgctgctggcggaggtgtccctcactgaagaaactatttgctgaacaatagccgctgactagccagctagcggagttattgagcggccatgatggacaaatactgacggacacatcaccactgcaggaaccgactgcgtgcgcatacacttgtgccaacagtggacacgaatgaaaa

SEQ ID NO: 57160 - DNA, 157 bp, Zea mays
  Clone ID: MRT4577_152120C.1
cgagcccgagaccgagccgcagagtcacgcgacgccagtctgtagccagcagcaggctatccaggagcatcatgacgacgatgacgaagaactcgcgctggagctcacgctctggctggagctgctcgtcaggcagaggcagcggtccaagtcttcg

SEQ ID NO: 57161 - DNA, 425 bp, Zea mays
  Clone ID: MRT4577_152121C.1
ccgcccgccgggccggccggaccggaccgcccggaccgacccacgcgccctttcatgcgggcacacgcactacacgcacgggacgggcacacataaacagaggggagagttatagcacgaccaaggacctaaggtagctacctaactggctagaaagcagaagccgcgcagcaaagcgaaagcacaaggaaacaacgcactggagaaccccgcgagggcgctaatgggaccagcggagcataccaaacccaccttgaccaagcatgtacacccgaacggcctggcccgtgagcagggagataaccgaggggggcaagcgccgacctggacaagagatacgggagggacttccccgtctacgacggccgcggccccgacgccagccttgaggcccgctcccgggagaacaccagcgaaatcgggaa

SEQ ID NO: 57162 - DNA, 295 bp, Zea mays
  Clone ID: MRT4577_152122C.1
ggctcgcttaggagaccgctcagtgggatggcacgagcaacctgaaacgatgccttctatgcaaggagtaatgaagtacttgtagatcctgcatactataccagggcaccggccacatgaccgatcgataaagtagtctgtacgtcgctccacggagacatcaacagcatgacacgtgagggccaaaaacaaagatctagcttcctacgagaacctgtcaatgtgatccgatagacaaagaataacacggactttatgtcttaccagattttaggaccaaagctcataaatctgt

SEQ ID NO: 57163 - DNA, 190 bp, Zea mays
  Clone ID: MRT4577_152123C.1
aaaaaaaaaaaaaaaaaaaaaaaaaaataaaaaaaaaaaaaaaaaaaaaaaaaaaagagtaaaaataaaaacaagggtcggccgttcattaggttccaagcttacttccccttacttgccacgtcttaacttttctataccttcacctacattaaattaactgtcacttagttcttacaacgatcacatt

SEQ ID NO: 57164 - DNA, 131 bp, Zea mays
  Clone ID: MRT4577_152124C.1
gggagccaacatataactccctcatttgtattctacacggtatgctatggacctggggggggttcttactaagttgaggtatattgcatgagatagcatgcaccggttaccatatatactatttatacttc

SEQ ID NO: 57165 - DNA, 374 bp, Zea mays
  Clone ID: MRT4577_152125C.1
gcgccgcccaaggacctcgccgcggcccccaagcgcgcgcaggccgccttcgttggggcggctacaaacaaccagctgctccaggtcatggtgattaaggtatccatccactaccatggctgggcggtgaaagtcaataagtacatctccaatatcgaagatacgtacatgcatcctcgtatatatactcgcatatatatactcactacatacatacttacacatatacatactatcaagtaaagtgccgtgccatatctacctttacgtacttactagcatacatatcatatgctcacagactactcatcacagctccggataggagcacaaacaacgcttgtagacgacacgctctgaatttcacacgttcc

SEQ ID NO: 57166 - DNA, 316 bp, Zea mays
  Clone ID: MRT4577_152126C.1
aacttcccggtcgaccggcccgaagggccaattcaaggcccaggcccaccacactgggggaccctactaggggacccaacctggggaaaaaacggggagaaatgatgcccgtaggaaattgctgtgcgaaaacgattcccgcacacaaccaacccagaacataaaccggaaacccaggggggccaaacgggggggccaaatgaaattaattacgtagagtaaactggccgctttcactgccggaaacccagccggccaacctgcttaaccaaacggccaaaccactgggacaagccgcttggaaaaggggccctct

SEQ ID NO: 57167 - DNA, 500 bp, Zea mays
  Clone ID: MRT4577_152127C.1
ccggggggaaaaggcacctaaccccggcccggttaaaaaaacagggggaaaaaagggggccaacaggggggggaaggggggcccggcaaaaggaaatttggccaaggggacaaaggaaggggaaaaaatcacaattttaaaccaaaaccaaaagtggccctaaggcagaacctttggaaaccaaaaaaaggggggggccctttttaacctccccaaagggaaaaattaaaattggattttctcggccccctggaatatttggaaaaaacccggacccccacaaatttcctaacggggggcccaagaggttttttggaaaacgccctaaataaaagaaaagtccccctttatataaaaagggcccccgttggggggcccccggccttcaaaaaaagaaaaggggggaaaagggcggaatcccctaacgaaagtcttgctcccgggagggtaaaaacaagtttggcccccccatcctttggccacaggggccccgcccaaaa

SEQ ID NO: 57168 - DNA, 2146 bp, Zea mays
  unsure (1)..(2146): unsure at all n locations
  Clone ID: MRT4577_152128C.1
gcagcccatccatatggccgggaagcatctaaaaacccaactccagccctcgacgagcacccgagagacacgagagtgaaggaaagaggaaaaagaagaagactacagccaaaaccctatctcactccggcgcgccaccggccgatggtttcgatgaacaccacgccgaatccgcttgactccgccgccggcagcgccgccgtcgccggcggaagcgtggacgagggaggaggaggaggcggcaggaagaagcggatgcgcggggcggtagcggcggcgatggtgccgccgccgatggcggtcccgctgccggccgcggcgcccgcggcgggggaggaggttcggaaggtcaggaagccgtacaccatcaccaaatcccgggagagctggacggagccggagcacgataagttcctcgaggccctgcagctttttgatcgtgattggaagaagattgaagcatatgtcggctcgaagactgttatacagataaggagccatgcacagaagtacttcttgaaggttcagaagaatggcacaggcgagcatctgcccccacccaggccaaaacggaaggcagctcatccatatccccagaaatcatctaaaaatgtttctcaaactattttattacaagaacaacctactcagcgggagcaaggttctgtcatgcctatggatactgctactgtgagaaacacaaatgcgaatgtggcggtgccttcctgggacaatactcttgctcaacctttcagcgctggtcatgttcaaggtgcagctgcaacaaataactgttcaagtagcatggagagtccatctggtacttggccaacttctgaagcagtcgagcaagaaaatatggttccaccactccgtgccatgccagattttgcccaagtatacaacttcctgggaagcatatttgatccggatacaagtgggcatttgcagaggttaaaagcgatggatccagttgatattgaaacggcactactacttatgaggaatctttccatgaaccttaggagtcccgactttgagcaacatcggaggttgctatcatcatatagctatggtggcgcggaccatgtcaaatctgaagccatggaaaatcttggatctcctcagagtggccatcttccatccctggtaacaagcgaatgagagcacacttccaatttgcggtcggagctttggttgtttacacgggacattcctgtgcgctcccagcaatggagttgtggagacggctggtctgtttatgaatgctagagacgtatcgtggcagtaacatctgtatagcttccaataaatggtctgaccctaggcaagttttgctttttcgcgtacgtgtagatagccagttttgtgtgctcatgcaattttttcctgggtggggcctagatcgtatgtttttttatatacacactattggacgcgtgatgtaaatatgtgcaatctttgtaatgcttgaggtactataattatataatggatatgttatgatcgtgcatattgtgtgtgtgtgtgtgtgtgcatttcacaagcttcttgccttcctttatttgttatgtcccatttcaaagcttttacgatttctgcgcataactattgtttctgttttctagcttctgctgctatcttggctagtcttggctcttattaagagggtgtttgatttctatggactaaattttagtctacctattttattctattttagtccctaaatttacaaatatggaaactaaaatagagttttagttttcatatttagcaatttatgtactaaaatggaataaaatagagggattaaaaattagtccctataaaccaaacaccctctaaatatagctgggggcatgcacttggaacattcttgagttttagatatagtttccaaatattctgaatctatcagtgttcactaaaaaaatattaactccataaataatgtcagaaaggtattcattaagtttcaccaaaattctgctttggtcttactatccgtgaaattagaaatgccaggtcgtttacctccaatgtcagaaagatctcgntctcattgtcttcatctcgttggttttattcacaagagcattcaagttctccctgcagtaaaaaaatttggcttttagcacaacat

SEQ ID NO: 57169 - DNA, 630 bp, Zea mays
  unsure (1)..(630): unsure at all n locations
  Clone ID: MRT4577_152129C.1
ggtacccgcggccctctctcgagtttttttttttttttttttttttttttttttttttttttttttttttttttttttttttttttttttttggcagcaaaacccatcctttttgggtggaaaacccattttttttggaaaaaaaactttactttcccaaatctttacttttttcccggggaaaaggccccaaatttaaaacaaattgtttaaaaaaaacccgcccccttgggggcctaaaggagggaaagggtttccatttaactaatcaggcccaccaccccagggcgtttaaaccgtttaatcgccactcctgttcttggggccccccggccccaaccggaataaactgccccccctttttgccccccgggcccccgggagggccctccccccaggccctaacgggcggaaccccatggccaaaagcggcgtcctcgggggccatgaggcaggccttaatgggaaagggcctaaggccggcaaggctaaaaaaacccccgnaaaggaccgtccacggggccacccggcccttgacaacctccagaacctttttgagcttctccaggttttcgcccccaccgccgggttgccttcggggcccaaaaacggggcgaaccccccctcccc

SEQ ID NO: 57170 - DNA, 156 bp, Zea mays
  Clone ID: MRT4577_15212C.1
gccgctcgaggcggcgggccggcgagcactctggtggctaagtgatatcctctgatgcttgtctttagcacctatgacttgtctagatatgaattatgattcttgttatgtctggagctggctagatgcaccagaactccctttttctatcttact

SEQ ID NO: 57171 - DNA, 409 bp, Zea mays
  unsure (1)..(409): unsure at all n locations
  Clone ID: MRT4577_152130C.1
cccacgcgtccgtgccgatcgagcagagttgtgcggcacggactattcttaattgttttgttgtaaaatatgtactacgtatcttctttttttccccgatgtgtgggaataccaaggcactgtatgaactagcaagctcaacaacaaggatttcaaaataatcgaaaagagagatgggggtaggaagaacgggggctatgtagctagaaacaaaacgtgttgtggtttgagaggaacccacgaaacggcactagtttgagacagtgttcgagaaatagcaattgttttcaaacaattcaaagaacaacagtagttttatcaaatgaatttagaaaacaacactccatatatatttttcgtccttttatttcaggcctcacangcanatagaccagattgcccctatctt

SEQ ID NO: 57172 - DNA, 761 bp, Zea mays
  Clone ID: MRT4577_152131C.1
gcccgggagccgttacatgtctacaccacgccgccgccgcccgtcgtcccatcctcccaggctcccagccgtactacacgtctacaccacgtgccgcctgtccctagtgcgagcgcggagcaccctcctacagtcctgctagctgctatctcccagtccggcagtcccaggctcccagctcggcagctcgccagacgccagcacggattggcctcgccgcggcactgtgccgtagccagctcgcccagcctcaacagctcctcaacggattggcctcgccgcggcaccggtgagcggtccagctaggccacggctcggctctcggcagacggcagctacctcccagccggtcagccgcccagcctcaacaactcctccaccacacgccgccgtgacgagccgtccctccccagccggccaacctcgacagtatttatttatccaaaactaacttatttttgtgcattaacatgataaagacacattagaattttctaagaataatgaagatgtagcaagtgactcctcttcataagcaatgtgtcttatgtttattgacagatgtgagcagatgagcctggttgtaatagtctatgcatgctaagtgatccagttgtgagcaagtgattatgaatatgtgttttaaactttatattgtgtcacgtgtgctagtagacgtatatggcttcttatgttagccaagaccaagacttatcacttatgtgctacattaaagtaaaaaaaaaaaaaaaaaagcggcc

SEQ ID NO: 57173 - DNA, 263 bp, Zea mays
  Clone ID: MRT4577_152132C.1
ggatttgtgagccttcttacttcagatggcaacactaaggatgatcttagactcccaactgatgagactcttgtggcccaggtctgtatggaaatgctttccatcctaagcgctgctagttttcttgttggcttccgagtattctcgatgatgggtttatttgttagcttagtcatatgcgctttctcagtatgttctcttccttaaattttgttaatggattaatggatttggttcttacgattacaagtattgtggaaagt

SEQ ID NO: 57174 - DNA, 399 bp, Zea mays
  Clone ID: MRT4577_152133C.1
aaatgggccttgggtattataaagggggaccatcaaaaaaaaaaacgggggggggtgaaaaaagaagcaaaattttggggcggtgggggccatagcacaccggttttgggggggggaagcaaaactggggggtagacgtatcgggatgaaccggtcatagggggggcccgggacgggacacgttcatgggaaaaaacacttttacttgggggagttaaaaacgcgcaggggctgcaggaacccgagcatcctgtcgagggcgtggggcacaacccccttggccacctggggggggcggaaccgggcctcccacgcggccaaaaagggggtccgggccgggtaaatgagcctgcccccgaagatcctggcgacgggcccaaaccaaccgggggacccccc

SEQ ID NO: 57175 - DNA, 246 bp, Zea mays
  unsure (1)..(246): unsure at all n locations
  Clone ID: MRT4577_152134C.1
ggggggggnngcgattgggtacctcgagccgccggggcctgttccaacacggcggcggcggagtgctctctcgcgtgcacccggcacactccctcggttctgccgtgctcatcgcgagcactcccgtctgtctctgctggggtcggcgacgattgagaggctccatacggcaggtgagcaaatctctaccttcggtaccttcacctgcgacgaccatcacctgatttaactgttgatcatggaaca

SEQ ID NO: 57176 - DNA, 328 bp, Zea mays
  Clone ID: MRT4577_152135C.1
aagcaccctacatcgaacagacatagataaggcttgacattatactgtgtacaagtcacattactttaaatacaaaaactatacgatacttatcgacatgacgtcgtcatgctgtgctgacacaagtcatgcaaaaatgaatgacaaaccccaccatgtaccatacaccacacatctatcttagattgcttcgcagttcttggctgggctgggcttttcacttaaacggccactggatggtctgcgatctcactgtgttcagcataacttgaggtagcactattaacaggaacctaactcacagcatacggtgatgcacttgaagcac

SEQ ID NO: 57177 - DNA, 561 bp, Zea mays
  unsure (1)..(561): unsure at all n locations
  Clone ID: MRT4577_152136C.1
acttcttttttttgatcgaatgaatcatgtgagatccgaattattatctagagaaatgtacgtaaaatgtaacaaatgggaggctcgatttgatgaggatgaggactgaggagtccattgactgctgctactaattctatgtactactcaatgcatacatacatgctgttctttggaggcaccgtcgatggtgcattgcttagttgcttcgatgcatgatttcagaaagtaaaactctatctaagctaccctccgccggacgccggcaaggttcagccaggtcacctggcgtcgccggcggtgctgctgaacccgatgtcgtggccgcccctccgcagcgtgctggtgagcgacgacgagctgagcgagtccgaggacgagtccgacagggcgagccccagcatggcgttgtagtccgacacgctgtcctgcaggctgagcagcagctgctggttgttagcgctgctgaggctcatggacggccgggccgccggcacgaacggcgggtccgcctcgccgcccagcacctgcgccacggcgcgcatcccgggccgcngcgcc

SEQ ID NO: 57178 - DNA, 442 bp, Zea mays
  Clone ID: MRT4577_152137C.1
atttttctctttgcttatagattgttagccacgggcgggcgtttttgaatttagtccggcggatagcccaacacaaaacagaggctcacctggaatccgcggctcgacacaccggaccagaaaaagggccgtcgtggtgaccaccggccctcgcggggccggcacggggcccatctgcccctacatgcccatgaactccaccaacccgccctacaacctgacgcccaaacgggtcaatccgcatcaaggagcacatcaagaaccgcggagggcaaaaacccgcatgacggccgggccccacctacgaagaacccacccggccgggccgggccctgggtaacgggggctaatatttgcgtacgagctcttccaggaccctgccttcagcaatgtcctcctggggcaccccaaaacagggggcggtggcccataggtgggcggc

SEQ ID NO: 57179 - DNA, 333 bp, Zea mays
  Clone ID: MRT4577_152138C.1
tgctattttactgtcactgcaccactcgcgacagggcctgcataaggggtgtgtggtgtgcacaatgcctactcacgcatttttaaagaggtctacgctgataccactgaacagttttaacatggcatgacaatccctagaatcagaaaagatacacagacacgacatattggctgaaaaggtagaaccctatcaacctatcatgctatgcatggagacatacaaaagatccggcttttgacaatgcacaagctaatgatatgtacacttaacttaatgaagataaacatgacctcacggtaaacatatattgagactgtaactaatgccatg

SEQ ID NO: 57180 - DNA, 248 bp, Zea mays
  Clone ID: MRT4577_152139C.1
gagctcactatttttgcggccgcccttggttctagatccattgcgcacagcaccgagatcctcattttattttgaaaggaacacgtagcgcatgaacaccagacaaacactcacatccagctgtacagatggccaatggggagcactctgtgtctgatgcctggcctgttttttcgcacacgacataatagattttcgatgtatggaggggcaaaatgcacttactgatgttcatatgctacatcaat

SEQ ID NO: 57181 - DNA, 426 bp, Zea mays
  Clone ID: MRT4577_15213C.1
gggaaaaaagaagtaaaaggaatggacaaaataactactataaaagaacctagaaaaaaatacacacaaaagaaagacaaggacaaggggcgccctttgtagagggcccatgcttaggtgcgcgggcctgcaagcttataggtattgatatagtggaacgaaaattaaatagattgccctcttattaaaacggcattgcttatgaaaatccttgccttaacccatgtgaatagattctatgaacatcttcttttacacatttgtggtaattaagaataggcccgaccagatactcatatctaacagctgcgaaatcttggtggcttgtggaacacgccttgtagcgatcaattaagcgcggagggtgtgggggttctcgaaatctaagcttttaattgggcagctgctaaggcccagctcttttag

SEQ ID NO: 57182 - DNA, 2728 bp, Zea mays
  Clone ID: MRT4577_152140C.1
caatttgttaagtggcgggctcaggctcagcccaccctccatgttccatggctcgctgctctctgattgcttcatccatccattaactccccccctcctttattgtgcatgcatgctttcctcctgtatccaccctgcctcggtagctgtctctccacggcgtcgaccggacggtctctctctcgtctctcccgacgcgcctccacggccggccccgccccggctcgctagcctcctcccactcccagtaccagcccccgcccctccagcaccaccagcagctcgccttcggaccatgagacgggtcggaggagacctgcagggcgacggcacgacgcctcggtccgcggcggcggggcaggccatgatggagcttcaggccaacgggtcggccgccgtcgggggcgccatggtggtggggctcagcccgctcagcgaggccctgtggcgggacagcaaggcgctcccgccgggggccggccccgccgcgctcatcggcgacgtgtccgccaggctcacgtggaaggacctctgcgtcaccgtggctctgggccccggcaagacgcagaccgtgctggacgagctcaccgggtacgcggagcccgggtcgctgaccgcgctcatggggccctcggggtccggcaagtccaccctgctcgacgccctcgccggccgcctcgccgccaacgccttcctctccggcaacgtgctcctcaacggccgcaaggccaagctctccttcggcgccgcggcgtacgtgacgcaggacgacaacctgatcgggacgctgacggtgcgcgagacgatcggctactcggcgctgctgcggctgccggacaagatgccgcgggaggacaagcgcgcgctggtggagggcaccatcgtcgagatggggctgcaggactgcgccgacaccgtcatcggcaactggcacctccgcggggtcagcggcggcgagaagcgccgcgtcagcatcgcgctcgagctactcatgcgcccgcgcctcctcttcctcgacgagcccaccagcggcctcgacagctcgtctgcgttcttcgtgacgcagacgctgcggggcctggcgagggacggcaggacggtgattgcttccatccaccagcccagcagcgaggtgttcgagctcttcgacatgctcttcctgctatccgggggcaagaccgtctacttcggacaagcatcgcaagcatgcgagttctttgctcaagccggtttcccttgcccggctctgcggaatccgtccgaccatttcctgaggtgcgtcaactcggacttcgacaaggtgaaggccacccttaaaggatcgatgaaagcaagggtcgagaggtccgacgatccacttgacaggatgaccacatcggaggccatcaggaagttggttgcatcctacagcaggtcccagtactactacgccgcaagggagaaagtaaatgacatctcgcgaatgaaaggaaccgtgctggattccggtggcagccaggccagcttcctgatgcaggcctgcaccctgaccaagcgctccttcatcaacatgtcgcgggactttgggtactactggctcaggctcctcatctacctcctcgtcaccgtttgcatcggcacgatctacctggacgtcggcaccaaatacacatccatcctggccagggctgcctgttccgcgttcgtctttgggttcgttacgttcatgtccattggaggattcccttcgttcgttgaagaaatgaaggtcttccagcgggaacggctgaacgggcactacggtgtcgcggcgtttgtcatcagcaacaccatctcggcaacgccgttcctgattctgatatgcttcttgtcgggaaccatatgctacttcatggtgcgcctccatcctggcttcgagcactacatcttcttcgtcttgaacctgtacgccagcgttacggtggtcgagagcttgatgatggcgattgccagtgtcattcccaatttcctcatgggtatcatcataggggccgggattcagggaatattcatgctggtctctggctacttcagacttccatacgacatcccgaagcccttttggagataccccatgcagtacatcagcttccactactgggcactgcagggccagtgccagaacgacatgaagggcctcgtgttcgacaaccagtacccggaccaacccaagatccccggggacttcatcctcaagtacatcttccagatcaacgtggaccgttccaagtggatcgacctgtcggtcattttcagcatgatcttcatctaccgcatcctcttcttcctcatgatcaagatcaacgaggacgcgctgccgtggatccgcggccacatcgcgaggaagaggatgcagaagaagggccctacccccaccatgggcaagacgccttcgctgagaggctacgtcgtcgatccggagctcggttccaacgagggctagaggtcgtgcttgctcttttgggtagcggaaaaaaaatagggtgtttctcccccccggctcttggtgttatattgtatatttaagatcaggggaaaaaaaactggtatcacacgttttggaaccgaagctaatttgagtacaggtatacatacatgcatgtaatgtgagcgaagtggcatcggagagagatcgatgccgagtgatacatgcatgactcgttgttcagaatttattgccttcgacttcgacagacgaagaagtggttgg

SEQ ID NO: 57183 - DNA, 1039 bp, Zea mays
  Clone ID: MRT4577_152141C.1
gttctccaacctggccatctgcaaggccgtcggcggcggcgggaggaagaaggtgcacatcgtggactacggcgaccactactacgggctccagtggccgtcgttgctgggctactggggtagcctggaggctgggccgcccgaggtgaggatcaccgccatcgacttccccgagcccgggttccggccggatgctcggctccaggcgaccgggcggcggctcacatgcttcgctcggcggcatggcgtccccttgaggttccacggcatcgcggccaggtgggacgcggtttcggtggacgagctgagcatcgagcgcgacgaggtgctcgtcgtgaacggcctgttcagtctcggtaggatgcaggagcaggagcaggacgacgtggatagggatagccggccgagccctagggacacagtcctcggtaacgtccggaagatgcggcccgacgtgttcgtcctgtgcgtggagaacagctcgtacggcgcgcccttgttcgtgacgcggttccgggaggcgctcttctactactcggcgctgttcgacatgatggacgcggtggcggcgcgggacgacgacgaccgcgtgctggtggagcagcacctgtttgggcagcgcgccttgaacgccatcgcgtgcgagggctcggacagggtggagcggccggagacgtaccggcagtggcaggtgcggaacgaacgggcagggctgaggcagctcccgttggatcctgatgcggttcgggccatcagaaggaaggtgaaggacaagtaccacagggacttgttcatcgatgaggatcagcagtggctcctgcaagggtggaagggacgagtactctacgccatgtctgcgtgggctgcaaaatgatacgtacactagtttaacaaagttcaaagaaaacaccattaatatctatggctcatgttcaaaaaacgtttgattccgagaattgtaatctttcttcttcttttttatgaagggacgtagaaagagtatataattaattttatggattacttgtttgactgtcct

SEQ ID NO: 57184 - DNA, 131 bp, Zea mays
  Clone ID: MRT4577_152142C.1
gggacaagggactatccattatgataaggggaaacctggaccatattaaaagcaacccgtgagactaattccgagggccaggagggcaagacgaaggtctttgaggtgctcgggtaataacatacatagat

SEQ ID NO: 57185 - DNA, 736 bp, Zea mays
  Clone ID: MRT4577_152143C.1
gtgcacgtgccagtaatgtgcaaccgtacgtagctaccttcacgtcgtacgagttgaccagcccccgttgagagtcgagagagttccaccgctcccggcccgatcccttatcttctccgacggcgacgccggccggagcggagacgggagaggtgcatggcgttgtcctatgtatatagagtctaggtataggttgaggtcgagtagtgcccatgtggtgtatggctgtatgccgatgtggagagcgccgccgccgcgtacgagcagcggctggtggctcacggcggctgcgtctcaggcaaggctggctggcggccggtcgctgccgaggggcgtgctgctggctcatccaccaataagctcgtctggtcccctgttctggaggctctccgctacttctctagctcgtggcgtcgccgtggtggtgaagacgaagagtagaagagatggagaaccagatcgggtcagtgctcttatccggtggctgtttgggagtggccttggcgccagctacggcgttcggcggccggccggctccatcacgtcatcgtacatgctggccgaagggcggcctttctacttcttcctcccggccaagatgcctaaagggaggcagctcatcttctgcacggagtctatggcgtggtgccatggaagcttagttgtcccaagtggcaatgtccccggcgacggcgaagttacggccgtgcagaagatgtcaaggacccgattgctt

SEQ ID NO: 57186 - DNA, 706 bp, Zea mays
  Clone ID: MRT4577_152144C.1
cgaattcgcggccgcgtcgacttttttttttttttttttttttttttttatgccaagcggttttcttttgttataggcgacaagaattgcacggctgtacacacaaaagcaaacagcacgcagtgaatagcagcgtacgtacagataccgtgctagctagctcaaacgaagattattgccgcctgctgctgtgctgtgcctcacgtcgtcagctagcttctcctctgcgattctccgctactacgtataccgtcccccgtgcagccgcgcgccgcgtatgtagtggcggctggcgtgcggtcctttgcgcgattcgatcgacctgccgcctggactggatcacgtgtttgtggttcacgcacgcacgcgtgtcgtttcgattacttgtaccgcctggagctggagctggctttgctgctgttgtggtaccggtggtcgtcctcgtccacgacgcccagctcggcggtgcagaggtcgttggcgaacgccattcgccggaacagctcgatgtccgccgagtagcggctcgagtcgtacgccatgctctgccccagcttgacgccgctggtcaggtccgacgagcactcgcccacgtccagcgaccgccacacctgcaccatcctcggtctcttggcggcggagtggcgcacgcacgcggcggccgcctccaccatcctccgcatctcggtcttggagaacctcgtgc

SEQ ID NO: 57187 - DNA, 291 bp, Zea mays
  Clone ID: MRT4577_152145C.1
tgtcttagggcgtgctagagttgagaccttggagtccataataagaacacaagcctgtaagagaaggatctttaatactctagttgaaggacacatgctaggcccacttggtgagaaactgattccaaactatttttttttgcagcttatcacttagggatctatatctgataaagaacaccgaagctttgggtttcttccaacgtacaggcctagggatacacaagttgagtcccccacgcccgtgctctccactcctggggccttgacactccttgacaaaaggcgctg

SEQ ID NO: 57188 - DNA, 257 bp, Zea mays
  Clone ID: MRT4577_152146C.1
gggcagccctggcgctgctgcagcggtagtagccgcgcgggtagggggaccccttgatgggcttctgcccgtacttgcgccacgagtagtcgtcggcggggatgtccgacgacgcgggcgcgtgggggtggggcggctgcgaccccgccgcggccgcgggcacgcgcaccgtgcgccttgacagcatcccctgccgggcgcgcttcttcttggaggagcagtggcaccgctcggcggggtgggggtggtgcgcctgg

SEQ ID NO: 57189 - DNA, 378 bp, Zea mays
  Clone ID: MRT4577_152147C.1
attacttttgattaactttattacaatggcgccacgtataggacaaaagacccaaaaagaagaaactgtggtgcaattgggcccacaagttcaagaaggtgaaaatgttttcggtgttgcccacatttatgcatctttcaacgatacttttgtacacgtgactgatttatctggcaaggaaacaattgtacgtgtaactggtggtatgaaagtcaaagctgatcgtgatgaagcttctccttacgctgctatgttagctgcccaagatgttgctgaaaagtgcaaatactgcgggattactgctttgcatatccgattgcgtgctactggaagtactatgactaaaaccccaagaccacgagctcaatctgctgtgcg

SEQ ID NO: 57190 - DNA, 369 bp, Zea mays
  Clone ID: MRT4577_152148C.1
cttaattcggctcgaggtcctcttccattttttccttccagtaggttccaccccaattcggggaagggatcaagatgaacaactccacctcaccggcggtggactggggtgaccaccccgcgggggagatggactctgaggacgcagcgccttcctcctccatgggcatcagcatcgccattggcagcaagatggaggtcaacgccaacaaccgtcaacccagtccgactcctgacaccgacttatttaacgccttccccgacgacttcgactaccaaaacctcgactgaaagccgccgcaacatcttagctcgccaagaccccttacgtcagatgggaagtcgtatacgaacctacccactttcaagg

SEQ ID NO: 57191 - DNA, 290 bp, Zea mays
  Clone ID: MRT4577_152149C.1
caccgtaccattccgtccgcagaggagagccctcccctccaccggcttacccgcccctgggccagcgatcgcgcctgcttccgggcgtcccagccttggtccggtcgccgggtgcggcgctggtcctggtttgggctctcccatggcatctctggagcacgaggtggtggtcgccatggcatctctggagcaggaggcggtggtcgccgcggtcgtcgtggagaacgtgacgccgtagcagcaaggcggaagttgtggcggcgcacgaggaggaggggataccggtagcg

SEQ ID NO: 57192 - DNA, 422 bp, Zea mays
  Clone ID: MRT4577_15214C.1
aaaaacaaatgttttaaatttttcccttgggggggggagccccccaggggccccttggagggttttgtttttagtagtgggcaaaccaaacagcctttaattttttttttgccaatttttacatgtttgggctgtttttagtggggaaacctttctttaaagggtgtactttttttccgcttccatttttcctgtttaggatttttgctgctcccttttgtttttttacatacatgactgggtgcccccattggagagttttcccccattttaaatgggtttgcaaacctttttggaaaacaaatttttttgagttgattacaagggttgggcattttggggccttttcacctttccaaaaaggattttggttgccgtcaggttttctttaccgtaaaagcgttaattggtctccattttgg

SEQ ID NO: 57193 - DNA, 377 bp, Zea mays
  Clone ID: MRT4577_152150C.1
gacactatagaagagctatgacgtcgcatgcacgcgtacgtaagctcggaattcggctcgaggttacaagtagagtggtgaagtggagtctgtttggtggctttgctgtgtagcggcctgcggtctactcgtttgtttgacgctccatcataattgcagtgaagttgcagaccataccatcccacgtgttggttggaggtccgctctttggttgtgctttttaaaaaaaaaaaaaaaaaaaaaaaaaaaaaaaaaaaaaaaccagagctaatatacaaagaaacaacaaaaaaaactaaacctcttacaagaaaaacaaaatacaaacccgccgtcaactaaaccaagcacgcgcaccaaaagacggggcggccccc

SEQ ID NO: 57194 - DNA, 337 bp, Zea mays
  Clone ID: MRT4577_152151C.1
atcccccaaaacaatgcccgggttgaatcatctcttccaggaaacaaaacaatgtttttgttgggggggcattttatcaagggggaaaagggaaataaaggccagatgaatttcccctttgggggaaaaccaacccccaatccttgggaaaccgcccctaaccctttgggggtttttaaacacccgggctaaatcccgggggttgaaacccggcccagataatctttttttgaccactttttgggctttggcccccctgtctcaaaccgaaaattttccaagggtccctggtggtctagaccctttttttccggggagaaggcccaagtgttgaacc

SEQ ID NO: 57195 - DNA, 998 bp, Zea mays
  Clone ID: MRT4577_152152C.1
gccggccgggctgcggcgcactctcctcctctcctgttcctgtctatccactttccactccttcactgccctccgtctccctccccttccttcgctcgccatggccatggcgacctccaccttctccccgcgtcccgcaagcctcaggcccctgcgggcgggcggcaagcccgtcggactcctccccttcccgcgccgcctcgcctgcgccaccgccgccggggaggcgccgcccgtggagcagcgggacgaggcagagccggcccccgccgcggcctccaacggggccgccgtcaagtccgaggccccgccgccgcccgcgccagcgccggtcccggccttccgggacgccaggtgggtcaacggcacctgggacctcgccaagttcgacaagggcagcggcgtcgactgggacgccgtcatcgacgccgaggccaggagaaggagatggctcgaagactatccggaggcgactaacacagacgaggctgtcgtcttcgacacttccattattccatggtgggcttggatgaaacgcttccaccttcccgaagccgagaagctaaatggtcgcgccgccatggtcggcttcttcatggcctacttcgtggacagcttgacgggcgcgggcctcgtcgaccagatgggcaacttcttctgcaagacgctgctgttcgccgccgtcgcaggcgtgctgctggtcaggaaaaacgaggacgtcgagtcgctgaagaagctcgtcgacgagaccacgttctatgacaggcagtggcaggcgacctggcaagatgactccgctgggggaccaaacaactagttcagcgttgtggtacaaaaaaaatgcaaaacgctttcttgttacgtagcttatctatttcctcggccttcttgttttccctgtgtagtgagatctttttttttgtttttgacaaacgcaatgatctacgtcatgttgtaaaattgtatggaaaataattctgcagtttcagttttttttt

SEQ ID NO: 57196 - DNA, 1139 bp, Zea mays
  Clone ID: MRT4577_152153C.1
cattgggtacctcgaggccggccggctggcatacgctatcggctatcctctcccctctatccttttcttcacttcgctccgtcccccacacactgtcactgccagcctccccttcgcttcgcttagctcgccgtcaccatggcgacctccaccttctctccgcgccccgccaccctcaagcccctgcgggcacgcgccaagcccgccggcctccagctccacctcctccccttcccgcgcctccgcgtcgcctgcgccaccgccgccggggaggcgccgcccgttgagcagcgggacgaggtggagccggcctccgccgcggcatccaacgggactgccgtcaaggtcgaggcgcccgccgcgaagcccgagtccccgcccgcgcccgcgcccgcgcccgcgcccgcgccggtcccggccttccgcgacgccaggtgggtcaacggcacctgggacctcaccaagttcgacaagggcggcggcgtcgactgggacgccgtcatcgacgccgaggccaggagaaggaaatggctcgaagactacccggaggcgacgagcacagacgatgccgtcgtcttcgacacctccattatcccgtggtgggcatggatgaagcggttccaccttcctgaagccgagaagctaaacggtcgcgccgccatggttggcttcttcatggcctacttcgtggacagcttgacgggcgtgggcctcgtcgaccagatgggcaacttcttctgcaagacgctgctgttcgtcgccgtcgccggcgtgctgctggtcaggaagaacgaggacgtggagtcgctcaagaagctcatcgacgagactacgttttacgacaggcagtggcaggctacctggcaagatgaccccaccgaggggccaaagaattagttcggcgttgggggtgcaaacgcagaatgctcgcttcttgtggtgtgtctttgcctctttcttcggcccctttttgtttcaccgtttagtcaggcttggaggaactttttgatgatcgtcataatctatctatctacgtgatcttgtgcaaaaacaaaaggtatgggagtactttctgtgctagagataataatcatgttgcagtttcactggtttaaaaaaaaaaccgcgacccccccccc

SEQ ID NO: 57197 - DNA, 838 bp, Zea mays
  Clone ID: MRT4577_152154C.1
cggacgcgtgggtaaattctgattctgagggtgctggcactcgatcatacagctaccgcgtatgttgagctagttattgctagggtaaaattattttattgaattttaatttcttagccctgcgcaatctttaggttgttatgcaaactggtgatgctgagctggaaatgcgagggcgctgcagtgctggtcagaagtttcttgcttctcttataatcagactagcacttgcggaaactttctgcctgaactgcggtatattggctttggatgagccaactacgaatctagatgggccaaatgcagagagtcttgctgctgcgctgttgagaataatggaagccaggaaagggcaggagaacttccagttgattgtaatcactcatgatgagagatttgcccatcttatcggtcaaaggcagcttgctgagaagtactatcgagtctccaaggatgagaagtacctacgagtacgatggaacacaacggcatgtttctgcgtcgttggagccgttggattcgcttcaacatttgtaaggttgtctcttaacgtatgatgcttgtgcaatgacgaccatatttgagaaagatatttgttaaaaaggagacttgtcacttaatatctagcttggctgtttgttctagtgaggtggtactatctaggagcgctgtgctatatgtggttgtgtcgtgttttagtttgggtgttttcttaccatctatctaagaggtaacgacctataccatttgacgatgtgaaccgttatacatctctatatttcttctctatgtatcccctaaagatttctctataagatatgttataaacttatattac

SEQ ID NO: 57198 - DNA, 873 bp, Zea mays
  unsure (1)..(873): unsure at all n locations
  Clone ID: MRT4577_152155C.1
cattgggtacctcgaggccggccgggaatccttatccccttctcatcctgcaattgactctgtggcctcttgccacggtctctctgcattttccaatggcgcccgcaatgagacctctcgccgctgccaatgttctgtcgcaggtacagcaggccggacgcaggaccttcaccaccaaccgcccgtcactcatcgccagcagagcgcgatggacgccccgccctacccagaaccagattgtcttgcgccagtctgtccgccagcagtcaactggaagcgcccccaagcccaagcggttccgccttctacgctggtcgtatcgcctcacccagctctccgcccttgccggcctagcatacatcggatacggcatttacgagactcgcaaccccgctgaccagccgccgcccgaccccaacaagaagactcttgtcgtccttggtaccggctggggctccgtctccctgctcaagaagctcgacacggaaaactacaatgtcgtcgtcgtctcgccccgaaactacttcctcttcaccccgcttctcccttcctgcaccgtcggtaccattgagcaccgctctattatggagcccatccgtaacttcctgcgccacaagaaggctcaggtcaagtactacgaggcagaggccaccaagattgactacgaaaagaaggtcgtctacatcagcgacgactcggataccaagggcgatgtctccaagaccgaggttccctttgacatgctgggtngnttggtgtcggtgctgagaacgccacttttggtatccctggtgtcaaggaacacggtcttttctttgaagaggttggcgatgcccagcgcatccgaaaccgtatcatggattgctgcgagac

SEQ ID NO: 57199 - DNA, 1165 bp, Zea mays
  Clone ID: MRT4577_152156C.1
ttcttaagcagtggtaacaacgcagagtacgcgggagcagtggtaacaacgcagactacgcgggcaaagtaatatttcaaagcacaaacaagagcttaaactgtcacagtacaaggatatcgagaagcgatatactaatcaatttctccagcttaagacaactgaaatggcaaacaaggacttggacagatattatactgctttagacaaggctcttatgcggttccacagcatgaagatggaggagataaataaaataatcaaggaactgtggcaacagacatacagaggccaggatattgattacataagcataaattctgattctgagggtgctggcactcgatcatacagctaccgcgttgttatgcaaactggtgatgctgagctggaaatgcgagggcgctgcagtgctggtcagaaggttcttgcttctcttataatcagactagcacttgcggaaactttctgcctgaactgcggtatattggctttggatgagccaactacgaatctagatgggccaaatgcagagagtcttgctgctgcgctgttgagaataatggaagccaggaaagggcaggagaacttccagttgattgtaatcactcatgatgagagatttgcccatcttatcggtcaaaggcagcttgctgagaagtactatcgagtctccaaggatgagaaccagcacagcataattgaatcccaagagatatttgactaagggtgttctaggaggctgtagcacgcactcgtttgctagtcgaatccagttaatttatgccaagtactggtgccagagcaatgttaacaagctttaggaggctctgttacgccgttacgtcagttgcgtgaaacctatccttcgttgttgtatacttatttaatctggccagaggatggaatgtgtgcactgggtgatggatgtttcacgacatcaatgaatgtttcacaatctagcatccgttttttttgcttcacatgatgtcatacaaaatcgctacggtttcatttggttttggaggtacctacgagtacgatggaacacaacggcatgtttctgcgtcgttggagccgttggattcgcttcaacatttgtaaggttgtctcttaacgtatgatgcttgtgcaatgacgaccatatttgagaaagatatttgtt

SEQ ID NO: 57200 - DNA, 388 bp, Zea mays
  Clone ID: MRT4577_152157C.1
accacctggcaactacctgacggtcctcttgtagctaaagggcccctgcatgttctacatgggcatctctctcgacggcaaccggctctgcaccggctacctcagcgcgttctataggaactggatcgagatcgagaacgtcaagaaccttctaatgaaccgtcactgttccatctacgggcatgtagccctggtgtggagcaagaaccagttccatcgttcttacaattgcaagatacttccttatagcttgctgctggatcttgtgactaacgtccagatcctacgcatgactctgctcaacagcaatttcttccacctcaacatctttgagtgcaataactatctgatcgacaaattgacggtcaatgtcatcagtgacagttcc

SEQ ID NO: 57201 - DNA, 186 bp, Zea mays
  Clone ID: MRT4577_152158C.1
aaaggcatatccaagctatgtttagatgagagacaaattaataatttctgcatcattaatagtgaatgtggctcttttgtattgatggcaggatgagtgagtcaacatgattaggaaatacctacaatgaaacctacacagttaacaatgatgataattattcacatatctaatttctatctaaca

SEQ ID NO: 57202 - DNA, 202 bp, Zea mays
  Clone ID: MRT4577_152159C.1
aattactacttgatggtctcaagagacacgctaggtgctaatcaattacaacataagtgtccaagtgccactatttgtcccgttttctttgtgtatgctcttgtatataggatcacgtatattactttatcccagtctccttacgctgtaggtcattcctctggaaaaccacacagatgtagtcctcatgcagacaggccat

SEQ ID NO: 57203 - DNA, 743 bp, Zea mays
  Clone ID: MRT4577_15215C.1
cattgggtacctcgaggccggccggggtggcgcttgcctgctcccccgcaacccgctccgctcccctctcttcgtcttcgtcaaggtctagtctagagagaaaaaagggcgagaggcggagagagataaaccccgatacccggaatcgccgtgcaaaatcaaacaaagccagagcggcagatacaataagccgcagctgcagcaagcggcaagccgcatcacagcaggcgccaccgtcacgccaccgcgcagccgagaggggacggacgaaagggggaaatcgcctgcctgcctgccgcggtgggttggtgggtgccgcctccgcatcctgctgctctgttccccagcccacccccatttacctcgcatggaatcctgctctcttcttctccactccacgcgccgatccgccacctgccaggagagcgcggcgcgatccagttgaggaggtacacacaggaggcgggggtgcctgcacgggcacggcgtctgtgagttctccttgtttccgccccaagcctggcctgacgtcatcgcgcgcctgcacggcgtcttggtggtgtggtcgaagcagcagaggccgccgccgcgcgggagaagccggcgcgaggaagcggtggccgggccgggggagcgcgatgctgtgggtggcgcgcctgtccggcttcttatccgccgccatggtgatggtggtgctgtcttcgtcgctccagtccttcccgcccgccgaggccatcccctcg

SEQ ID NO: 57204 - DNA, 392 bp, Zea mays
  Clone ID: MRT4577_152160C.1
cggacgtattggtctacccacggatgcaaacactcatgacaccactctggcgatcattcttaggtgtacaggaatggtcaactatcaaatgatcaggatctgaaagaacttattcaaactaggaaatgaaatattcacagctgcatactgcgatgatggcatgcagattcaaagtaagcttatgatgcctagagggcttgcacgaatccatctatcagaagatcggatcgtatggtttgctgaatcacacgtgacattcgctttctgacactgtgagacaagcctggcatattgtgcctctacgctaaaggcgccttgtgagtcctgcactgagattactatggcctactgtccaatgttcactagagattgtgctcaataggatttgacaa

SEQ ID NO: 57205 - DNA, 498 bp, Zea mays
  unsure (1)..(498): unsure at all n locations
  Clone ID: MRT4577_152161C.1
aaaaattttaaaaaaaaaaaaaaaagggagagccgggaacgcctnatccatccaaacaggggaggctatgtcggactcggaggagcaccacttcgaatcgaaggcgcgacgctggggcgtccaagacctacccgcagcaggctggcaccgaacgaaagaacggcttcatcgacatcaaaaaccgagggggaaagggaaaaaatgtttttacctccaagactggtaagcatggccacgccaaatgccactttgtcgccatagacatattcaatgggaaaaagctaaaagatataggaacttaatcacacaactgagacattccgcatgagaaccgtactgagtaacaactgatagatattacagaggaaggattagagagccttcttacttcagatggcaacactaaggatgatcttagacttgtggcccaaattaaggaanggttcgaaagcgggaaggatcttggtgtgactgtgcagtctgcgatgggggaggagc

SEQ ID NO: 57206 - DNA, 283 bp, Zea mays
  Clone ID: MRT4577_152162C.1
atccaggaccatgcggccaggctccgtttcgcgctggccacactcggcggcggcactaccgttcgctggtcggcgcggcggaagccgcggctgctcaacgggtaaaggagaaagaggcggaggcgtctgaggccgcgcggggccccgcggacctggaggaccgggtggcgcggctgagggcggaggcggcggcgtggcatgccaaggacgcagcggatcagtccacagccgcggcgctccacgcgcagctgcagaaagcggcggcggcgcatgcgaggggcaa

SEQ ID NO: 57207 - DNA, 1087 bp, Zea mays
  Clone ID: MRT4577_152163C.1
ggggcccccctttttttactttttttgacaaaagattatagcagtcaccaaaaaaccacattcgccaaaaggataattgcacaatgctagtccctttattataattacaacatgatatacttagcttcttcggacagtggctctgttcactgtcagaatgttctgatgttacatataacgagccctccatactctatccgattctgaaaggtcaccatatccttcagtaagtccggatcaactttctgcgaggcatagtcatcggcaaaataacttgacctcgtctgctttagctctgtattgttcccccttccgaaattcccaaggtattgccgaacatcgcagttttcgagcttttttactggctcgtggttgaaagagaaacaagaacttctgctccggggagtgtcaaagccatcaggatcatcgctggagacgctcctgatttttaaaccagcaccatttgtgtgactaaagataacactgtcagacacatcggatccagttgcgctaattgagcactgagtttgcttgtcagattccacatgatatccatgttgatcagccagagtgtggggttcttgaaagattgatctccctttgtggaaaaatctactattgctctttggtgggacattcacaactgaatttggttgaggatcctcaggtgatgagaaatcagtgctatccattgttgaaattgaaacacattcctcaaaataattcattgcctcttcagctaaacgccttgacactttcagtctttctatgctactctttcttcttggccgttttttatgtgtctcagtaaagtttggatctgttactatgcccttcagcattctgctcagttcttgttcccgctgctcttcaactgccaaatctgccctaagcttccgagcacgttcatgtgactgttttagtttcaatgtatattctgttatgtcaggagcgagctcagaggtgtcaggatcaaactcaagagaagcttcaaattccccccgttgctggtttgctccatggtgccatgtgtcctcgggccgaacagaagcatctgtatcaaactcaagagaaatttccatttgct

SEQ ID NO: 57208 - DNA, 747 bp, Zea mays
  unsure (1)..(747): unsure at all n locations
  Clone ID: MRT4577_152164C.1
gtgtaccccacacgnnnatattgnaagnaaagttacccacctggnaatnncaccaaannncagtcccaaagcttgaagaattgctatanncttgtagttggtaactccgtaggggatgtacccagccttttattagcattatgctgaaacgaactgcnnacgaattcggtcattatgttagattggcaactcatgtcaattttcgtacttttgtgaagtcagctggcattgatttttacccattgggtggtgatcctctcgggttatggctcagtatatgacaaaaaacaaagggtttttcctggcggcaccaacagagattgccattcaaagaaagcagcttaaggaaatcatcttctcacttctacctgcatgcacagaacctgatttggatactggaacacctttcagagctcaggcaataatcgcgaatcctcctgcttatggtcatctacacatagcagaagcacttggagcacctctgcatatcttcttcacttttccatggacgccaactaatgaattcccacatccattggcacgaatgcctcaaagtgcaacttataggctatcgtatcttattctggatttaatagtttggtggggctccaggggattcataaatgatttcaggaagaaattaaatttgccccctattgcttacttcagcacataccatggatctatatcacacttacctactggatacatgtggagcccgcacttatgccaagccaaaagattggg

SEQ ID NO: 57209 - DNA, 617 bp, Zea mays
  unsure (1)..(617): unsure at all n locations
  Clone ID: MRT4577_152165C.1
gggaatttgaagcttctcttgagtttgatcctgacacctctgagctcgctcctgacataacagaatatacattgaaactaaaacaggtctggtaattgttgtgccaactgtgtcatgcctttagctaaatgtagtcataagttataaccgtttactgctggattgcagtcacatgaacgtgctcgaaagcttagggcagatttggcagttgaagagcagcgggaacaagaactgagcagaatgctgaagggcatagtaacagatccaaactttactgagacacataaaaaacggccaagaagaaagagtagcatagaaagactgaaagtgtcaaggcgtttagctgaagaggcaatgaattattttgaggaatgtgtttcaatttcaacaatggatagcactgatttctcatcacctgaggatcctcaaccaaattcagttgtgaatgtcccaccaaagagcaatagtagatttttccacaaagggagatcaatctttcaagaaccccacactctggctgatcaacatgnatatcatgtggaatctgacaagcaaactcagtgctcaattagcgcaactggatccgatgtgtctgacagtgttatctttagtcacac

SEQ ID NO: 57210 - DNA, 806 bp, Zea mays
  Clone ID: MRT4577_152166C.1
ccggccgggccgggccgctggcgccccttataccagctcgttccagtcctcttcgagtcgggccttcccaccttctggtcgcgtagttcgagtttcacctcttgtcggttgccgccggcctcggcgagttccgcgcctctgcctccttaatcgacgaccagcagcttccccattctgcagccccgcttcgtcggcgtcatcatggcggtcggcggacggagccccgggtcgcaggaccctcccgcgctcaccatcgtcacgtcgctactcctcgccttcctctcttcctccgcacccgcggcagcatcctcgtccaccggcacgatgcacaacaacaattgggtcgtgctcgtgtgcacctcccgcttctggtgagccttcttcatcctgcttgttgtctgtccctgcctggctgctatgttgttggtacatttgtctatctcaagagcaaaacttagttgagcgacatgtctatacttggcgcctgatggggcggtaattaattctgtcacaccagcccccgcataacactaggtgccatcatagtggattgtccaatgtttttctgagtctgggtgacgagaaggcgaagaccatgtttaggctactataaagttagcgaggacttgtgaattgattaaatttcttgactcgaagactatatggtaccatgagagctttattgtccacttgcatatcttgggtgtaccttctcggttgctgaaaagatcattgaggctttggtctgatccaccctttatctcgtgtgcttcgaaagtaaatgatgcatttttgtgatgccatga

SEQ ID NO: 57211 - DNA, 620 bp, Zea mays
  Clone ID: MRT4577_152167C.1
agcctcggccagagcttctccgtcccctacccctacagaccgcgatctcgtcctgaaccaccggccgcgactgctgctccgcttgctctcccccgtcggagatccgcccggagcgactttcgtctttctgggtagtgccgacgctacagaaagcccaaacccggaaacagagaagacgacgccacatctacatttgcactcccacgcttaaagccggaggcggcgtaggaagcagcgatagccatggcgtcgtcgttggcaacggcaccggctgctgtacgtgaaatgcagagcgaccttgagtcccaggccaacgccctcagcaagatccagaaagacatctccaagaaccacgaggtccgcaagcagttcaccatccaggtcggcgagaatgaactcgtcctcaaggagctggagctgctgaatgaaggggcaaacgtgtacaagctgattgggccagtgttggtcaagcaggacaatgcagaggcgaaggccaacatcaagaagcgcatcgagtacatcacggctgagctagagagaatggatcgggcgctcaaggacttggaggagaaacagaatagcaagaaggaatcgataatcaagctgcaacagaagatgca

SEQ ID NO: 57212 - DNA, 261 bp, Zea mays
  Clone ID: MRT4577_152168C.1
gaggcccaaaaccaccaagttatattatatacattcccttgtctaataatatatataattccgcgatcttttccatcccccaccccatatttacacatttttattaatcttacttccttaatcctggcacaaactcctattgccaccacaaacgcacaaaacacagactagctatcccgttctccctctccattacccacaaaaacatctcggattcctttctcattccacaaaaaccggcaaacaacttcccattccccc

SEQ ID NO: 57213 - DNA, 808 bp, Zea mays
  Clone ID: MRT4577_152169C.1
cgctcgacccacgcgttcgtgtagcagaaaagtcaagagaaggcagttgccgcagcttcaaaatcaagtcttgtttctaagaaaagcaaggatgatgatgattctgatgaggatgagactgatgattctgattctgatgataccgatgattctgatgagggtgagggattatctcctgaagaaggcgatgacgatgattcaagtgatgaggatgatacaagtgacgatgaggaggaagaaactccaactcctaagaagaagccagaggcaggcaagaagagacctgctgaaaattccctgactcctctttctgataagaaagctaaggttgccacaccgtcagcccagaagacaggtggcaagaagggcgccgtccatgtggcaactccacacccagcaaaaggcaagacccctgcaaacaatgataaatcaaaggagaagtctccaaaatctggtggctcggtcccttgcaaatcttgcaccaagactttcaacagtgagatggcacttcaggctcactcgaaggcgaagcatggtgccaagtgagtcgcaggtacaactgagtcttcgaaggcgaagcatgggaggtttaagtgagtctggaaaaaatgtcggtggaagtaggcctggccttgttttgtttagagactagtggctatgtgattgtggtagatgcagcaaaacaaggctgtggtgtgtgaactttaatattctgggttgcccagctggtagtatttggatttgtgttgtgctgcgaattgatcgtttttttcgcccttggtgatatagtagcatggtcctttgtcgc

SEQ ID NO: 57214 - DNA, 368 bp, Zea mays
  Clone ID: MRT4577_15216C.1
agtataaaaattttgtttgaataataatatacgtggacatatgaaagacaagcaatctacaatcacaagttatacacacttacacataattatagatgtacaaattaataattaagcatgacattagtacatgacacatgaaagttcgggtatttcgggtacccgattgtgatacccgaattacccgaaataaatacggcttttgtaagttgctacccgaaattcccgaacaaaattcggattttggttatttcgggttacggggttttttgtcgagccctacaaagacagagggcgcccttgcaggacttgatcgaagcctaaacagtgtccacgggcgcgtattttacggattccaggtgggatat

SEQ ID NO: 57215 - DNA, 270 bp, Zea mays
  Clone ID: MRT4577_152171C.1
ggcccggctcttttggaaccaaccaatcccaacttattagaaaacaaaacggaaaaactatgaccctttataaaaggggggggatcccttcaatttaaaaaaaaaaacagaggggggaaacctttacgttcctttttcaacaaaacacagaataaaattccccatcgctgcctgaaaaaaaaaaaaatccacccccttgaggggccgaaccgtaaaaaaccttccccttcccttcccccttgtttttcgggcccccctggtaataactgg

SEQ ID NO: 57216 - DNA, 168 bp, Zea mays
  Clone ID: MRT4577_152172C.1
caccgtgcgccgcgcagggcgtggccgtgccgtccgtctggcccgctctctccgggtccgtgtccggctacggctacggctacaatccgggctactgaggctccgccgctgtcctactacgccgcttgcgctgtgggcggctacggctgcggctgcggcggttataac

SEQ ID NO: 57217 - DNA, 272 bp, Zea mays
  unsure (1)..(272): unsure at all n locations
  Clone ID: MRT4577_152173C.1
ccgcgcgcgcctcagttgtcgggtgcaagccatggaccaaaatagctattagctagcgggtacncgcatgacatgaatgaacgaagaaagagcagcagcaagaagaagaagccgtgacggagtagcagcaccccccggcaacgcgcagaggggagaggcgaggcggccatgcaggcggtgcggacgcgggcggaacagcgtggtgccnaggcggaggcgaccccgcacgggagcgcgcgttgtgganccccgaggnggaantcggnntccgt

SEQ ID NO: 57218 - DNA, 536 bp, Zea mays
  Clone ID: MRT4577_152174C.1
ttattccacttacttttaggaaagctggtacccccgccaggtcccgtcccgaatttcccggtccacccaagccttccggtggattgggttcaaaagtgggcctttggaccacttgtgggttccccggaacttttgtacctgggaaggagaaaggaaggaaaaaagcggttccttggcttcaaaccgattcctaaaggacctcaaggccctgcaaaaggatcctcccaccttttgcaccccagcccttgttgccaaaaattttttttactgccaggcaacaattttggggccttcaaataccccttaccctgttggcgttttttgggccattatcaactttccaccgacctaccatttcaaaccaccgaaggttgctttcaaaacaaaggtttaccacccaattttcaccagcaccggaaccttctgtcttgatttcttgaaggaccaatgaacccctgcactgacagttcctaaggccctcctctcaattggtccccttttgacgaacccaaaccctgacaatccgttggtcccaa

SEQ ID NO: 57219 - DNA, 299 bp, Zea mays
  Clone ID: MRT4577_152175C.1
cttacactcatataactcctactgctcccatttatatttaccaatttttttcaattaacacgggcacgtttaatattaatgattgtattccacatacaaaacccatattatcaatatctattaatatatttaatacttcaaatacaaataaatctcactcaatactatactatacttatcatcattctataaacacacttaattaccctacactaatccacacaactactattactaattacatacactaacaatatttaccaactagttaacttcatcacttataaacttccaatctt

SEQ ID NO: 57220 - DNA, 577 bp, Zea mays
  Clone ID: MRT4577_152176C.1
cttttagctttcgtggtaccctcttgtcatatagaacacctgatgcttagcgccacttcctccaccttgctctgatccaacgagcttgaaacacagatttcaattagaatatttgactcatgtcttatccttcttgattggagttaaagtcaattcacttttggaattaactactcactttactgagggcatgttcttggcataagcataaggatcaccaatacttatttgcatcagcttagacaattatcaatcgtgacgtgatgatggttgctgcagtttatcagctattgaaaacctttttatatttattggattatttctatttttatgccaaaactgagtaaatgacggatttgattcaaatctgaagattgctcaaaagatgtccatttagtgtttataacttatacctactgataattgtctatgtttctacagctcactaggataagggacacatcagcagctgaagcaagggcaggaaaggatatacaaggtataccatgggagaggatacacatagccagggcagattaccgaaaaagctaggtggaacagtataagaactatgaaa

SEQ ID NO: 57221 - DNA, 447 bp, Zea mays
  Clone ID: MRT4577_152178C.1
tgttgcttctctctgcaattcaccactcttttgaatacctctttggtcgaggaaccagtcaccgcctttggagatgatctgaaggctagattggcaactgagacactgtttaccatagctaataaatatgggcattacatacgtactggttggaggaatgtattggattgcatcctgagactgcataagctagggcttcttcctgcccgtgttgctagtgatgcagctgatgattcagaagtttctgctgaaactgtccaaggaaagcctgttcctagctcaatctccacatctcacattccagtgatgggtacccctcggaaatcctctggactcatgggaagatttagtcagctactctcgcttgacagcgaggaaccaagatcaccaccaactgagcagcaacttgctgcccaccacaggactcttccgacaatccagaagtgc

SEQ ID NO: 57222 - DNA, 329 bp, Zea mays
  Clone ID: MRT4577_152179C.1
gagatagaaagtaaaacaggggatatggatacatattgttatagtgccctctgggttgccaccatgtcccttcacggttgctatgttttaaagaacagcaccgagaaaaagcctcgaccacttttttacaggaacataaaatcaactagcccaagaaaaaaaatgaactttcttaagatcatataaacaacaaaatttggcgctaaaaaaaccccaccgaaatttaacgcatgtgctcaacccctaaacgggtgttgttttattacgcaagggggcaccctaaaaattagttgggggctcccaaaaaggccaggcttggtactacaaat

SEQ ID NO: 57223 - DNA, 670 bp, Zea mays
  unsure (1)..(670): unsure at all n locations
  Clone ID: MRT4577_15217C.1
gccgggtcgggagtatactatgaaaaccagtgacgtagcgtcccgaattcgctgtttcacgccgcacatcggctcagcttccacgtatcgcacgcggcagtcctcctcacactcctgcagcatctctattggccacgaggaactcggcagtcggcactggcgcggaaggcgcgcgtgagcagaggccctcctccgtcctcgccgtagtcttcgctcccatctcctccgtcgttcgcctagtctccgatgcgcacagatccgctgccgaggagatcttcgttccctccgacgacggcttcttctacgatttggagagtacctatgaggaagtgaaaatgttccatatactcgctatgaatttttatatgagcccatccgcaaaccatgttgactctgttgcggagatcctgcctggtgttgtttcaatagatgaaaagatgtttgtgactttgtgattttgttgtgtgtgtatttggttttttttatgtnatntcntttgttttatttgttgtttttttggatttttttttatttattttttatatatttttttattttacttttttttttttatntttttttttatttttttttctnntttttntttttatttttttttttattnatttttttttttaattntttttgtttnnattttatntttttttta

SEQ ID NO: 57224 - DNA, 378 bp, Zea mays
  unsure (1)..(378): unsure at all n locations
  Clone ID: MRT4577_152180C.1
cggcccgctcgaggnccggccgggcctgcggctgtgctatctatctggatgtacatccttccgcttgcccttattgccatgacatgctgtctcacgcgagctgccatacataccagaggaagctgcagggcaacgccaacctggatcacaacgggcacctgctgctgttgctggaaggaggacatgacggcctggcttccataccgtagttaactatcttcacattgttttctgtttttttggcattgcattaatcttaccttgactgtatcatccatggcactgcatgatgttaccatcttctgtatgcgctgctcacctaccctatctcagaccatgagatccccatacatgtttatatttccaaggcccaccccc

SEQ ID NO: 57225 - DNA, 302 bp, Zea mays
  unsure (1)..(302): unsure at all n locations
  Clone ID: MRT4577_152181C.1
atcacaggtaagagctctacctcaccacccatctttattttatcctacccctangaccaataagagggccgggttaacatcataactcctaatcactccccacaccatatatgtcctgcatgtatcccatcaactaccactatcaaccacactcttaatacacccaaacccataatcaaccttcccacccatccatctactgcgaccattacctttaccacatcacagccttcatcatctacaacaacaacacccccacctacattattcattatacacaccatctgcacaccatcctgcat

SEQ ID NO: 57226 - DNA, 382 bp, Zea mays
  Clone ID: MRT4577_152182C.1
cgtgtgatgacatgttttacacggtacgctataggatcttacttcttcttgccatccagatccgagtagaaattccatccaaagttagcactcggatcattgaacctcaactttttgtcaatcttggcaatctcctcaacatcctcactaggcaattcaaaatcaccctccaaatttgccttgatcctcgactctgtcttactctttgggataacagagtggcccatggcaataccccaagccagcgcaacctgcgcgcctgtcttaccatgcttctttcctatctcaacgagcactgggtgcgccatgagtttgttcatattcttcccggagtcgtagatttcattctggtttccaaaaggtgaatcactgtgttacatgg

SEQ ID NO: 57227 - DNA, 442 bp, Zea mays
  Clone ID: MRT4577_152183C.1
attggaaaaaaggggcggaacattgggggaaccctttttttaaaacctacaaaaaggaccggcagcccatattcaggcggaaaaaaaaacaaatgggtccaagacccgggcttaatttttaaacccggcaaggagcccggcgacagacaaaaaaaccacccccgccctccgtttgggggggtcggggcccccaaaaacccccagggcggaacaaagggccaccccgggggctttagggacaactttttaaaaaacttgggactttgccttcattaaggccggcaaaggggcaaacctggggggggaaaacctaaaaaccggggggaacacggggggcaaaacaagggataggggttaaattccaccaaaaacttttggctaaacaggagctttttggttctcgggggccaaaaaaacccgggaggcaaagggcccttggggc

SEQ ID NO: 57228 - DNA, 813 bp, Zea mays
  unsure (1)..(813): unsure at all n locations
  Clone ID: MRT4577_152184C.1
acgacggtagcactacgcgccctcctggccgtagantaccgatccggcgccctagattagaaccaccttctcgcgaaccggtatctaaaagtagctgtccgattggagatcaacggaccgcagtgccccacaccttgatctaacccaagcccttggatcatcgatcaaggaccacgattgaatacccaaaagcggtctcctatgatctaatctggatcgcatcttttcaatccaaaagtcacagaccattgtcctacctcccgacgtcagacagcggtggtgctcaccgaggcggcggctatggtcgccggcgtgcagcatccccgatgccccagcgcccgaacccgagactgactagtgctatatgatgagtaggacgaggcgaatgatgtagaaggcttctcacctcagattgaggcgaccagagttccacccacgtgacaccgtgacgccaaggcgaatcttcaacaccggtgaacaatttggctggagaaggtgaccctctcttctcgacgactgcatgaagagcttgcacaggatctagcgatcatccttgaccaccctccgtgggcagagaggcacgatgtgggcaaagccctagcgcagggcntctcgtaccaatcgcgaactccaatgaagaattgtggctcccctacggccttgaacacacgacgaatgactgtcacaccttcctcagcgcctgacaaagcccatagattgaattctgatcgatcaccgatgacgcctggggacttttcctgtagagctccgatgaggtgccagtgcacacgatttctcgatgtatggtgctcc

SEQ ID NO: 57229 - DNA, 658 bp, Zea mays
  Clone ID: MRT4577_152185C.1
cattgggacctcgagccggcgggaaacgagctgtgcttctccgttgcgctgcggccggctccctcgcgcggcgcggaatttaacatggccgtgccggaggtggagtccgacggcgtcgtcttcccgccgggggaccgcgccgccgggttccgccgtgctcgcacttcctcgaggtgggaggcgggctaggtctccagatctgagcgtacttcatcaagatcacggacatcggcgtgtacctggaggacgaggccgtgaccgcgctgggcaagaagtggggctggaagacgggcagacgaggtcaactccgacgacggcttcttccgcgacgatgcctaggggagacttctcataagttcgcgaggtggaggatgatcctcccgctgacctgctagcagtacgcggacaaagtgaccgagaactgcgatgacgttctggaaggccgccggtctgtacacggactgcgagggcgcctccgcgtagaagatcacggaggtgatcaagccatagactttcgcgtcgggggcctccatcatcttcacgcactcggccgccggagtcctcaccgacgacttctccagtgctccgcctggccagcggacgtctcgcccgacgatcaagaacaagcgcctgctgcgaggccagtcatggagtccat

SEQ ID NO: 57230 - DNA, 540 bp, Zea mays
  Clone ID: MRT4577_152186C.1
caatccaagctagcttcttgctgtccctgcagtgcacacgcttcttctccccatggcacgctgcaacctcctcgtcctcgtcgccaccgccgccttcgtgtcgttggctcttgccgtcgtcagagccgaggcgtccggcggcattgggttcaacctccgccaccggttctcgccggtggtccggcagtggatggaggcgcgaggccatgcctccgccggctccagctggtcgttgcctgaggaggcagtaccgcaaggctctccggagtactactccgcgctgctccgccacgacgaccgtgccctctccgcccgccgccgccgtggcctcgccaacgccgacggccgccagagcaccctcaccttcgccgacggcaatgccactcacctcgacacctacgaatacttgcactacgcggaggtggaggtgggcacgccgagctccaagttcctggtggagctggacaccggtagcgacctcttctggctgacctgcgaatgcaagcagtgtgcgaataccgtcaacgcctcaacggatcg

SEQ ID NO: 57231 - DNA, 198 bp, Zea mays
  Clone ID: MRT4577_152187C.1
agacaacatccatgttcctcctgggcgtcgtctgaatcatgcatgacgacaaggaagattcatcgggcatcaatgcgacagcgtccgagtctgctgggtcgttcaagatcaccacattgggcacctccggaaatagcaagacagagagcactaaagctgtgcaagaggcatgggcatcagcgtacggctgaactggga

SEQ ID NO: 57232 - DNA, 731 bp, Zea mays
  Clone ID: MRT4577_152188C.1
taggcctgggcgagtgccggtgcgccggcgggtggcggcacgccctcttcaggctccgcgccggggcgcgccgcctgctggggcgcgacggccgcccgctcaaggccgccgcgccgcaggacttcgggtacgactccgtcagctacaagcagaacttcgacgacggcgaggcgtgacgccgagccggcatcgatcgaggaggtggggggccatggcgctgtcgcttcgcttgccgcccgtacgtgatccagctcccgcaataaagctactgacgattttgattttgtggtgatgtatgtggcatctatctatctctgtaagtatggcgattgtgtgcatgatgacatcggtcggtctcggaaggaagatgatcgatcgatcgttgccgcgagttggagacccggaccatgaatggtcggtccgtgaacgggcatgtaactactgttcttctttcgttgtttcgggtcatcgtcgttgtcgccgctttgcgtcagtcttgctcctggaatgaacacgccgtggatcccttcggatcctggacggacaggcaaatgtatttgatttctgaagcacggacgcagacgagaagaccagaccagagcagagcagagaagattcttcttcctcctcatccgtcctcccgttcaggtctgtttcggcttcagcgtccctttcgctgcagcgccgggagcgcgacatggcagctacagggctacagctaccactgcccc

SEQ ID NO: 57233 - DNA, 620 bp, Zea mays
  Clone ID: MRT4577_152189C.1
ggtcggatgttctgtattcctctttcattagacatgtataatcagatatacgtacaacacatgggtagaagactaaccacatggaaaacaaaacagccaagtacaaaaaccccttgcaaggattagatgtagcgctagcgcctagcaatacgactgaagttgtatctagtgatgtctatcctaacactagactaaaaataaatgaatgattcaccatccttcactgttgtccctacgtgacctaaagccctccgtatttaattacatgcacacccttgtcagagattaagagtcaatttctggggaagagttggatgtggaagccatcaggaaagccgagaccgggggtccggaccacgttccctccttttaccgtcctccaactgcgacaatagggcgacaaaaaacagaactatgagatttcttcgtattcagaaggataaatataccaagagataccactataatcagatgctacaaacggtacctgtactttgtaaccaagtggtggatgaatgttgccatcaagaccctgctaaggtcagtcccgacgcaaaatcgtagcccaccttcaaacgccatgaaatgcttcgttccaccggtatttcaggttttccctg

SEQ ID NO: 57234 - DNA, 349 bp, Zea mays
  Clone ID: MRT4577_15218C.1
tcctcgcaccacctccagtcctccaccggaccaccacctccaccactccctctctcacgacacgcgcaaaccgcttgaaccctacctggcggcgggaggcggaggtggctccggaacgacgcggaggagctcgcactgcagccacacccggcacaactcacggacgtgtcccaaacgcggggacaagatcatcggcgtgcaccacaccgatggctcggccatccgcaagagcgcgagtatggggaacctctccctcctctccgcgggatccaccagcggtcgccgcttccccccgcgaagaacccgaactcgccgactacggcggcggatacgcctccgaccacttcga

SEQ ID NO: 57235 - DNA, 294 bp, Zea mays
  Clone ID: MRT4577_152190C.1
ctctgggtgggtttttttggtaaaccggtccttcccaaaacggggatggttattacgagatactctgatgaggtcccaaaacttaacccccaattttttgggctgttggactattcggcaacaaaccatgctgacatgcccccggacgatttacctttgtgccacgcctctgtatcttgtggctatgccactaacctgtcctcttcccctgtatccttccgattacgcctggtcgccctagtggcaacgcgacgggataatcgtgattttctcattcagcaataccgccttatt

SEQ ID NO: 57236 - DNA, 151 bp, Zea mays
  Clone ID: MRT4577_152191C.1
attctttttttcaaagcaaccattagagcatattttcccgactgttattccaacatgggcgaagttaggaaaaatttatagcatctagagactcgtaaacattaatgaggatgcataggtgttcggcgcacgagttttttttgagtggggg

SEQ ID NO: 57237 - DNA, 344 bp, Zea mays
  Clone ID: MRT4577_152192C.1
acattcacataaagagtaaaggggcgtggcaaggtttttttttgggttccacgacaaccattatgtgcacccggaagacatcttttaagcacaataccccccacatcatggttttacttgggctcaaacaaaggagaagggacacactgcaccgacaaaacaatcagatttagaacgaacaggcgtgaatcacgcacagagagaattacatgtgacagcgacgatgcccaaagcccggaggaaagccccgcaacagccaccgaaggttgacatgcacacagccccatgcttgtgttacaaccatgccatccacaaactcccgaagatgttaaaactgccttccc

SEQ ID NO: 57238 - DNA, 810 bp, Zea mays
  unsure (1)..(810): unsure at all n locations
  Clone ID: MRT4577_152193C.1
tggacgcctgcggttccggtccggaattcccgggtcgacccacgcgtccgaaaaccacccattatttaaaattattaaccactcattcattgacctacctgccccatccaacatttcatcatgatgaaactttgggtcccttctaggagtctgcctaatagtccaaatcattacaggtcttttcttagccatacactacacatcagatacaataacagccttttcatcagtaacacacatttgtcgagacgtaaattacgggtgactaatccgatatatacacgcaaacggagcctcaatattttttatttgcttattccttcatgtcggacgaggcttatattatggatcatatacatttatagaaacctgaaacattggagtacttctactgttcgcagtcatagccacagcatttataggctacgtccttccatgaggacaaatatcattctgaggtgccacagttattacaaacctcctatcagccatcccatatattggaacaaccctagtcgaatgaatttgagggggcttctcagtagacaaagccaccttgacccgattcttcgctttccacttcatcttaccatttattatcgcggccctagcaatcgttcacctcctcttcctccacgaaacaggatcaaacaacccaacaggattaaactcagatgcagataaaattccatttcacccctactatancatcaaagatatcctaggtatcctaatcatattcttaattctcataaccctagtattatttttcccagacatactaggagacccagacnactacataccagc

SEQ ID NO: 57239 - DNA, 664 bp, Zea mays
  Clone ID: MRT4577_152194C.1
gtgttttcttagaggaggattgagtgctcctctaccttcggattgggttcggattcgagaggtgctccggatcttcgttgtcgtgggctgaatgaattgagatggcagcctgtcggatgttgagtaccgctagacttcgctggcaggtctctcctgggcacacggacgacgactccctccacaacgtcttcagcacctacggagaggctctcctagccccagagcatcctcgatcgcgccagacgcagaggctcggcgggttcggattcgtcaccttctccacggagagaggcgatgcagaacgacatcgaggagatgaacgggaaggatctggacgcggcgcaacatcaccatcaacgaggtccagttccgcaactgtgccgtgagaggcctgcggcgcacgctacggtggcgggcgtgcacgcgcctggtacagtgccggtgcgagcagtgatgcggggggggagtcatgggtgggcgctgcttaccgggcgggcaggagctgcgggggtgcagccggaggctacgatcctgtccaccgtgatgctggctacgcgaactcgcgaggcaactggtggaactgaacggggtgggccgcgagaccatgttatcctgcgcgctgccggggtgggaccctagaacagagggctcatatgcgcgctgc

SEQ ID NO: 57240 - DNA, 538 bp, Zea mays
  Clone ID: MRT4577_152195C.1
cctcgaggccggccgggaccccctttcggcctttccctccatgtactcgtcgtcggccagcggatctattcggggggggcgcgatggctgggcagaacctgcggctcttcgtcgagccgacggtggcgatggtcggtgttgtggagggccggctcggccgcgcgacgcgtggtcacgcggtgctgaataagaagtgccgacgcgctgacggtaccagttccgcgccatcctcaagagtatcgtcggcgccaaagagtccatgggcgagacgatgcgcgcctcctccttctccctcgacgaggccaggtacgtcgttggtcgacggcgtccgcctcgtcatcctcctgtgcggccgcgcggcatccgaccgcgtcctgctccgcatgaggagaacgtggccggcgtacaagctgcccaaggtcacccacttcagtcgatgccggcgcgggctactgaggcccctcccacgcatgaccgagtctcacaggtctggtccgcagacggacagcacgatggcgtctgccgctccgcacacgtc

SEQ ID NO: 57241 - DNA, 257 bp, Zea mays
  Clone ID: MRT4577_152196C.1
gaaaaatgtgttttcagattttttttgcttaaactgcttaacttcttaacttgaaacaagaacttatttttttcaacaattctaactgttaagtgaattcaacacagttggtttcaagatgacaagtaagaaaagtaacagatctacagtcacaccacacactgctctgcatatggaatgggacaggatttcttgccctatttgtatggagcaaccccacaatgctgttttacttatatgcagttcatacaagaatg

SEQ ID NO: 57242 - DNA, 458 bp, Zea mays
  unsure (1)..(458): unsure at all n locations
  Clone ID: MRT4577_152197C.1
cgacccacgcgtgccaccatgacattatcgcaactgtttctattttacacgccaacactgacnccatgaagcctggtatactttttactcgtctgccctactatcttactacagacgttcaatcctcttaaatccaccatgatgctattcagtactcacttcctccagacaatttttccttcaacctctagaaattatctctgaaagatctgaatcgttactatactacctccaactccaaacattaccctaccaaggatacttctagcttaaactccaatgtaattatcattaactacaatcgtcatattggaaattactatcccacagatattaacttacacaccttacacattacatacaagcatactaacctcattaccaacatttactacccataccccaatgacctgtaaaagaaccccaaattttttacaaactctaatctctatattttt

SEQ ID NO: 57243 - DNA, 655 bp, Zea mays
  Clone ID: MRT4577_152198C.1
cgatagccccaaacccaaaccgaaacagaagcgagctggaaagtcaaatcatctccccgctctcgagtctcgactctagctcgcccactcttataattcttgtctgaagcggcgaagcttgttcgattgatcgatggccgccgtgcagccgcgcgtagccccacgccggcacccgccgccgcctccgccgcttcggccgctcccagcagcgccgccggctgcccggccgcagcttccgtgcaagaggagccgcgccgacgccgccgtcgcccactgcaagaaggagagggtggccgagtcgtgctgcctgtcgcggccggaccaggtggagctggtgctggtcgacgacgacagcggcgaggaggacgacggctgcggcagctgcgtcgacggtgccggcggcggacaggccgaggaggaggatgaggaggaggaggggagcggcggtgtcgccgccgcctggtggagcgaggagagcggcggccgctgttccctctgggcgagcgggaggagaagagcagatgaagaaggcggccgccaattacgcgccgacgacagcgagagcgacgacgaggaccccgcggcggcggcggcgaggcggcaggaggaggaccgcaagttctgggaggcgtgcctggcgtcgggctacccctga

SEQ ID NO: 57244 - DNA, 826 bp, Zea mays
  Clone ID: MRT4577_152199C.1
caccagtctccctcgcacctccgccaccacctctccaaatctcgcccatctcgagccacagggcgcggagggccgcgtacaggagaagagggggtatggagcccgccgagcgaatcgagtccgggacggcgctggggaagcggccgaggagcagggcgctgccgcggacgcccagcatggtgacggtgccgtcggcggcgaagcaggggcgccaggagcggcgcgccgcctcgctgccggctgccggcactgggacgggagccgctgccgccatgccggtgggttactgttactactacggcggctcattcgccgcggtggagacggcggccttcttgaaggcgtgcggccgatgcagccgccgcctcgggcccggccacgacaccttcatctacaggggcgaggtggcgttctgcagccaggagtgccgggagaagcggatcgagtacgacgagcgcatggagaagacctgctgctcactgacctccatcaaggaggccccgtccgtgtccggcgccagcggctccgaccagtccggcagcggcggggagaccgtggccgccgcctagccggggtggccttggaggtgcagtgcagcgtgcagcgacgccggatggatcgatcggcccggtagtttctgccatgccagagcgtctgtgcatagtacagctctggctctgggttccggcagtgatgaatgcgtcagtgattttattatcaggtgattgatgcatgtaactctggaaacatggcgttctattctatgtcgaaacaaaagaaaaagaaaaaaaaggaaaaagagagacccgggttctgtttgtgtcgc

SEQ ID NO: 57245 - DNA, 312 bp, Zea mays
  unsure (1)..(312): unsure at all n locations
  Clone ID: MRT4577_15219C.1
cttccatcagtggcagccaggtcttccaggacccctcggctgctctgattcgcgccatcatgccgaacggtgccgaaacgctcttccagtacaacgccaacaacgacgccgcctggaaggtcctctctgactatctcttccccgaaatccagggncacggccgcatcaacctcgccaactctctgtctatcgaaccgacgaacattgtgaccacaattctcatcgacggtgacagcattccatacaccaacgccaccaacaagtactattttgccgtctcccaagacgccactttcatcaaggtcactcttg

SEQ ID NO: 57246 - DNA, 1042 bp, Zea mays
  Clone ID: MRT4577_1521C.1
gggtaccctccgaggtctaaggcaccccgtgagtccctcgaggccgggccgggatccgtcttgacagctccactcctaactccagcgaccaccgcgtccccaccatggccgctcgccggagcactagccccgcccggcacggcgtcctccccgccctccttctcatcctatgctcgtccctcccttccctcgccgccgcataccgcccaggcgacatcgtcccgatgctccgctcgggccagtaccacggctcgaggtcggtgtggttcgacgtggtggggcgccattgcccggccttcgcggtcaaccgggaggtgctgatgccgatcccaaagcctacggggttcactggtgctgatccgtacaagataacatttcaaattggacatgaaaagttccatgttccttggctttatgttataaatcgcaaaacctctgaagttccactgatcgatttccatttgaagtactctggaaatgatatacttggggtgacagctaaagttgtggacatgcctcaccactacgtggaagttcatcctgacataaagaagaatttctgggatccacagaattggccaaaatacgttcttgttagatatacatgggaggagcaatcagagatagatgttactggaggattttatgtgttatttggatccgggcttgttttgtccttcattcttgcaatatatgtcctacagtcatctcaagagaagttgacaaggtttgtgcgagaagcagttgcagatagtagcctcccagatggagttgcaaaggtcgagtgatgacctgtctacgatgagctgtcttattacccactaatttctacactgatcagaacctcaagttttttaacagtcaactttcttagctgcggaacgagtaatacaacagagtagcatacatatgaagagctagtggtttatttgattctcttgtgcatgctcttaaaccaactttgcttatatggtggaagtgcataatttcatttccaggcaggagttttggtgcttgctaaaaaaaaaaaaaaaaagcggcc

SEQ ID NO: 57247 - DNA, 177 bp, Zea mays
  Clone ID: MRT4577_152200C.1
gtcctacacgctgggagtagcgaccctgcttgaggtatcaagacgatcagcctacggtgaactggacgcccctcttcacggagcgagagaccggctcttttttgggccaaccccttctccacacctcgacaacgtctaccttaccacctttgccccacgcgtccgaccacgcgtacg

SEQ ID NO: 57248 - DNA, 1842 bp, Zea mays
  Clone ID: MRT4577_152201C.1
gcatgtttctagcctcgtcttcgatccagctacgcatcatatcatatatactgacgcacatggcacagaactggcgcccgatgcagtatctaggaaggcatacggacaaccggggcccggggcggcgcaacggggtgcacctagcgcagccacagacgacggacggaccagtccgcgcgccagatcggaagcatcgaagagattctgagcgagagatcggacggcccagatgccacgcgtgcgtcgcctcgccaccccctctcctccgccaccgctccctttttatgcgccgctcctccgcaaaacccctcctccctctctcccagtccccagtccccacccaccaccagtcttcctcgctctccaaatctcgcgacgagggggcccatctaggacccacaggcgcagccgccaggaacgacgggagaggagggcatggagccggctgagcggatcgagtcggccgggacggcgctggggaagcgtccgaggagcagggtgcttccgcgcacggccatcggcgggcgccaggagcggggcgccggcgtgccgtcggcctgctcactgccggctgcctgcgccgggatgggggccgtgccggggggttactactactactgtggcggcccgttcgcggcggtggagacggcggccttcctcaaggtgcgctctgcaaacgccacctcgggcccggcacgacaccttcatctacaggtgccagtcggcgtgttttttttttcttaatcgcatcttttcccttcatattcgaggccgctatgttacattatgaggcacataatagttttttttaatcagctgtcacagtactcgctgagtgtgtgtgaatctaattccctctagtattttttttttggtggaaggaatatttgatgcgaatcttcctttcggtgcctgtatttatttccaattattctattggttcggttcacgagtagtttgatgctgcatcgtgtgcacacacatttttacattatgaggcacataaacatactaggtgaccaatcaaacgagctgtcgcttgattatgatatgtaagcctcgtcacctggaaccgtatactatctcacaagttctttttaatcagctgtcacggtccctcatccacctcttggttgaaagagtttgtttttctctccctgaattcggatgatgtaatgtaacatgacatgacatgatagctggattctgtttgtctgcgccgtgccgtgcaggggcgaggtggcattctgcagccaggagtgccgggagaagcagatcgagtacgacgacctcgacgagcgcatggagcagacctgctccgtgacctccatgaaggaggccccgtccgtgtccggcgccagcggctccgaccagtccggcagcggcggggagaccgtggccgccgcctaggagccccccgggggagtggcgcaagggggcgggcggggtgtgtgttgttgcgccctggtggagcgggagcagcgacgccggccgatcggtcggcccggcccggtagattccgccatgctatagagcgcctgtgcatacagcttttagctctggagtctggattccggcagtgatgcatgcgtcagtgatttattattattatagcttgttgatgcatgtgactctggaaaaaaaaaaaaaaaaaaaaaaaaaaaaaaaaaaaaaaaaaaaaaaaaaaggagaaaaaaaaaaaaaaataaaaaattaacgatacacaaacaatggaaaaacaaagctcttcaatagtgaaaacataaatacaattcgttgggccggcctttaaaaaatcccgtttttggaaaacaccctggggtaacccaaattttttttttt

SEQ ID NO: 57249 - DNA, 253 bp, Zea mays
  unsure (1)..(253): unsure at all n locations
  Clone ID: MRT4577_152202C.1
gctttagcgatggtctgttcatggctgtcgccgctgctcccggggtgtcggcgccggcgcgcacagggcgtgtggagcatcatcacccggcccatgttccagagcatgctgagccaccgcggcgacagcgggtgccagggcgccttctacacctccgactcccccatcgaggccgcagnaagttcccggcttcggacacggcgacgagagagcgcagccggactcgcgcttcttggcagcgtccacgaaacac

SEQ ID NO: 57250 - DNA, 329 bp, Zea mays
  Clone ID: MRT4577_152203C.1
cacacacagcgtacggatccggaacaattccgcggcaccagacgtacactgaaccaggggccgctcagagatatccaggcatacatcattaacagcctgtcacgcgtacggctggtgaacccagacgatgactcctagcacctcatgatgctcgtaggtcacctgctgctcacttacattgccagcttcaaaggcctgtactggaccacgtcatagccgcacttcagatatgaattcattcctggccctagctttcataagcacatggataaccgctcatactagaactagctcgcatgtgtccaaacttttgccataatcgctggctt

SEQ ID NO: 57251 - DNA, 403 bp, Zea mays
  Clone ID: MRT4577_152204C.1
ggaaagattggtattccagggaaattcggtacacttccatattgtatattcttattaaacacaaaataaaaatataaactactgcaaaataataataattcaaaagcaataagcttcaaactacatctctaaacttttcggaaagatgctgctaaacattttttttcaaactactaatttcacaatgggacctaattttataactcttaattatcctagatcataaaggtgcaagttcaaggaatagtatatgtccgttttcctgattcggatatagcggtaagactaaaatatatcgaagtaaaagcaggttaatacttgtttaatatataaaagttctaagcatggggaccatagacctagtagtttttttgtaaagtatcgattaagaccagtggatctt

SEQ ID NO: 57252 - DNA, 298 bp, Zea mays
  Clone ID: MRT4577_152205C.1
ttgtggggaaacataaacggtgtaatgaggagaagaaacataatcctacagctgtaactagatcagacataaatattcagtcacagatggacacaaaacatttaaacatcacaaacaaaaatgtggcctaaacaaggatgaggagacacgatctgcgaaacattataccgaggaccgaaataccgaagttgtttttaacatcaatcacacttcacacagcagcaaagcaaactgtccttaggacagggacttgcccacaccatggagggagaactaaacacagtactgttccaccagc

SEQ ID NO: 57253 - DNA, 305 bp, Zea mays
  Clone ID: MRT4577_152206C.1
caaagggaaaccaacagggtttttttttcgaaacaaaagggcggccacattcccacctaccgagggaccaagccaactctccccaaaaacccctaaacaagaaaaaaaaaaaaaaagggaccaaagtttttggaaacccaagtcccataatgtccaaaaaacaactaaaaatgctaattggggggaaacaaatcgaaatgcaggaaaaggttttccggcccggggttatttttttttttttttccccccactaataaaaggaaaaagaaaccttgcttgccagggtcccggtctttagggccaaa

SEQ ID NO: 57254 - DNA, 315 bp, Zea mays
  unsure (1)..(315): unsure at all n locations
  Clone ID: MRT4577_152207C.1
accacacgcagtatgagaattcctgcccacactacggcgagagccagggctccgaggtcatttctgttttttagacnnccagnccccgcccctctcccttccctaccttctccttccctaaccccatgccctacactacctataacattaccaataccaatctccacctccacaacaccacctcaaaccatacccacacccccgtcggccgatcccccccctgcatccctgcctacgcaaccgctcccgtcgccaacacctataccccctctcgcccagactaccaccatacctaaccctgcgccctctgattac

SEQ ID NO: 57255 - DNA, 245 bp, Zea mays
  Clone ID: MRT4577_152208C.1
ggaagtaaaacagagttgcatacattttttcgggccttgtaccaccgatcatacacaagcacatgcatacacacacgtatacatacgatagattccgtacccacccctattcgggcatcacacgagcgcattcattcgtacacgcgcacaaaatggggggcgcctgatataactcttacacgaaagcggagcaaacggggagggccgaccaccccggaggtccaaacacccgaagaaggggggct

SEQ ID NO: 57256 - DNA, 184 bp, Zea mays
  Clone ID: MRT4577_152209C.1
tccggcctgaatttgcgcctcgctgcgtctctcccattcccacccggtgaaggttcaaggagcttgctcgtctgagcccgagctaacgagctcaccggggggcaggaggctcggggcggccaccaagggcgggtctaggctggcctctccggacgcctgcttgtgcgggggggatggggggggg

SEQ ID NO: 57257 - DNA, 312 bp, Zea mays
  unsure (1)..(312): unsure at all n locations
  Clone ID: MRT4577_15220C.1
cgcgtncgctcgaagccaccatcacaactccacatgttctagaacctaataacctgcagacgagagggtgatgttctcgatgaggagatggccgacgccgctggcgacaggtgcgaggcgctagcaacgcacttttcgaagggcagcctgactgctctgccgtgggcgactgccaacctgctgctagacctccaccacctgctgatgctacacgtaatcaacgattcccgactactatcatagcgaggccattctctacgaatacaacagctccccgataattattctctctgaattctatgaccctatcat

SEQ ID NO: 57258 - DNA, 137 bp, Zea mays
  Clone ID: MRT4577_152210C.1
attaaggaatgctatgaagcactggtgggtcaaccatatgattataagcctaaatgaatcttgctgtttcactaacacttcaatttccttacaattacgaaggtgattgctaagtgtatggcattgatgtacagcta

SEQ ID NO: 57259 - DNA, 618 bp, Zea mays
  Clone ID: MRT4577_152211C.1
gttatttagggagagagaatggaaaagaacttaatctccaggggagaagggtctgaattgatgtgagaccacaaccaaatgtactgagctaaacttacagttcagcacttccaaataagcaatagcacaaaatattctgtgcaaaccacccattcggtgcaattgtgaaaacccccttgaaacacataactaaacattaattttttttaaatgaacacatgtatagatgtacattgttgtaaaaactgaggtgcaaactcaatgtacaaaaattcatatgaaaatactagaaggcaaagttcctgtgattgtcttctagcacatacactcctgaaatttgttattttcatatcaattttcaggaaaagattttgaatgttagcttttgcgtcaatgtatacatctatagatgcactatggatgtgagtcatttcaaaactttgaaaacttctatgtatgtgtttcaacgggttttgatgattggaccaaaacggtggtttgcaccgaatagtttgtcatagtgatgatagagactggaaaagaaatttcagaaaaaaatgtagatatttgtattttcttcatgttgtagggtttgcttcatttgcatgtttctgcaat

SEQ ID NO: 57260 - DNA, 455 bp, Zea mays
  Clone ID: MRT4577_152212C.1
aaacccccaaaaaaacctttattagggaccaaaaccccaaaaccaaccaaaagggggccccccccaaggggggggggggggaaaaaccccggggggttggcaaaaccaggggggccgaagggccccaatgggggccggggaaagaggggccccccgttggcccccgggggcgggaaaaacggcaacaaaggggggggggcaaaaaaggccgggggccccacagaaccaaccgggcaaaagggaaaaaaggggggtgggggggaccccccccgggggccccctcgaaggggaaatccccgcccccggggggccgttctaaggggacccgagctcggacccaagcggggggaaaacagggcaaagagcgggtcccggggggaaagggttcccgcgccaaattccccccaaaaaagaagcggaaaacaaaaagggaaaacccgggggggcccaagggg

SEQ ID NO: 57261 - DNA, 435 bp, Zea mays
  unsure (1)..(435): unsure at all n locations
  Clone ID: MRT4577_152213C.1
cccttcccctttagggaggtccagcctcgcaagctgaaacctcccctcggctcagggctgggccaggcggccacagcaggactggccacacccacgccgcacctcatccgtgcacgcgtcggagcacggccagccttccgccacgagccagctgggaagggccgcggctgcctaaagccccagtcaacccagcctgtgtctgagcagacagggcgaacaagcaggccacaccgtctcgagggaggaggccagatgcggccagcgtctccaacagggtgaccatccgctcggcttgctgagcgtttaaacaaatgtttagacaggctgtggggactcccctgagttgagccctggccagnggtccggtgctgtcgcgggaaacctncagcctttttcttcaaaccactcagctcatgtgttttgcactgactagta

SEQ ID NO: 57262 - DNA, 650 bp, Zea mays
  Clone ID: MRT4577_152214C.1
agagaagagtatctagaagtttgagcatagaaaggtaaaaactttaaagccaaatcagaaaagtcaaagtcgatttaggattttattaaaagtacaattttgttagaaaacttgtctatgagttggatcagttcttaccagaggttgcaattattataggaaaatttataaaccaaatatcaaccctaaaacacttcccaaagttcctaagccaaaagacaactcaaaactcactcaagaatagtggggaggagacgaaaacaactcaagaacgaaacccattatattttgacatgagttaaaagcctggaagtcgcaatgtgggtacgaccaaacttcctaaaaatcaaatgaacttagatgtcatatattcaaatcatcgaaggatctcctaacaaaataaaagtgggaaataaagattacaagctagagagatacttgaatggtttagcccttccctcgtaggttttgttcggttattcccattccatgtgaattatatgagattgaaagaaactaggaagaattttgattaaatagagatttaaatccactcaatccctgcaatccatatggattgatattaaaaatgaacaaaccctcatatagggtcattcttatttgctaaactaccactagatacatagaga

SEQ ID NO: 57263 - DNA, 252 bp, Zea mays
  Clone ID: MRT4577_152215C.1
ccttccgccataacaatatatcttctttactttttacttcattattctcctaaccttctttggatcgcgtctaattcttcttctcattcattcttttactaattactataatcacatccattactacctaactaactcccatttcctccactattcaaccttaatcaatatctatcatactcaccatcatatctttccatcattctattaccacatcattctctacatcatttaataacccctttccttatt

SEQ ID NO: 57264 - DNA, 828 bp, Zea mays
  Clone ID: MRT4577_152216C.1
agaataggaacccataccctaaccagggttaggagtgatattaatagagtgagtaattgggccagacccattacacagggggtataacggttattacaaggggaataacagaaaccctagacgggtagtctaacatctagaacaagggcatggttgaaatcatcaacaacctccttgtaataacctagcatctcccttgcagtgcccctccgtaaataggccttcacgctctttggatcaaggtcgacggcacttgtacaatctgcctcagcctgacggtaactagttagttctagaaaggcagcagctctgttgctgtaatatgtagccaattttccatttaactttattgcttcagtatagtaatttactgccttttgccattgcttttccttaaatgcagcattaccctatacacctgaagcttcagctgcttcttcattcattgcttgtttacttgaaacactagatttcgctagtatctccacttgctcttggatggttgtatacatggtttgagtggtatccaacaaaaaccgatcaccaccatgcttagcaataaatgaaactgaaatgggacacttatcatgcgtacccaaaggaatagaaacctggcaacatcctgacatgctagctaaagataaaagacgtagtgtctgagaattgtagatttcagatgtgagtagcttagcgttaagctttggggggcaccccaaagcagttggaatcaccagaatcccatcatcctgtggattagcatattatcagaaaaataaggcattagtactacactattaaaaattaagcaagatgacaaaagcaagccgg

SEQ ID NO: 57265 - DNA, 694 bp, Zea mays
  Clone ID: MRT4577_152217C.1
tggaagagggttgtatggaagacagcaacatgagcaattgtattcatgtcagtgataatcttgtatttgcagatgaaggcattgcagatagagttcatggaaatgaagagacagctgatggcgctggagaaaatgaacagagcctaatggaaaatgaaaatgtgaatgttgctgttgcagctgagttcattgcgaaacgcattcacgagaatgagcttggtagggatcagcgggccctggaggacggaagtgcacagctgtatgaaggagtcatcactccattcagtgccagatacgttgaatctgaacaaagttttcaacaagatgagccaatacctgatgccactgaagaaaaggaagatgattttatggaagatggaaatatggccaactgcattcaagaaagcatggcagctgttgctaggttctcaagcttgccaaataagaggaatcagtccaagttagctagctttaataagaacaaagaacaaatgacctacagatctagaggtagccaacttcgtcagggacgtgcacttgattctgaagattttgggtcaattcaaaacttcatggggtgacaaatgggtggcgcctcaaggtctctctcaagcggggctcccattggaggcgatccggtgcacagaacagcgaacaagtgcaataataactgtggacacgagcgccttaaaaa

SEQ ID NO: 57266 - DNA, 496 bp, Zea mays
  Clone ID: MRT4577_152218C.1
ggacctttgggctgatttatgtgcttgtttatgtgcttgggatcatttggcgcaagcgagtggggcgtagactgcgtttgacttggctgaatttggtaagtttgttatccctaagactcttgtcctcatcgacaaaattactgagaaggggaagtcggccactgatgctaagcaccctcctcctcatgcgtatctggagatttgtgatactcgtggagagatccttcgtttagtgattggtgatcctgcgtcgctttattagtagatgtcgttaggtcctatcttgttgggtcttcatatgactcatacgaagaccgctggggatgataatgaggagtcgagtcgtactctgcctgggcctagtactggtcctgctgtgcttagtcgaatgtgcttgagttcgggtatgagaggtagttagtttacggacgcaaaccatgcggagtatatctcgcacttcacgatccctaagcactcaggcttacgcaagtccccc

SEQ ID NO: 57267 - DNA, 154 bp, Zea mays
  Clone ID: MRT4577_152219C.1
gttctagctgatcccacccgaatgctagggaggacttattgaccgtgcggaacgagccagaaaacaggtctagccgccgctcggcacctctgatccggcctgccgccggtgagcgatcaccttgaaaactgcggatcccatgtcagccatcaag

SEQ ID NO: 57268 - DNA, 589 bp, Zea mays
  Clone ID: MRT4577_15221C.1
aaaacaaaagcaaaatttcgtgggttgttttgtcaaaaagagtttaagggaacagctacccatatttttacccgtttgttttggaagggaaactaaaaaatgagccggcccggccgccccgccggttccttgtaccctacaccgaccctgggaaaaccttggaaccccaacaggggtcagggtcaggttcaactcctatgctgtttttacagagttcgaaaccgttttcatttccggacccagggctccatcctcgcctaagctaaaaactggcccaacccgggggttccggggggctggttccccttgaccctgggagacccgaaaagcgaggagtaaaattcctccccgggcgggggaagaatgtcgaggccgttgtacatgccctggatgtcgccgaagctgaggcccacaaacaggttgccgtttttggggctgaaaccgtccacctgttcctttttgggcaccgtaataattatcgccgggtcctggaacgccggaaacgagtccagctccgggaacggggtcgttgcccacgatctccgactttggggggcgcgtttcgccccacaagtgcaagtgtaattgg

SEQ ID NO: 57269 - DNA, 520 bp, Zea mays
  Clone ID: MRT4577_152220C.1
ccggggcccccttccttcgccgcaccagcgccagcccgcgccgtggtcagtaagaggtccttcaccgtgcgcgcctctctccgaaggccaccggcaccggcggcgcggcaatggctgccagcgccctgcttgccggtggtgccatggcctcagaggtgctgctgggcgcacgcgacggcgggctcgtcttcgagcccagccagttcaccgtcaaggccggcgacaccatcacattcaagaacaacgccggtttcccgcacaacgactttttccacaaggaccaggtgccgagcggcgtagactccaccaacatctcgcacgaggagtacctaaacgcgccatgcgagacctactccgtgaccctcaccgtgccgggaacctacaggttgtactgtgagccgaattaaagagccggaatggtcagcaagatcaccgggaaataatgaagctagctatcgatcgaaatccattcatgtattagctgatgcttcctgctttgtactacgccgaactgtccatc

SEQ ID NO: 57270 - DNA, 2453 bp, Zea mays
  Clone ID: MRT4577_152221C.1
agccgaacaagccgcgggcgccgctgttgcgttttcttcccactaccgtccgccacagcctacgcaccttgccggctcgcgggggttttgccgtgcgccttctccctcctcctcgctcgcggcgacgaccgggggaccgcagccgccgtacgccaggtgcgcaggtcttctttgggcccgtcgccggcgacgagcacccaccaggggcgtccgagtctggaatcctatctgatcggaaaatggttaaggtcgaagatcaggccgaggacggcggcgcagatgctgatgccaggggtctcagggagtctgctctggatccgctgcctgtctcggtgcatgccagcttgaaggaggaggaaggtcaaccaagttcttcgtctggtaaactaagatcacagtttattggaatggggttttcatccaagctggtagacaaggttctccagagacatggtgatgatgattctaacacaattttggaatctcttctgtcctattctgaccttcagcagtctggatcagagtcatcagattctttcggaagtttttttgataatgataatgaagagaacaattctccttcagagtctaggaaaggaatctaccaagacatcaagccagagcttgattctttctcagagaagtggtcatttttactcagaacaatgaacttttcacaacaagaagttgatttagccttcaagcaactaggtgatgaagcgccattagaacagctcgttgacttcattgtcagtgctcaatcaggagtaccctctggaggactgcaaactggtgacgctacaaatgagggaaagactgaattactttatggtgtgatggagaaaacacttagcttgcttcagatgggctttaccgaggaagaggtatcatcagctattgacaattttgaccagagagcaactgttcaggagctggctgactcaattttggcaaggcgaatagccaatagcattgagcagaaagagataaaagttgaatctgacttcctagacgaggcagaaactgattattcttcataccagccctcatactctgatgtaagctattatgacgatgacaacaacaatacacgggttaaaagggctaagcatatatttatagatgacataggggcctccagtagtcaccttggcgatccatggtctatggggcagcgtgcagggacaaatgatatgtctgttaaggtagaactggaggcaatgacaccaggtcgccgtgcaaatgtacaaggtgaccttgctaaacccccatttttcctatatggaaatgtggttgaggttccaaaagacacatggcatcaactcaaacaattcttatataatgtggagcctgagtttgtgaacagtcagtccttctccgctctaactcgaagggaaggttacattcacaaccttccagtggagaaaagaagtgtcgtggttccaaagtctccaatgactattgaagaagcacttccattcactcgacagtggtggccatcatgggatacaagaaaacatatcagtgttattactacagaggctgcagggattgagcagacatgtgaaagattggggggcatggttagagagtcaagaggagtgctttcacaagcaagacaaatgcagattatacaccagtgcagggtttcaaaccttatttgggtcggtcgggacaggttaggccctttggagcctcgtcaagtggaaaagatactaggttacccttataaccacacaaatttgtttgaattaaaccaacctgatcgacttgctgccatgaaatatgcattccagactgatacattgtcatatcttttatcagtcctgaaaggtaagtatcaagatggaataagagtgttatccatctacagtggcattggaggtgcagaagtagcacttcatcgtctaggcatccctttgaaatgtgtgatatctgttgaggaatctgaggtgaatagaaaaattctaagaaggtggtggttgaaaactgaacaaactggagtactaaggcaacatgcaggaatttggaagctcaaaacacatgtgattgaagacttggtgaaagagtttggtggttttgatctgattatcggtgggaattatacttcttgcaaaggtggtactacagtaaatacgacaatgggcatggattcgaaccgcttctatgagtataaccgtgttgtcaaaagggtaaggactgcagttggactcagttgaagagtccatctttaatgaagatcgcacgtcttcataaaactagcctgtaggaggatatagaatcatctgatccgtaaatgtaggatgctacaagtaaactttacaagtcttgggacttgattattgcaagcaattgacttgtcctttattttggtttgtgtttgttggtcacttctaatgtttgataatcattctgcgaaaacaaaaaaattatggggggaaaagcatttccag

SEQ ID NO: 57271 - DNA, 633 bp, Zea mays
  Clone ID: MRT4577_152222C.1
tcgagttttttttttttttttttttttttttttaccgcccttcaaacttccttattatataagggggagcgggatcccatcacgatgggggtgataacaaataaatacggaccattccggttctcacccctggatacttaaataatacaaaaggtatgaatgacccgcgatatcaccgagggcgcgcaacaactgccatatgttatcatatctagctagggagcaggatgcatgatccattctcgttttttgaacacaaacaccgggcggacgagaggggcctctgcacaaaccatgaaggtcctgatccggtcgaatacccgaacgccatgattattcctcatcccactctcgagggggacgagaggacacaccactgatcctttcttttttggttccactcattcgcataaaggcctcgtgcctcattcctggctgaccgagggatcactgtgtcaaaaaaaaacgacacggacgtactccctgctgctcgctaaaaaccaatccccgctggctatggctatcatggcataacatagctagctagaaacgggggcccctcgcgagcctccgcgccggcgaccactccccaccatcgtactcgtcgtggccgaaccttggccccggttcgcc

SEQ ID NO: 57272 - DNA, 511 bp, Zea mays
  Clone ID: MRT4577_152223C.1
tcaggaattcggcacgagcttaactcactcgatacatagtacacatcgatgaagctgatgatcgagggtgaccatggacgcactgagcctagctcgactgccggccgcccgggcctgggccgcaggcggacgggcgtacaccgtcgcggttccgacgtaggacgcatacgaactgtccctcgctggcacgcacggtcgccggtgcgcgatctgacccgccagcgcccactcccagcgcgcgcacaaagcaaactctgacgtaaccagcagtgcatgcggagcaaagcatccgagtggaaagggtggacgccctgagtacgcctcgccgtgaagggaaccgatgctaacgcttggaaacgacgcgcggcgcctggcgccgcgcggttcgccctgcgcacccatcggcccgcacgcgcagtgagtagcgagcgctagcggctgcgcatgccgtgtaatgtagtgcgcgcccacccgaacgaaagccgggccgtccacgtgtggaaggcagcgt

SEQ ID NO: 57273 - DNA, 548 bp, Zea mays
  Clone ID: MRT4577_152224C.1
cccacgcgtccgcccacgcgtccggctgcactcgcaagcaatacatctcgtcgttcgactaagatcgaggagcaaatggcggccaccttgaagctcaggatcctcatcgtggcggcggccgtcgccgcgtccctggtcggcacggcctcagcggcagagggaccggcgcccgctccgacgtccgccgccgcgtccatggccgcgccggccgttgccgctgcgtccttcaccgcgcttgtcttcggctacctcttctgaacgccgtgaacattcacgcgtacaccgtgttgccccagccgaattgtttgcctgctcagatttttcttcttctctgtctcgctctcgtgttttggtgtgtataggtttgtaattacgtgttcattttttttattgcgtgaccatggatctcgtaattagtacatgatatatgtataaactatagagaactgcagtttggttcttcattttacactgtttgagagatgctaataattggattaagactactcttggatcgaaaaaaataaaaaaaaaaggcccctagggcc

SEQ ID NO: 57274 - DNA, 768 bp, Zea mays
  Clone ID: MRT4577_152225C.1
aggccggccgggctgcagaaatgccagatggtttccagccagtctccttgttgctcgcctcccctacctaacctctactgcctcgctgcctttgcttttgcgcatatgcgacgagcagacggaggccctcgccgtgacgctgcctgtatataacaccaccccaagcgatctcgtcccctccatccgcgaacacgagcttcacacacacggcttccacagcttgctctcgctgcactcgcaagcaatacatctcgtcgttccactaagaccgaggagcaaatggcggccaccctgaagctcaggatcctcatcgtggcggcggccgtcgccgcgtccctggtcggcacggcctcagcggccgagggaccggcgcccgctccgacgtccgccgcgtccatggccgcgccggccgttgccgctgcgtccttcaccgcgcttgtcttcggctacctcttctgaacgccgtgaacattcacgcgtacacaccgtgtttgaccgtcggaaattctctgtgttgtgcccagccgaattgtttgcctgctcagattcttcttcttctctctctcgctctcgtgttttggtgtgtatagttacgtaattacgtgttcattttttttcattgtgtgaccatggatctcgtaattagtacatgatatatgtataaactatagagaactgcaatttaattcttaattttacactgtttgagagatgctaataattggattaagactactcttggataaaaaaaaaaaaaaaaaagcggcc

SEQ ID NO: 57275 - DNA, 511 bp, Zea mays
  Clone ID: MRT4577_152226C.1
cccacgcgtccgcccatgtatacattgttcctgtttgtttcgactttttgtagcttctggccaccaaaaactgctgcgaactgccaaacactcagcttttcagccagcttctataaaattcgtttgagtaaaaccattcaaaattaaccttaacatataatcgggtgaatcctcgcaatagtagtaatccgtcactttattggatcctaaaccccatggtcaacttatttctccctccgatacaaacaatggaaaaaaaaaaaaaaaaaaagaaaaaaagaaaaaaaaaaaaaaaaaaaaaagggggggcgagtattaaataaacaaaagttaaggtatggagggggggggccgtttaaaggatccaagttcacccccgcagggttgcgactgtattgtttttttttagggggccctaaatgaaaaccccgggccgtcgttatacaacgggcgggagggggaaaacccggtgggaccccaaattaaatcgccggggagacatacccccttt

SEQ ID NO: 57276 - DNA, 279 bp, Zea mays
  Clone ID: MRT4577_152227C.1
ctctcgagtttctcttcacgcgcttcaccatgatctctaccctacatgttgtaacttctggtgacactgattcagctcaatccggactatagaacggtcttccatgtctccgtccctcgctggagcaaatggctgtcgagcctctgctggcagtggtgcgctatactcctaggggagcttgagagctatcgtgctgagtttgcagtgggatcgagatcgaagctatggccaggaggatgaagcgcgtctgctgcaacgaatcactgatcatcggcttta

SEQ ID NO: 57277 - DNA, 533 bp, Zea mays
  Clone ID: MRT4577_152228C.1
ggttttttttttttttttttttttttttttttttttttttttttttatttttttatttttttctttaatttttttcttaacatttagtctaaatttttattaacaaagcgggggcgaacccgggggaaaacccgggaaaatccggacgggggggggaaagggaaccaccttcccaaaaagggagacgaaaaaaagctaggcaaaaaaaaggaaaaaggggtgcccagagaaaaaatgtaaccccataaaaatgcaaaaaaaaaaaagacccgaaaaaaaaaaaaaaaaagcccggggggcctaaaaaaagaaaaaaccaaaacaaatggggaaaccccaacggccaattttcaaaaaaaaaaaactgaggcgccaccgaaaaaaaaaaaaccgccaaccccccggaaaaagcggtttcggaaaaaagcccaagggggggttaactttgcacaaagaaaaagggcaaaaagggtttgccctgcaccccccggccctgaaaaaaaatgaaacaagcggcccaacctggtttgccc

SEQ ID NO: 57278 - DNA, 245 bp, Zea mays
  unsure (1)..(245): unsure at all n locations
  Clone ID: MRT4577_152229C.1
ggcccgttccgttctccactgaactcctgccctgtcgtaccggacccggagcctttccactgccgccgtcaacgagagctgcgttagccgttagggacaggtgatttccgctgcttacctcatggcgaccgtgcttaagtcgntatcagcgcacttctcttttgtagtttttgttgtatacgacttatacctgatcctttcccctcccaacacatggggggggggggaaaaaaattttttttttt

SEQ ID NO: 57279 - DNA, 240 bp, Zea mays
  Clone ID: MRT4577_15222C.1
tggagggggcgtacgaacgaccacctctttccctcccccgaccttaccggcgcctccggcttcgagatctccgggggcggcggcttcttggggggcggcgaccagcttatccaggtctgggacgccaccccggactcgctcgtcttcgagaggcccctaggacgacatcgtgctaaacctctcgggcgtggacatccccatagaccacctatcgcgcggcgggcccagctggtcgcgggc

SEQ ID NO: 57280 - DNA, 459 bp, Zea mays
  unsure (1)..(459): unsure at all n locations
  Clone ID: MRT4577_152230C.1
ctttgggctgatttatgtgcttggccgcccggacgctacgcacgtagtacgcgcaggaaccttccaaccacgtcaaacccgcgctgcggcgggccctaccaggcgcggtcctactaaccggatcaggcctcggcccgtacatacccgcggtcgcactcgggcttctacaccgtctcgcctatcaccaaggtcgcctaacgcggctgaaccgactcaaaaaccgtcttacacgacattacatagtcaaaggccgggttactacggtccgataagaaacgcctagaacccggattattcgcgcacttagtactagtctacctagccaggactttagctcctgattcatcattctagacatagtcggaggtagcctcccggggaaccgggatcgtgtccggcgagtctttcttccaccccacactatgagtagtctgtccactangaagtgagctaaaagtc

SEQ ID NO: 57281 - DNA, 472 bp, Zea mays
  Clone ID: MRT4577_152231C.1
ataatacagtatcgctggctaacgtccgaattctgctcgcctgcagaggggtccatacggcgttgttctggattcccgtcgtaacttaaagggaaattttcacaatgtccggagcccttgatgtcctgcaaatgaaggaggaggatgtccttaagttccttgcagcaggaacccacttaggtggcaccaatcttgacttccagatggaacagtacatctataaaaggaaaagtgatggcatctatatcataaatctcaagaggacctgggagaagcttctgctggcagctcgtgcaattgttgccattgaaaaccctgctgatgtcagtgttatatcctccaggaatactggccagagggctgtgctgaagtttgctgctgccactggagccactccaattgctggccgcttcactcctggaaccttcactaaccagatccaggcagccttccgggagccacggcttcttgt

SEQ ID NO: 57282 - DNA, 2577 bp, Zea mays
  Clone ID: MRT4577_152232C.1
ctctgtagtgacgacgactgggcggcggccgctgccgccgacctacgtgcgcaggtctccatcttccggaccttcgctggagaggaacatcctcctgctaccagaggcagggttctactagctgatctgtcatctaaggctgaaactattccagtttctcttgtcaatgaggttgaccatgagaaaggacctgcacatttcacctatactaaccaggtcaaatacgtgaggcctctcagttctatgaaataggttcagggctgtcggttccagagttttcgccttcggggtgatgcaagtagcgctcctgcactacgttagggaggtaatttccccgccagttcaaacggagtattgtattccggcaaacgtattattggtgaatgtgatgccactcgtatctctgcatacaagacaaggtcaagcatatcacttaaagatggtgatgatgatccttactcgggtaaccaaagtttggcatctgaacggaagcctaggagaggccgtcctcccggttctggtcgtgatggctcaaatggtaagttaaagcgccctaagcccacttacaagaattttgttgctggcaaagagcttgtctttctgtcatctacatccgatcccagggatattgtggaatcagttcacatgacttttgaggccctcaggcgaagacatctgcagatggatgaaacacaggatgctagcagacgtgcagacctgaaggctggtgccatcatgatggccagtaacatcagggcgaattcaggcaagagggtaggaactgtacctggagttgaaataggagatattttctattttaggatggagctgtgtgtcattgggttgcatgcacctagtatgggaggcattgattacatgactactaaatttggaaaagatgaggattctgtagccatatgtattgtctctgcaggaggttatgagaatgaggatgatgacacagatgtgctcgtgtacagtggtcaaggtggaaataataggaatactgaggagaggcatgaccagaagcttgagaggggtaacctagctcttgagaggagtttgcataggaagaatgagataagggttgtacgtggcttcaaggatccattttgcctaactgggaaaatttacatatatgatggtctcaagattcatgagtcctggaaggagagaacaaagtacggtgtcaatgtcttgcttcaagtgctgctgcgggaacctggacagcgtgatggagctgcattatggaagatggttactcggcgatgggataatcctgctaccagaggcagggtcctactagctgatctgtcatctaaggctgaaattttgcctgtttgtctcgtcaatgaggtagaccatgagaaaggacctgtacatttcacttatactaatcaggtcaaatacttgaggcctctcagttctatgaaaaagttgcagggctgtggatgccagagcgtttgcttgcctggcgacgccagttgtgcttgtggacaacataatggaggcgatttacccttcagttcatcaggattgttgtcatgccgcaaaccaatagtctacgaatgtggtgaatcttgcaactgttctacaaattgcaggaacagagtgacccaaaaagggtccaggctacatttcgaggtcttcaggaccacaaatcgaggctggggtcttcgctgctgggaacctattcgtgctggttcatttatatgtgagtatgctggtgaggtcattgatgagctcaaatttaatttgaatgatagtgaagatgattacatttttcaaactgtatgccctggcgagaagactttaaaatggaattatggacctgaactgataggtgaagtaagcacatatgtatcgcctgatgaatttgaaccactgcctgtcaagataagtgcaaaaaacatgggaaatgtctcccgtttcatgaaccacagttgctcacccaatgtcttttggcaaccagttcaatatgatcatggagatgatggacacccgcatataatgttctttgcactgaagcatattccacccatgacagaactgacttatgactatggtgttgctggagctgaatctagtggttcaggttctcgtagaacgaagaactgcgtgtgtggatcacaaaactgcaggggattattttgatgggttgagagacgtgctctttgtggttaatcatgcaaaccactttctgctagatcctttctatgaaaccaaatttagtctccggataatatgacagatgatgtcatttgccatgtgtactgtgaagacagtaagttgtcgagcgagctgtagaatttctgttgctctgaactgcatggtggtcgctttcccaccatttcctcggatgtttatgtgggcgtggattgctgcattgcttccgctaaacttgtccaccaattgcaccggcttttgtagacttgttatcagccccgcttgcgttggacgcctggttgttaggatatggtcttgtaaattatcctggttaaggatcatgttgctttcgactcgaattttcgtcctcccttgcccttatgttcagcaatgttcaggtgttgagagctc

SEQ ID NO: 57283 - DNA, 380 bp, Zea mays
  unsure (1)..(380): unsure at all n locations
  Clone ID: MRT4577_152233C.1
caacaaataaggagtaaaaattcccaccagnacagcagcactaaacggttgagctgcnaggagaaaatcccctttgtacccccacccatcctaggatccaccagccaccgctcctccccccgtcccgccccctccagtgcggcggaaaggaaaaaaaacgaaacattctccgcatttgccgcggcgggcgtatttgagatttgtccttgccccctcggggaatgactaataaacgggagcgccaatcgccgctcgtcttcttactcggttacccccctgcttgggacgtacgactgtgtgtctcctgttcatacctgcggttcgactgctgtggctggtggatcctatgatgggggggggttcaatggggatcttctcct

SEQ ID NO: 57284 - DNA, 859 bp, Zea mays
  unsure (1)..(859): unsure at all n locations
  Clone ID: MRT4577_152234C.1
cgcctttacctacgtgcgcaggtatccatcttcggaccttcgctggagacgagcacccaccaccagaaattttctatacatttaagatgtacagggcctcaaatttcatacctgatcctaatcaggtgcttctagatgccaatccattaaggtctttagctccaatgttccctgcccccatgggagtcaatgttaatcagtcaagtacaccaccattggtttgtgtcactccggttggtcaatttccaactgggtttggtgcagggaaccttcctgcctttggatcgttcactactttcagtgccactacaaacggtgtttcttatacgggcaccagtggtaatggtgccattgatgccactcctatctctgcatacaagacaagatcaagcatatcacttgatgatgatgatgatgagccttactcgggcaaccaaggtttggcatctgaacggaaggctaggagaggccgtcctcctggttctggtcgtgatggatcaaatggtaagttaaagcgccctaagcctacatacaagaattttgttgctggcaaagagcttgtctttctgtcatctacatccaatcccagggagattgtggaatcagttcacatgacttttgaggccctcaggcgaagacatctgcagatggatgaaacacaggnatgctagcagacgtgcagacnctgaaggctggtgccatcatgatggccagtaacatcagggcgattcaggcaagagggtaggaactgtacctggagttgaaataggagatattttctattttaagatggagctgggtatcattgngttgcatgcaccctagtatgggaggcattgattacatgactacaaaattt

SEQ ID NO: 57285 - DNA, 2154 bp, Zea mays
  Clone ID: MRT4577_152235C.1
ccgccggccgccgccgacctacgtgccaaggtccgcatattcggaaccttcgccggcgagcacccaccaggatttttttgtacatctaagatgtacagggcctcgaatttatacctgatcctaatcaggtgctcctagatgccaaaccattaagatcgttagctccaatgttccctgcccccatgggagtcaatgttaatcagtcaagtacaccaccattggtctgtgtcactccggttggtcaattttcagcagggtttggtgcaggtaaccttcctgcctttggatcgttcactactttcagtgccacttcaaatggtgtttcttatgcaggcattgattacatgactagtaaatttggaaacgatgaggattctgtagccatatgtatcgtttccgcaggaggttatgagaatgatgatgatgacacagatgtgctggtgtacagtggtcaagggggaaatagtaggaataccgaggagaggcatgaccagaagcttgagaggggcaaccttgctctcgagaggagtttgcacaggaagaatgggataagggttgtgcggggattcaaagatccagctatggtagctggcaaaatctacatatatgatggcctttataagatccaagagtcctggacggagagaacaaaatttggcgtcaattgcttcaagtacaggttgcagcgtgaacctggacagcgtgatggagctgcaatatggaagatgactcagcgatggatagatgatcctgctaccagaggcagggttatactagctgatctatcatctgaggctgaatcgattccagtgtgtctcgtcaatgaggttgaccatgagaaaggacctgggcagttcacctatactaatcaggtcaaatacgtgaggcctctcagttctatgacacccctgcagggctgtggatgccagagtgtttgcctgcccggtgatgccagttgtgcttgtggacaacataatggaggtgatttaccctacagttcattaggattattgtcatgccgcaaaccgatgatctatgaatgtggtgaatcttgcaactgttctacaaattgccggaacagagtgacccaaaaagggcccaggctacattttgaggtcttcaggaccaccaatcgaggctggggtcttcgttgctgggaacctgttcgtgctggttcatttatatgtgagtatgctggtgaggtcattgatgaactcaaagttaatttgaatgacaccgaagatgattacatttttcaaactgtatgccctggtgagaagactttaaaatggaattgtggacctgaactgttaggtgaagctagcacatatgtatcggctgatgaatttgagccactgcctatcaagataagtgcaaaaaacatgggaaatgtctcccgtttcatgaaccacagttgctcacccaatgtcttctggcaacctgttcaatatgatcatggagatgatggacacccacatataatgttctttgcactgaaacatattccacccatgacagaactgacttatgactatggtgttgctggagctgaatctagtggttcaggctctcgtagaacgaagaactgcatgtgtggatcacaaaactgccgtggactattttgatgggttaagatccttgctctttgtggttaatcatacaaaccactttcagctagatcctttcttagtctccggatgatatgagtatgactgatgattccaattgctgccatgtgtactgtgaagacagcaagttgttgtcaaactgtagaatttcaactgtagaatttctgttgccctgcacggcatggtggccgttctcccaccatttgttcaaatatttatgggggtgtggattgatgtatttcttctgctaatcttgtccacctgctgcaccggtttgtgtaaacttgttatgatccctgtttgctctggacgcctggttgtttaaccgtgactccttggatctggtcatgtaaattatcctggtttaggattatattgcttttgactctcatgtccacctgctgcaccggtttgtgtaaacttgttatgatccctgtttgctctggacgcctggttgtttaaccgtgactccttggatctggtcatgtaaattatcctggtttaggattatgttgcttttgactcg

SEQ ID NO: 57286 - DNA, 266 bp, Zea mays
  Clone ID: MRT4577_152236C.1
atagtttctattttttaacgccaaaaggtaattcaacaggggaggggtttttttttatgtggtccaacaaaaaaccacccgcggttctcgttttattggtttctttcccgcacgccgtggggcaaacccgctatgccgacccgatgcctagaggggcacctcttttccctattaggggttgattttggacttggcgtaaacaaggccaatcatgacacccgtgcgaaactgcttttcggttacaattgcccacaaaatcccccccg

SEQ ID NO: 57287 - DNA, 217 bp, Zea mays
  Clone ID: MRT4577_152237C.1
gggctgtaaagtcttgagggttttttttttaaaacataacggggcatgaattttacttttcttttccttcttcgctaccaataacgggcctttacccccccttttattggggtctctgtttaaataccaccggcacaaggtttctgtctgaaaatgacacccatgttgaagaatgaacaagggggaacacttggctttgaatatatgttcttaaaac

SEQ ID NO: 57288 - DNA, 293 bp, Zea mays
  Clone ID: MRT4577_152238C.1
cggacgcgtgggttttttttttttttttttagcagtgtaaatgaataccttagaaataaggtggcacgttgggatacataggaggagccctgccacctggaccaggaggagacattccaccttgagggtcctggccccggaaaccagaacctggaggtgggtagctccctccatcaccaaatgtgcctgcaggcagcccacctgctccctgttgtatgcggtacatagagcctccaccaattccaaggccaccatatgcccccatcccagcagcaccgaactgagatgataca

SEQ ID NO: 57289 - DNA, 298 bp, Zea mays
  Clone ID: MRT4577_152239C.1
ccggggttgttttttttttttttttttttttttttttttttgggggggggtggggagaggggagaggattatcattaccatattagctattactgggcaataaaaacccgggcaacgagatggaacgggccttcatatcttcacatgacccaaaaagggggcgtggctagggaattacgtactagtattctcccaccttatgcggggggggggggggggcagcagtcgcaaggttgctgacaccggggttgtagctgacgccgttgcgcgcctccgccggtgtcttgggggccatctg

SEQ ID NO: 57290 - DNA, 351 bp, Zea mays
  unsure (1)..(351): unsure at all n locations
  Clone ID: MRT4577_15223C.1
ccggggtgctctctagaggtgggctggcttctcctcccctcttccagtcctcctcggggtggggtccttagggttttgtggaggggcgatggcggcggctgatgtggagtaccgctgcttcgtcggcgggcttgcctgggcacacagcaacgagtgcgtgcagaatgccttcgcctgctacgggagagatcctagactacaaagtacaaccgagggggggacgcncgacccaccatcaagttcctcctctaaaacgtccccaaggtcatcctctccagccacctgggtcgatcaaaaggtggcaccccaaagtacagcttgaagcctcttgcaccacgcttgtctgagctc

SEQ ID NO: 57291 - DNA, 435 bp, Zea mays
  Clone ID: MRT4577_152240C.1
gggggggttttttttttttttttttttttttttttttttttttttttttttttttttttttttttttttttttttaaacaaagggatgaccacatgttatgggggaaaaaaaattaagttcataaaacaaatatagaacacgagcttttggggggggggagtggggtacttttccggggaccactcaatttcaaaaaacccacatggacttgcatgaggggcaaaaacttgaaggctacctataggacatttcaggggggtaagaaaaaaattgccctgggggggcaagcctaactttgaccacttttaaaaatttatacatacaggggggggcactttacgaaaatttctacgggacaaattttgggcaccttgatgggccatgggcagaattacaaactaattgggggtcctacttttttatgccccatacct

SEQ ID NO: 57292 - DNA, 122 bp, Zea mays
  Clone ID: MRT4577_152241C.1
cctagggaggaagtgcaggccatattcctacctaatgagactctggagccttttatgcttggttaatatacaaggaaagacttttctacctggctgatgaacattctgactgcactcccata

SEQ ID NO: 57293 - DNA, 492 bp, Zea mays
  Clone ID: MRT4577_152242C.1
ccggccgggaaaaaaccctaatcgatctgcttccagagccccccgccgccgctgcgccctcctctcgggcctgccggccgccaggtacaaggacagcatggggacgctcatcgtgctcaatgatgctctcaagtccatgcacaatgctgaaaagatagggaaacgccaggccatgatcaggccggcatccaaggtgatcatcaagttcctgacggtcatgcaacgccatggttacattgcagagttcgagcacgtggatgaccacagagctggcaagatcgtggaggagctgaatggaacactgaataaatgtggtgttattaccccacgttttgatgcaagtgttaaggatatcgatggatgtacggccatgcttcttccatctcgccaggttggctacatcgccctaacaacttctgctggaattatgcaccatgacgaggcccgccgtaacaatgttggtgtcaaggatctaagcatcttttattgaaa

SEQ ID NO: 57294 - DNA, 118 bp, Zea mays
  unsure (1)..(118): unsure at all n locations
  Clone ID: MRT4577_152243C.1
cggggccttgactctgtcactttgtcgatcagcacgttcttccacctcaacatcttctagtgcaanaacataatcatagacaaagtgacgtccaagacccccggccgcactcaaggcc

SEQ ID NO: 57295 - DNA, 114 bp, Zea mays
  unsure (1)..(114): unsure at all n locations
  Clone ID: MRT4577_152244C.1
nattctgactggancactctgttaccacactttgacgactttgaggatcttgagatcagaaaaatgcaggctgccgctactgccgtccgggttcacggccgtgattcccgccaa

SEQ ID NO: 57296 - DNA, 1133 bp, Zea mays
  Clone ID: MRT4577_152245C.1
aaacccatcgcaactaatccccaaccccaaacctccaatccacccatcccctcctcatccactccgcggtcgccaccgccgccaggccgctccgcctcgtcgcctccagatccgcgcgggccatcagactcgtcgcccgcgccggcggcgtcgatgacttgccgctggtcgggaacaaggcgccagacttcgaagccgaggccgtgttcgaccaagagttcatcaacgtgaagctctctgattacatcgggaagaaatacgtcgttctgttcttctaccccttggatttcacctttgtctgcccgaccgagattactgccttcagtgacagatatgaggaattcgagaagttgaacactgaggttcttggtgtctctattgacagtgtgttctcccaccttgcatgggtgcagacagacaggaagtctggtgggcttggcgatcttaaatacccacttatttctgatgtcaccaaatcaatttcaaaggccttcggtgttctgatccctgaccagggtatcgctctgagaggactgttcatcattgacaaggagggagtgattcagcactctaccattaataaccttgccattggtcgcagtgtggacgagaccatgaggacccttcaggcatggcggtacgtccaggagaacccagacgaggtctgcccggccggttggaagccaggggagaggtccatgaagcccgaccccaagggaagcaaagagtacttcgcggccgtctagactcgccgtctttgagaagctttgctacgtttttgtcatggtgcccgctaagccccccggcagtaggttggagttttgcggagctcgcgtttttacaaatctctgtgctctgaaacgagcgtcgtagccccctttgctgttgtgcatcccgattgagtgctgttctttgccaccttgtttaatttcgtcacctgacgacataaggttcattttacacgtgattgagagatctcacctctagtcttgtggcgtagtttgtcggaaaaattccctataaaaaaaaaaaaaaaaaaaaaaaaaaaaaaaaaaaaaaaaaaaaaaaaaaaaaaaaaaaaaaaagaaaaaaaaggaaaaaaaagaaaaaaaaaggcccctagggcccctagg

SEQ ID NO: 57297 - DNA, 323 bp, Zea mays
  Clone ID: MRT4577_152246C.1
gggttacataaaactgtccaagcgacgaagggacaaacatgcggggacgaccgcaggaaggaaggaggcgcagaccgacaacggcagaagacccgagacaaaaagcgggggggggaaacccaggcagcaaaaagattggacggggggaaattaaacaaaaccatgagcccgtgcagcaacaccaaaactaaactccttttcatcgtaaacaacaccaaaaggaaggatcgaaattcgaaacacgtgacaacagggtgacaattacaagagattaaaaaaaaagcacacatgtgagggggaaaaaggaaggaaactccgggaag

SEQ ID NO: 57298 - DNA, 229 bp, Zea mays
  Clone ID: MRT4577_152247C.1
aaaaaacataaaaaaaaacatacgaaaacacaaaaagatggcttgcacaaacaaagcaaatgagaaccttggggctcctggtggtcttctgcatcgtgcatcgcgagaacgaagagtcaaacggcatcgatgcgaaagcgtacgggcctgctgggtacttctacatcacctcgttgggcaccttcggcactggcaagacacacagtacgaacgctgaacatgaggtatg

SEQ ID NO: 57299 - DNA, 1195 bp, Zea mays
  Clone ID: MRT4577_152248C.1
ccggccgggcgcgaacatcgagtttttgaacgcaagttgcgcccgaagccttctggcggagggcacgtctgcctgggcgtcacgcaaccccaaacctccaatccacccatcccctcctcatccactccgggcggccatggcctgctccttcgccgccgcgaccgtcgtctcttccgcccccaccccggccgccaggcccctcgccgctgccccgcagtccgtctctgtttcccgctccgcggtcgccaccgccgccaggccgctccgcctcgtcgcctccagatccgcgcgggccatcagactcgtcgcccgcgccggcggcgtcgatgacttgccgctggtcgggaacaaggcgccagacttcgaagccgaggccgtgttcgaccaagagttcatcaacgtgaagctctctgattacatcgggaagaaatacgtcgttctgttcttctaccccttggatttcacctttgtctgcccgaccgagattactgccttcagtgacagatatgaggaattcgagaagttgaacactgaggttcttggtgtctctattgacagtgtgttctcccaccttgcatgggtgcagacagacaggaagtctggtgggcttggcgatcttaaatacccacttatttctgatgtcaccaaatcaatttcaaaggccttcggtgttctgatccctgaccagggtatcgctctgagaggactgttcatcattgacaaggagggagtgattcagcactctaccattaataaccttgccattggtcgcagtgtggacgagaccatgaggacccttcaggcattgcagtacgtccaggagaacccagacgaggtctgcccggccggttggaagccaggggagaggtccatgaagcccgaccccaagggaagcaaagagtacttcgcggccgtctagactcgccgtctttgacaagctttgctacgtttttgtcatggtgcccgctaagccccccggcagtaggttggagttttgcggagctcgcgtttttacaaatctcggtgctttgaaccgagcgtagtagccccctttgctgttgtgcatcccgattgagtgctgttctttgcccccttgtttaatttcgtcccctgacgacataaggttcattttgcaaaaaaaaaaaaaaaaaaaaaaaaaaaaaaaaaaaaaaaactcgagagggggcgcggtccc

SEQ ID NO: 57300 - DNA, 1433 bp, Zea mays
  unsure (1)..(1433): unsure at all n locations
  Clone ID: MRT4577_152249C.1
gccggccgggccgggagtgcgacccaagctgccaagcagcgcaggcacgggccagaagcgaggaggcgaggaccgaggggctcgtgtggcgctgacacgtccctatttaaaacctcctcactcactcactcagccatagccagcgccaaccccggaaaggcggaaacccatcgcaactaatccccaaccccaaacctccaatccacccatcccctcctcatccactccgggcggccatggcctgctccttcgccgccgcgaccgtcgtctcttccgcccccaccccggccgccaggcccctcgccgctgccccgcagtccgtctctgtttcccgctccgcggtcgccaccgccgccaggccgctccgcctcgtcgcctccagatccgcgcgggccatcagactcgtcgcccgcgccggcggcgtcgatgacttgccgctggtcgggaacaaggcgccagacttcgaagccgaggccgtgttcgaccaagagttcatcaacgtgaagctctctgattacatcgggaagaaatacgtcgttctgttcttctaccccttggatttcacctttgtctgcccgaccgagattactgccttcagtgacagatatgaggaattcgagaaagtgaacactgaggttcttggtgtctctattgacagtgtgttctcccaccttgcatgggtgcagacagaacagaagtctggtgggctgaccctcgttaaataccgggttgtttctgatgtgaccaaatcaatttcaaaggcctttggtgttctgatccctgaccgggtattgctttgagaggactgttcatcattgacaaggagggagtgattcagcactctaccattaacaaccttgccattggtcgtagtgtggatgagaccatgaggacccttcaggcattgcagtacgtccaggagaacccagacgaggtgtgcccggccggatggaaaccaggggagaggtcgatgaagcccgaccccaagggaagcaaagagtacttcgcggccatctagattcgtcgtcattgagaagcaggtgcccgttaagtgctccagcagtaggttctcgtgttcagcggagctcgcgttttgacaagtgtgttgtgctgatgtgcatcccgatttgagtgctgttctttgccaccttgtttagttcttttagctgacgaataaggttcattgcacgtgattgagcgcccacgtttttggttttagcgtagtttgttgngattgactggtaagctttgcgtcgatgctgctgctacaaggcctctaattntatgtgggcagctacaacgtgcgctgttcctggcccaagctggtatgcgaaaagagcaaggccgcttaccagggccccatgactgaaccttcctctcgctgcttttgcaagccctttaaaggtctattgctattgtgggcttggactacg

SEQ ID NO: 57301 - DNA, 148 bp, Zea mays
  Clone ID: MRT4577_15224C.1
aaaaaagggtcccctgttgtaacaaaagggtttataactaggtttaatttattttaaaagacccgcgtttgttcaaaaaaatgttggaacttgttacgaaaaaacatgcgttaagttatatcgatagccgtttttaattattatttgg

SEQ ID NO: 57302 - DNA, 1575 bp, Zea mays
  unsure (1)..(1575): unsure at all n locations
  Clone ID: MRT4577_152250C.1
tggccccgggagtcatcttttcagaaaagtttcttagacccacaagctagagccagccagccgctcagccccagccctcggaaacccatcgcaaattcgcaaactaaccccaaaccccaatccaccccatcccctcctcatccactccgggcggccatggcctgctccttctccgccgccatcaccgtctcttccgcccctaccccggccgccagacccctcgctgctgccacgcagtccgtctgcatcgctcgctccgcggtcgccaccactgccaggccgctccgcctcgccgcctcaaggtccgcgcgggctaccagactcgttgcccgcgccagcgtagtcgatgacttgccgctggtcgggaacaaggcgccagacttcgaagccgaggctgtgttcgaccaggagttcatcaacgtgaagctctctgattacattgggaagaagtacgtcattctgttcttctaccccttggatttcaccttcgtctgcccgaccgagattactgcgtttagtgacagatacgaggaatttgagaagttgaacactgaggttcttggtgtttccattgacagtgtgttctcccaccttgcatgggtgcagacagacaggaagtcgggtgggctcggcgatcttaaatacccacttgtttctgatgtgaccaaatcaatttcaaaggcctttggtgttctgatccctgaccagggtattgctttgagaggactgttcatcattgacaaggagggagtgattcagcactctaccattaacaaccttgccattggtcgtagtgtggatgagaccatgaggacccttcaggcattgcagtacgtccaggagaacccagacgaggtgtgcccggccggatggaaaccaggggagaggtcgatgaagcccgaccccaagggaagcaaagagtacttcgcggccatctagattcgtcgtcattgagaagcaggtgcccgttaagtgctccagcagtaggttctcgtgttcagcggagctcgcgttttgacaagtgtgttgtgctgatgtgcatcccgatttgagtgctgttctttgccaccttgtttagttctttcagctgacgaataaggttcattgcacgaaattaaaaaacaaagtttttggttttcgagaagagtaaaaaaaaaggcccctaagctttgcgtcgatgctgctgctacaaggcctctaattttatgtgggcagctacaacgtgcgctgttcctggcccaagctggtatgcgaaaagagcaaggccgcttaccagggccccatgactgaaccttcctctcgctgcttttgcaagcccttaaaaggtctattgctattgtgggcttggactaacgttcatccaggatctgcaatctggatcatcaaaaaaaaaaaaaaaaaaagggggggggcgcggntccngcncngcngcccgctggggtngctccgccgccgncgncccgcgctgtctccccgtgggcgtggctgcngcnggtcctcgcgctgctgttcccgtcccgcctcttcgcttnggccgtgctgtcggcgcctctggtggcgctgctgccgctgctg

SEQ ID NO: 57303 - DNA, 210 bp, Zea mays
  Clone ID: MRT4577_152251C.1
gcctacccccagtttttctttcttcaaccaactgacacatggggcttggtcttattacaggggaacaactactaccatttaccatctatccgtgtgagccctcctacctatttgacacaaccacacttgtttgcgttataccaacactcttaacctaactcttgcacccctttacaacttcaacaattgccatccaattcaaccaacttt

SEQ ID NO: 57304 - DNA, 185 bp, Zea mays
  Clone ID: MRT4577_152252C.1
ctctcttctctccttcttcccgcctctctacgatcacagctccaatggccccctgaaagccagagcccaagaaggacgatgccacaaccgctgcccccaaagcagctccggcccctgcggctgcacctgccgctgcacgtgagcccgcacgcgctaaggacgcagcgtttgatgcctccaagatt

SEQ ID NO: 57305 - DNA, 474 bp, Zea mays
  Clone ID: MRT4577_152253C.1
gtgttggtctttttttttttttttttttttttagggcaaattcttttggaagaattatccgcacacatttagtatgtgaacaatggagacaatatcctgtggggtaacactggggaaatttactacaatactaccaaacctcccggagcaaaggcaaattttccataacaaaatttcaatgctgcagcggaaaaagaaataaatggatggctggaaagcttttaaacgtgccacctgaaaatatccgcctcctttctttggatgggtcaaccccacgtttagactttgacccttagaacgtagatccgggaccaacgaaccacccaaaccaagagcccgtttttgggcaggtccgacatatgaaggagcgttgccccgatatggaccgaactgtaagaaatggtgtcccctatggcacacacaaaaacttcggatggattatgatggcgattttcacaggggagggtcacttcc

SEQ ID NO: 57306 - DNA, 167 bp, Zea mays
  Clone ID: MRT4577_152254C.1
gggaggcacttttttttttttttttttttttttttttcctcaaggcaaataatatcattaacgaatatacaacagtgtatcggtttccacaaacccctcggtgattatggccccaccggggactgcactcctctttcctcaccaaccttacctatgggggggggggg

SEQ ID NO: 57307 - DNA, 1505 bp, Zea mays
  Clone ID: MRT4577_152255C.1
cgatctcgaacctggagatggagctagcgtccgcgaaggcgacgcaggagtccatgctccacggcggcgccggcgccccggtgcccgagcccacggggaagcggaagcacttcatggtcgtcggcgtaaacaccgcgttcagcagccggaagaggagagactcggtccgcgcgacatggatgcctcaaggcgagaagaggaggaagatggaggaagagaagggcatcgtcattcggttcgtcatcggccacagcgcgactcccggcggcatacttgaccgagcgatcgacgcggaggacaggaagcacgaggacttcatgaggctggaacacgtggaagggtacctggagctggcggcgaagaccaaggcgtacttcgtggcggccgtgtccacgtgggacgcggagtactacgtcaaggtagacgacgacgtgcatgtgaacatagcgactcttggaaacacgctggcgaggcaccgctccaagccgcgagcttacgttggctgcatgaaatctggccccgtgctagcccagaagggcgtgaggtaccacgagcctgagtactggaaattcggcgagtgggggaacaggtacttccgccacgcatccggtcagctgtacgccatctccaaagacctggcctcctacatagcactcaaccagcatgtcctgcacaaatacgctaacgaagacgtgtccctgggatcctggttcatcggactggacgtcgagcacgtcgacgaccgccgcctttgctgcggcacgccaccagattgcgagtggaaggcgcaggcggggaacgcgtgcgtcgcgtccttcgactggagctgcagcggcatctgcaaatccgctgaccggatcaaggaggtccatcagcgctgcggcgagagcgagaacgcgatttggaatgcagagttttaggccccagatcgcctagctaaatcgcacgcttttttacaaggaaagcacgtacatacatacgtacgtatacaaggggacaacaaaaaaaaaaaaacagggctcaacagtgtgtcgctggctgccaccgaagggctcactctgctttgcaagtgcaggaccagactgaagggcttcagatcgagaggggcaatgtacactcaagtgtacatgcgttatggtagacacaaggggtgtgtttttttttgggatgtttttggattgtgggttggattattgtaaggggaatttttcttttttttctattttggtgctcgaaaagatcccacgttttttttactgatataaagacaagctaggagaggatcatgatgaggaagagagagagtgaaaggagtgggagactgggcatctccccccaccattcttggcgagatcctcatcgatgttactggttggtttcaaataacatactgtaataaaatttcttctccaaaaaaaaaaaaaaaaaaaaaaacaaatacagatagaacgaaaaaaaaacaaaaaaaaaacccagagacaaatagacaataaacaggaacttga

SEQ ID NO: 57308 - DNA, 150 bp, Zea mays
  Clone ID: MRT4577_152256C.1
ttgaccggtctcacaactatgtcaaagactaaagcaaggaataaggttttttctatgattggcggcgtctctatccggccctctagtcggccccacgtgctgatcttcatcaccacgggccctgaccacatagacctaccttcatgccat

SEQ ID NO: 57309 - DNA, 2728 bp, Zea mays
  Clone ID: MRT4577_152257C.1
cattgggtacctcgaggccggccgggaccggcggccgcgtgcccagtacggaggacgggaggagtgatctccacgcccgctcgctcgcgtcctgtcgccttgtcggcgtccgccactccgccccctccagccagatccctcctattcccccacttcactcccaatccgaatccagatccgcgaatgctggggcgggcggcggcactgtccgcgccacggtggcgcggcggggtgccagaccttcgcgccgcgctgcggtcggggggcaacctcctcttcgcgctcttcgtggcggccgtgctcgcattcacgctcctcgcggcgttccacagccccgacgatccgctcctccacccgtcctctcaccagctcaccgatttcctcacctccgccacttccacctccaccttcctcactgacgactccgtgctgcgcaccggggaggacttcaactcctcgtccaccggcgccgccggcgaggtcgccgctgggggtgtcgaagtcgtcgcggaggccgtcccgttcatcaagctctccgaagttggcgccgaggccgagaagacggagcccgagacggagcgggccgtcaccgtcgacactgatgcggccacgggcgagggtgcagcggtggcggaggaaaccgccgttgcggaggcggtttcctgcgacacggaggcgcccgtggactgcacaggagacagggaactcttcaacctgctcatgcgcgcggccatcgagcggttccccgacctccacttctaccgctttggccgtcccgtggcggtgccggggagtcccatggagtgtgacctcgcgtggcgcttccgccccgctgccgacgccatcggcaccggccggaccacatactacaaggactaccgccggttcacgcttacccgcgacgtcaacacctgcagcctcgtcgtcgacaccgtgggtgaataccactcgggtgtgggtgccagctggacgagaacacgcggaagaaatgaagctgctggggcagaagaggatgcacctgtgactgacttcgtgccggttaagacacagattaggctggacgagaacaccgccagatatcagccgtggtaagtaccttatttacattggtggtggcgagaggtgcaagacaatgaaccatttcatgtgggtgctcttgtgtgcccttggtgaggcacaattcttgaaccggactcttgtcatggacttgaatgtctgcctcaatgcacggtatacttcgagtggcaaggatgaagaaagagatttcaggctctactttgattttgagcatttgaagcaatctgcgtccgtgattgaccagagccagttctggcaagattggggacagtggcacaagaaagataggctcaagaacttctacactgaagacatcaggatgaccccaatgaaacttcgtgacatcaaggacacattgatcatgaggaagtttgggaatgttgagcctgataactattggtcacgtgtgtgcgagggtgagactgagggaataatcaagcgcccatggcatttcctgtggaaatctcgtcgcttgatggagattgtatctgccattgcctcacggatgaactgggactttgactcggtccatgttgtcagaggggagaaagcgcagaacacacaactttggccaaaccttgacagagatacctcaccagacagtctccttatggcacttaatgataaggttggtgctggccggtatttgtacattgctaccaatgaacctgacaaatcgttctttaacccactcaaggaaaagtataaaacacacttccttgatgatttcaagtacctgtgggatgagaatagtgagtggttcactgaaactaaggagctgagcaatggtcagccagtagaatttgatggctatatgaggattgcagttgacactgaggtattcttgagggggaagaggcatgtggagacattcaacgagcttacacgtgattgcaaggatggcgtgaatacatgctcagcttcttcctgaacatttggtgggctaaggtgagctgatactatgaaatattatgcttcagaggatattttcgactgtgttattggtgtctcttatgccacgcctagtcttgttgtagctaagtagctggtatcactttttgttataccactgttttgtgtttccagattacattagtacattcagttcatgcattgggcttgtgctgtttagttgaacatgcattattgcagttgtcttctgtatctcttctatatagctcacttggattttgcccccataaacataatatggatggaaacctaaggagatacgctttccaacccaactggaatcaccttaaaattcatccggagtcaacaggaatcgtcgaaacaagttagcgttcagattctgttttagtgttgcaacaccgtatgttgggctgttgggccatgtatcgtgttggagcatattagggatgcaaccaaaggtcatgcacgcccctaatctctattttatcagcaaccaccaccatattagtgtttgggttttgcttagatcatatttgtcatctaagaatttgtcgttcatcagtttgtgataccccaactcgtaatcaacacagttttggttgtgttctttccaaaaaaaaaaaaaaaaaaaaaaaaaaaaaaaaaaaaaaaaaaagggcggccgccgactagtgagctcgtcgacccgggaattaattccggaccggtacctgcaggc

SEQ ID NO: 57310 - DNA, 230 bp, Zea mays
  Clone ID: MRT4577_15225C.1
ggccggggccccattacgcggcctcccgtagaccgagcaaggcaacccaccactgagaggcacgcagaggagcaggaagccggagaccaagatgtcgtcggtgttcagcggcgatgagacggcccccttcttcggtttcctcggcgccgccgccgccctcgtcttctcttgtatgtctgctttgtatgggacttgttaatattgcgtctgcgtgttgttcatgcttgtgc

SEQ ID NO: 57311 - DNA, 392 bp, Zea mays
  Clone ID: MRT4577_152262C.1
cggacgcgtggactctaatactgtgctgtattattttcatggcacctgtggccattaaagatccatggacacgtacagtaccaatacatgattcttcacagttcaaaaaaaataaaaataaaaacaaaaaaaaaaaaaaaaaaaaaaaaaaaaaaaaaaaaacaagtaataaaaaaaagatataaaaggatcacaaagacaatgaaccatgatagtgccataaactacatatggcaagcgcctttgaactgcctcttcaaacttcaccgtgaagatcgacaacattggtgctgcatatgcccaatccgaggtacttgcaacgctaagaggacactatggtactgcgagacgagtagcttggaccaatccaaagtatggtgcaatacttgcat

SEQ ID NO: 57312 - DNA, 261 bp, Zea mays
  Clone ID: MRT4577_152263C.1
ctgcaagcaaggggtaaagtagaatccattagcaacaatagagcgacgatggcgaccacgatgttttccctccttatgctccttgctcttgctacatgtgttgctaacgtgataattttccctcaatgctcagaagttcctatagcttcgcttcttgcctcataccttgccatcaattatagcttcagtatgtggtaacccagctacttcaaccatataggcttcaataagcaatcggagctagccacatatctttatcgg

SEQ ID NO: 57313 - DNA, 536 bp, Zea mays
  Clone ID: MRT4577_152264C.1
gctatcacgtcgcatgcacgcgtacgtaagctcggaattcggctcgaggaggattgcagttgacactgaggtattcttgagggggaagaggcatgtggagacattcaacgagcttacacgtgattgcaaggatggcgtgaatacatgctcagcttcttcctgaacatttggtgggctaaggtgagctgatactatgaaatattatgcttcagaggatattttcgactgtgttattggtgtctcttatgccacgcctagtcttgttgtagctaagaagctggtatccctttttgttatacccctgttttgtgtttccagattacattagtacattcagttcatgcattgggcttgtgctgtttagttgaacatgcattattgcagttgtcttctgtatctcttcaaaaaagctcacttggatttcccccccatgacccatgttactccccattctatgatttgtgtgttttttcaaatttgttgtctttgacaaaaataaattcagttcaataaatctaacacgaacatcaatattc

SEQ ID NO: 57314 - DNA, 334 bp, Zea mays
  Clone ID: MRT4577_152265C.1
cggacgcgtgggttgaaatgttggaaatatatcgcgggctagaaggacgatggccagactatgtactctactactctgcttcatccttctcagtaaacttcatatacatacatatcggacaaaaatgatcctacagtctattatggcactggcatacatgggcatgacaaaaataacggcgtagacattatgaacaagatattgactaatgaaagctatgctatacatatgaggcacaggaagaacattgagcagatcaagatgatcgatacgatgaccatgaatttgctctacatgctgaattagatgttgctcaggatctaacatggacaac

SEQ ID NO: 57315 - DNA, 857 bp, Zea mays
  unsure (1)..(857): unsure at all n locations
  Clone ID: MRT4577_152266C.1
ggaccctcgaggccggccgggagtcgtctccctgtcctcccacctctgcccacggtccacgggacgacatccagtccagccatggtcggccccgagatgctcgtcgccgcgacggtgaaccaggtcgttcggaagatcaacgagatcatcggcgtcgcgcagggcgaggcgaagctgtgctgcagcttcagcgacgacctcgagggcatcaaggacaccctggtataccttgaaggcctcctcaagaacgcggagagcaactcctttgggagcgatagggcgaacctgcggcactggctgggccagatcaagtctctggcttacgatatcgaagacattgttgatggctactactcctccaaggagcaatatgagggaagcaactatgctcagaagggatctttactctgctctttatccaatcccatgctttcgaaggttagcatggttcataagatgaaatccaagagggagttgttacagacaaggcaaaatttaccgacccagtatcatttcatctcacatattaactcagtggtaaattatgatgagaagcagacaacatcatacagaaattgtgacatcagaattgtcgggaggggtccagacttggaacatcttatgtacatgttaatgcagataaatttgaaagagcttaccattatttccatagttgggcctgtgggccttgggaagacaacccttgcacaacttattttcaatgatgcaagagctgagacattcagattcagaatatgggntcatgtctccatgggcaatgtcagcctccaaaaaatgggagagaatagttttgcaactacagaaaaaatgagggaacatgcagatgcagtcaatca

SEQ ID NO: 57316 - DNA, 348 bp, Zea mays
  unsure (1)..(348): unsure at all n locations
  Clone ID: MRT4577_152267C.1
gatgagatganctgctcgtcgttcgcgccccgacgtccgcttgtcgctcgcctcgaggtcgccgcgtatttgctcgccgtcctcggtggcaacaacagcccctccgccgatgtcatcaaggaaatccttggctccgttggagtagaagcagatgaagataggattgaatcgtgttcgtctgaagttaagggtaaggatatagttgagcttattgctgccggtagggaaaagttggccacggttccttctggtggtggtggtgccgttgccgtcgccgcagctcctggaggaggtgctgctgctgctgctcctgctgctgaggcaaagaaggaggaaaaggtggaggag

SEQ ID NO: 57317 - DNA, 302 bp, Zea mays
  Clone ID: MRT4577_152268C.1
ccccgcgctgaaggaattcgcacgagggctgacttctgtcccgtatctgtcgtaactacgtaacagagcgacgagagcagaaccatctcgtcgagatgcgatgagccacgtgggcgacagacggcaccacgccaccggagccaagcgtctccatgtccggctgcggccctagcgcgacctcctagggccgggtgggcgggacgcaggacatggactgcgacgggcaacggttcggccggccctaggacctgcgcgcgccggcgctcgttctgtacgacaacgacgacgaccccaccggcgcg

SEQ ID NO: 57318 - DNA, 462 bp, Zea mays
  Clone ID: MRT4577_152269C.1
ccacccaaccgcctccattggaccgggggtttagatataaccaggccaaaggggccagttggaaggggcggcgggggaatgggaaccagggcattaaagcagacgggattttctagaagttggcccacccgggtagaccccaccacattgggtttgggggggggctaagtagggccaccagggggttaaacaacaaacagcccctaagttttaaggggaccaaaaatccccgggggggaatcatcaatataagcggggggggccataataagggcctgggaattatagggcccggccaggaaaaaggacaaattttcccatttatattaggggggattaaaaaaagggggaggattctgacgggggaacaaatagggcaggcccatgtaacggggaaaagaccgaaaaaggcacctggggaggctctggacgggggacacaaatccaaaaacagtttggggc

SEQ ID NO: 57319 - DNA, 588 bp, Zea mays
  Clone ID: MRT4577_15226C.1
gggtacccgggtccccccctcggattttttttttttttttttttttttttttttttttttttttttttttttttttttttttttttttttttttttttttttttttttttttttaaaaaccaccctttgaataagggggtttgggggaaagccaatcctttaacctttaaccaaacaggccaaaatttttttaactgggccccaatttacccaaaaaaaccgtttttaagccctggtttttaaccccccccgattttccttggttaaaaacttttttttttttttccccccccccgggaggggtggtcgccaaattttccccgggggccggggcggccccgggaaacggggcactgggaaaattccccggaagggaaaaggatgggccttaattcccccccccgggggaagggggggacccacttggccgggggccttggggcccttgtccttgccggggggttgaactccaccccgtaaacccccaaccgggggggggggccaaaaaggttcttaaacccctccaggaaccaccccccaaaaaaaccttggccgttcaaaacccttcctgagggaaagaaaacgggg

SEQ ID NO: 57320 - DNA, 295 bp, Zea mays
  unsure (1)..(295): unsure at all n locations
  Clone ID: MRT4577_152270C.1
gcacgccnnccggnnngggaaggcgaggagaggggaaccccggcccagggagaggggnggggaggggaacggcggcggaggagaaggaggagcgggagaagcncgngngccnggccaagcnngccgagcaggcggagcggnacgacgaaanggnggaaaacaagaagaancnngcnagganggacgngganangagngcngaagaaaggcannngnncncagnnggnnncaagaacacnannggagcaaagagggcancaaggagaancaaggggncacaagagcaaaagggcgc

SEQ ID NO: 57321 - DNA, 300 bp, Zea mays
  Clone ID: MRT4577_152271C.1
tgttatcgtgccctttacgatttctccagtcgatttttctgtctgattagtgagctgtatgtggcctgctcgattgaatcatgatcatctgtgttgcatgagagagttggttatacaggcacttatcactgcatcttacatggaggaacacatgggaagacagactggtgggggctctcgtctgcactaaggcacgatacatgcttcgctttcaaggagacggtttcgcagccccaaagacctagaactgctagcatgcgttcatggaatgtagccgaacacgcagccctgcatgacgag

SEQ ID NO: 57322 - DNA, 517 bp, Zea mays
  Clone ID: MRT4577_152272C.1
ggggttatacccaaagttcacaaatttttttccccccaatacataaatacatacatttacatacatacatgaacgggcccaaaaggaaaatcctgggcaaggaaaacccccaaaaaaacccctttagtcgtaaaaagcatgccccaaatgtccccgttaaaaaactcacccaggattgcaacaggaaagttttaaaattattaggggaagcccccccttttggccgggaaagggcaaaacttctggaaaagggggttaagtttccacccagggaggggaaagccgtccaccgggcgccttttttaaaagttgttggggccgggggccaccgaggacggagggcccgggtttacgggctttttgcctgcccccccttttgccgggttaattgtgccgtccccaaccaacggccgtgccgccggaacaatggtcacctccgggagcctgttttttgcctccatttggtggggatttgccttaaagcctgaaaccttgtgccaaattcctgcagcccggg

SEQ ID NO: 57323 - DNA, 273 bp, Zea mays
  unsure (1)..(273): unsure at all n locations
  Clone ID: MRT4577_152273C.1
tcccgggcgggcggccttnntttnnannnnnnnnnncagaataaagcatcgggttttttctcattcaaagccgataaacattaaagtggtgccctcaagaaggtgcgcggggataaaaaaaaacttcatggaaaaccacggaaactagtttcggcagagccagtccagaacaagataccttcacaatgcgggaacagactctgaagagttgcataatttaccaaccagaagccgttactttatgttttgatggatccgagttacacatgtcac

SEQ ID NO: 57324 - DNA, 289 bp, Zea mays
  Clone ID: MRT4577_152274C.1
ccggccggggccatcgcaacccctcgtccttttttgcacagcggccatgcctcccctcacgagctccctcctctcccgctccaccaccggcggctcctccgcccgcggcgtggcgatggccgcagcgatctccaggcccgccgcggatgccgccccttcctcctcgtccccgcctgcccgtccgaccccgaggccgcgcccaagcccggcgtcgcccttcgcgtccggcctcgcgggccgcctcttcggcggccaccgcgccgccacccgctccgcgtcgtctgcggcc

SEQ ID NO: 57325 - DNA, 1447 bp, Zea mays
  Clone ID: MRT4577_152275C.1
gcacgagccaaggcgataaccgtgcgaaggctgttcgtgagaaaatgaggattgtggttgctgggggtgatggtacagttggttgggtgcttggatgtctctcagatctttataagatgaaaagggaaccggttccacctacaggaatcattccacttggtacaggaaatgatcttgctagatcgtttggatggggtggctcttttccctttggttggcgctcagctgtaaagcgttatctcagcaaagcttccagatctcccatttgccgtcttgacagctggcaaactgtaattcagatgccagaaggagaaatagaagagttgccatatgcacttaagaaagtagaacctgtagaccggttggagatcagccaggagaacggtacagagttatccgaaaaggcttctttctataaaggagtattctacaactaccttagcattgggatggatgctcaggttgcatatggcttccatcatcttcgtgatgaaaagccatatcttgcacaaggaccagttgcaaataagttgatttatgctggatatagctgcactcaggggtggttttgtacaccttgcacagcgagtccacagctaagggggcttaagaacattttgcgaccttccattaaaaaagccaattgttcaaagtgggagcaagtgaaaatgccttcaagcgttagatccctggttgtgttaaatttaaccatttctggcagtggaagccatccatggggtgatctaagacctgagtatctcaaaaagaaaggctttgttgaagcccattcacaagatggcttgcttgaaatatttggtctgaaggaaggttggcatgcttcatttgtcatggccgagcttatcaaagcaaagcacattgcccaggctgcggctatcaagttcgaaatgaggggtggcgagtggaaccgagcatatgttcagatggacggagagccgtggaaacaaccgctgctacaggagcactcaaccatcgtggaaataaacaaagttccgtatcattctctcatgataaacggggagtaatgagatttttactccgtcaaccagggttgcattcatagatcgttaggatcgtgtacagttcaggagcagcgggcactagatccttagaactgggtcggacggactgcagcgaggatggcatgcatgttcgttggccttttgtcgtgctatggtcgaagccatggccggagcgtgatgtggcaccatgcattgttgtattcgtaccataatatgtgcgttgttgtatcctaagttctttttgaaggaaacatgattgatttgtttgtattgtaacgttgtgtcattgcaaaagaataacctggtgtaaaactgtaaaatgtgacagtctgccgtttgcacagccctgtagcattttttttttgttaaaaaaaaaaaaaaaaaaaaaaaaaaaaaaaaaaaaaaaa

SEQ ID NO: 57326 - DNA, 437 bp, Zea mays
  Clone ID: MRT4577_152276C.1
ggcatgcttcatttgctatggccgagcttatcaaagcaaagcacattgcccaggctgcggctatcaagttcgaagtgaggggtggcgagtggaaccgagcatatgttcagatggacggagagccgtggaaacaaccgctgctacaggagcactcaaccatcgtggaaataaacaaagttccgtatcattctctcatgataaacggagagtaatgagattttcctgtgtcaaccagataaaaattcccaagtccagtgttcctttaggcatcattatatcacctccgggcgctcactcgtagattgtaccggagttgcattcatagatcgttaggatcgtgtacagttcaagagcagcgggcactagatccttagaactgggtcggacggactgcagcgaggatggatgcatgttcgttggcctttgtcgtgctatgg

SEQ ID NO: 57327 - DNA, 1896 bp, Zea mays
  Clone ID: MRT4577_152277C.1
atccgccctcgcggcccgcacgccggcggcccggcaccggcccccgcggggccgctcctcagcgcgcgcaactgcgggcgccgccggcccgtgctcaaggcccggcggcccgagcgcgtcaccgaggagcaggtctttgatgttagagctgtcaggccttcagattttgttcaccatggtttgagttgtctacccagcggtccgggacgccgacggcccggcggtggcgcccgtggtggtgttcgtcaactcgcgcagcggcgggcgccacgggcccgagctcaaggtgcggctgcacgagctcatcaccgaggagcaggtctttgatctttccgttgtgaagccttcagattttgttcaccatggtttgagttgtttggagaggttagctgaccaaggcgataaccgtgcgaaggctgttcgtgagaaaatgaggattgtggttgctgggggtgatggtacagttggttgggtgcttggatgtctctcagatctttataagatgaaaagggaaccggttccacctacaggaatcattccacttggtacaggaaatgatcttgctagatcgtttggatggggtggctcttttccctttggttggcgctcagctgtaaagcgttatctcagcaaagcttccagatctcccatttgccgtcttgacagctggcaaactgtaattcagatgccagaaggagaaatagaagagttgccatatgcacttaagaaagtagaacctgtagaccggttggagatcagccaggagaacggtacagagttatccgaaaaggcttctttctataaaggagtattctacaactaccttagcattgggatggatgctcaggttgcatatggcttccatcatcttcgtgatgaaaagccatatcttgcacaaggaccagttgcaaataagttgatttatgctggatatagctgcactcaggggtggttttgtacaccttgcacagcgagtccacagctaagggggcttaagaacattttgcgactttccattaaaaaggccaattgttcagagtgggagcaagtgaaaatgccttcaagcgttagatccctagttgtgttaaatttatacaattatggcagtggaaggcatccatggggtgatctaagacctgagtatctcgaaaagaaaggctttgttgaagcccattcagatgatggcttgcttgaaatatttggtctgaaggaaggttggcatgcttcatttgtcatggccgagcttatcaaagcaaagcacattgcccaggctgcggctatcaagttcgaaatgaggggtggcgagtggaaccgagcatatgttcagatggacggagagccgtggaaacaaccgctcctacaggagcactcaaccatcgtggaaataaacaaagttccgtaccattctctcatgataaacggggagtaatgagatttttcctctgtcaaccagattgtaccagggctgcattcatagatcgttaggatcgtgtacagttcaggagcagcgggcactagatccttagaactgggtcggacggactgcagcgaggatggcatgcatgttcgttttggccttttgtcgtgctatggtcgaagccatggccggagcgtggtgtggcaccatgcattgttgtattcgtaccataatatgtgcgttgttgtatcctaagttctttttgaaggaaacatgatttatttgtttgtattgtaacgttgtgtcattgcaaaagaataacctggtgtaaaactgtaaaatgggacagtctgccgtttgcacagaaaaaaaaaaaaagggcgttgttcttgttaactttttttttgatgaaagtattaactgaaaaaaaaaaaaaaaaaaaaaaaaaaaagggcggcagctcgcgatctagaactagt

SEQ ID NO: 57328 - DNA, 3095 bp, Zea mays
  Clone ID: MRT4577_152278C.1
atctcccctttctctcttcgacattctcatcgcgctggcttcgcttggctgctaaggtcaaatagccatgctgctgcgcaatccgccacttggctttctctttcctctttaacccccctacgggctccggtctcagggcgcttcgcatggccatggcctccgcggtggctccggctcctccccttgccagcgacgaccaaaccgggcaaaagcgccgccaaatctgcatctgacctccccaccaccaaatacccaaccagcaccacccaccgccttctgctttctttctttctcgctccttacagcaacacatagcgctcagctcacacctcacagtcagctcaggctcatcttctcagcgagttagcagcagcagcttgaggcccagccgcggctgcctgcgcgcaagcataatggagagcagatggcggaaggccaagatgtcgctagggctcaacctctgcgtctacgtgccccggacgctggaaggcgacgacgcggccagctcgcccgacaccgcctcctccacggcggcgctcgtgtcgccggtggcctcctcctcgtccgccgcgacgagcaccaacaccacccccacggccgcttcggcggaccagagcagcgccagcggcaaggtgctcatgcccaccacaccgacgccgacctccgccggactccgcctctccaaatccggcagcaaatcattcaagaaaacatgtgccatatgcttgaccacaatgaagcctggtcagggccatgctctcttcacagcagagtgctcacacactttccacttccattgtatttcggcaaatgttaagcacggaagcagcagctgcccagtgtgtcgtatcaaatggaaggagctcccatttcgaggtcccttgcctgctgaattacctcaaggaaatgcgaggattaatccagttaatgggtaccaaaatggaggccatatgaacatattgcgtccacttcctcgtgcacgctcttctggccggcttcatcatctggccacgttgctgcctgacactgaccctagtactttcaacgatgatgaacccttggacttgtcgtctgaagaggctaatgacaatcatcagggctgtttgagaacagtagagataaaaacatatccagagttcactgaagtacctgaaaatacatcagaaagaaacttcactgttctgattcaccttaaggcaccggttgctcagcacctgcagccatccagcaatctcggagatggcaacgggctaagtacagcccgtgcccctgttgatctcatcacagttcttgatgtcagtggaagtatggctggtaccaaacttgcattgttgaagagggctatgggatttgtcattcagaatcttggatcctctgaccggctttccgtcatcgccttctcatcatccgcacgtaggctcttcccactccgtaggatgactgagtctggtcggcagcagagcttgctggctgttaattcactgacgtcaaatggagggaccaatattgcagaggccctcaggaagggctccaaggtgatcgaagagcgacaggccaagaatccagtctgcagcatcatcctcttgtcagatggtcaagatacctacacggtctcaccaactgctggcgtacacaaaggagcaccagagtattgcgcgctcttgccgtccactaacggcaaccagcaggtgcccgttcatgtcttcggattcggcgccgaccatgactcggtctcgctgcactccatctcgcaaacttctggcggcaccttctcattcatcgagacagaggccaccatccaagatgcgtttgctcagtgcattggcggacttttgagcgtggttgcacaaggtctgcatgtaaaggtggagagcctccaccccgacgtgcactttggctccatcaggtcaggcagctattctagcagggtttcagatgataagaggaatgggtccatagatgttggggacctgtatgctgaagaagagcgggattttcttgtgtctgtaaacgtcccaccaggctacggggaaacagcactcctcaacgcgggcggcgtctacaaagacccactgatgaaggagaccgtgaatatggctgatgtgcaagtgaagatctccaggccagcattcgtctcggtacaaagcgtgtcgatcgaggtggaccgccagaagaaccgcctccatgcagccgaggtgatggctgaagcaaggttttctgcagagcgcggtgacctgaccaccgctgtttctctactcgaggactgccggaggatgatcatggggtcggcgtcaggacagtctggtgaccgtctgtgccaggcactggatgccgagctgaaggagatgcaggatcggatggccaaccggcagaggtacgaggcgtccggtcgagcatatgtgctctcaggcttgagctcgcactcatggcagagggcaaccgcccgcggggactcgacggacagcgagagcctgatccaagcctaccagacttcgtccatggtggacatgctgcttcgctcgcagacaatgagccgctcatcgactcctcgaccaacgccacagatgaggcacgctaagtcattcccggcacgcccgcagccaaggtaactgctatttggtgtcaccaaggatttgcctgaagcctaatttgcttgccgatgggcgtagtagcgccctctaaattcttagttttgtggcgggaggacgggaccagggtatagtttgtgtgggtacaaggggatgtaatggtgtaaatttgatctggggtggtggaggtaaatggtgagaggggtaaggtattttataattgagggggtcggggatggtatacgtcctggggagaattgggcaggagggtggtgaactggtatactctagtattgtactagctcctttgtgtggtgatgtacataagggaagggtatacatttgtggactctttgaggagggatggatacctaatcctgatcccgatccttgcaatgtttgtttcctcagcctggaaaaggactaaggtttgttgcctctttctggaaatggaattgatgatgatcctgggtattttatcaaagtgcctagccggcccttttaaag

SEQ ID NO: 57329 - DNA, 579 bp, Zea mays
  Clone ID: MRT4577_152279C.1
cattgttgtttactgcttatgcgagtagttatacacacatgcacatacatgtcatcacatatatcgcactgtttttctggattaaattaaaactaaaaatgcctaactttctaacacagctacccagcaaattcacatttcaattacaatgtgcatcaacacgagcaacatgatcgtgctttacttctgccatcttttagaccccctggctgaagaacctcctgttaactggctagatggagcttttgcattacttggagtcttagcatcctttgattttgatctagacatagatggttgcccgttttttgtgagagtgaatctgcttattcttgatggaattccatgcaaccgttccgctgtcatctcagcagctgaattgtaattctcggcttcacctgataaaccatcatcagatgcattgccatcatattctgcttcatctaagctcactggagcagtatccgtcaaattatggttagaatctctgttatcaggaggatctgatagaactctgtcactagacttgagcattcgttcgcctgataatagttggctaggttggtttactgtaatctt

SEQ ID NO: 57330 - DNA, 133 bp, Zea mays
  Clone ID: MRT4577_15227C.1
aacctcctaacaccaagacccaataatttttcttttttaaggacattaacttcacttccatctagagcttttcatacaatgccaagaccccacctttcctcaaacacaccaagaaatacactcaattcatcct

SEQ ID NO: 57331 - DNA, 320 bp, Zea mays
  Clone ID: MRT4577_152280C.1
ttttatttttttttttttttattaattgttttttgtaaacaaaagccttttatattttccccagaatttccacctacaataggacttaaacttggggggacaacagaggccagactatgtaaacgggcaaagtaacttcgtgtgaccaaatggccagtttacacagttatataaaacacactctgggttttaaaatgaacagaatttgtggagggaatttttctcacgcgccattttctgaaaaaaattatgttttttaaaaactggacatgtccctgaaaagggtaaccaatctattatcggtgataaaagggttattt

SEQ ID NO: 57332 - DNA, 384 bp, Zea mays
  Clone ID: MRT4577_152281C.1
cccacgcgtccgcccacgcgtccggccaacccttccggcaaaatgtgcggcacatgggggggcgccaacctgtgacgggagggggtacagcacgagcaccggcacgctcaccacggcgctgatcaacgacctctccaactacggctcctgctacgagctctgctacgacatccactgccacaactacctgccgtgcaccatgaccgtcaccatcaccaacatgtgcacgaacaactaccggctcaacaacgaccaccgcagctactacaacccgtcgtgcaaccactctcacatggactagcacatcttcctgcccatcttgcattacatcgcccacatccggcccgtcatcttcaccatagtgtccagcataaagaaaggcgt

SEQ ID NO: 57333 - DNA, 142 bp, Zea mays
  Clone ID: MRT4577_152282C.1
actacttgttttttgtgtttttcaaaaaggcggtaaattttccatctaaaataatcaaggtgctactatacaatctcgtgaaatcaatacactaatattccggaaatacacattttcattctcctgccacaatccttaaaca

SEQ ID NO: 57334 - DNA, 369 bp, Zea mays
  Clone ID: MRT4577_152283C.1
gtcctcagggacgggggcacataacaatagattaccatttccaacacacaaccacaaccccaaccataaatattaaaaaaacactcctaccacacatctcaaaatccaagatcacacaacaaaaccaccacccccgcttaaaacaaccaacaatgcacaagaccctccccccaaaaaaccacacccctcacacaaaaaaacttcacccacaccaacactaaacgccaattataagccaccgcccacattccccatgaccctccctacaacacaggaaccccctttcttaaacccacaaagcctcacaaaacaaaaccaaaaaccctccctcaaaaacccctctccaggtcaagcccttcacccaaaaac

SEQ ID NO: 57335 - DNA, 533 bp, Zea mays
  Clone ID: MRT4577_152284C.1
ataaaaaaaaaaaaaaaaaaaaaaaaaaaaaaaaaaaaaaaaaaaaaaaaaaaaaaaaaaaaaaaaaaaaaaaaaaaaaaaaaaatttaaaaaaaaaaaaaaaaaaaaaaaaaatttttttcctttggccgccacccccttaaggggaatttttggaattttccttcccattgggggcgttttgaccttttttttagggggcccatttccccttttaggggttttttttaaatttaattggccttttttttaaaacctcttttttggaaaaaccttggctttccccaatttattccctttgcacaacttccctttttccccatttggcttatttgaaaaaaggcccgaaccattcccctttccaaaaatttgccaaccttaattggtaattggccccccctttttgcgccccttttatcgcgggggtttttgggtttccccccagggtgaccgttttttttgccagccctttaacccccgttcttttggtttttttcctttcctttttggccacgttggcgggttttcccctt

SEQ ID NO: 57336 - DNA, 226 bp, Zea mays
  Clone ID: MRT4577_152285C.1
gcgacccacgcgtaacgcgggacgcgtgggattagcatgcaccaaactttctgtttcgcgcccgatgtgggggagggtgcatgatgcgctgcaagccaggacagagacggactgttcccccgcactcatccactctgcttcccacacggacatgcggcatcatactcacctgggacggcggcaggctggtggcttgcgtgggcgggacggaacgtgcggtcgaatg

SEQ ID NO: 57337 - DNA, 1834 bp, Zea mays
  Clone ID: MRT4577_152286C.1
catttgccctggtcgtcatccagttgccctgcagcctgactcaagaaacaaaaggaaaggagaggagagggaatcgaatacgataccttctcttctccctccattcctttcctttgccccaaccatgccatattggtcattgccctacccacgaggccacgactcgcactgatagatagcggagaggcgtcgagatcttatccctcgatccaattccaaacagaaaccgccggagctggaacaagagccgctcgcagcttgctggaccctcccgctcctggccccggagccgccggccatggccaagcacaagcagcgcagggtgtaccaagtctggaaaggcaaaaacataatactatgtggtggaaggttgatctttggaccagatgccaaggccaccctgatttccttcgccctaatcgccatccctgtccttgtcttctgcgtctttgtggccagacatctcatacacatcttccctgcatataacgcaggatacgcaattcttgctgccaccataggccttaccatttatgtactgttactgctcttccttacatcatctcaagatccaggtattgtaccacgaaattcacatccacctgtggaagagttctcttatgatgcttcggctccacatgctcttcagttccctcgagtaaaagaggtcatggtcaatggagttcatgtgaaaatgaaatactgtgaaacttgcatgatataccggcctcctcggtgctcgcactgctccaaatgtgataactgtgtcaagcgctttgatcatcactgcccttgggttgggcaatgtattggagagcgaaattaccggtacttcttctgttttggtgcttcagcggcagtgctttgtatctatgtatgtgcaatgtgtggattgtacatcaggcttctcatgaataggggtcattattcggtggggaaagccattaaagaatctccagcttcattggcagtcatggcatattgtttcatttgcttctggttcgtcggtggtctcactgggttccactcttatcttattgtgacaaacaagacaacatatgagaatatcaagtacaagtacagcaaccaaccaaatgtgtatgaccatggttgtgtgctcaactgccatgaggttttgtgcaaaaaaaggaaaccttctaagatcaacctaagagctattgtccaagaagaacaagaggtagcacggccacagaccagctcttccaatatacgagaagatgaggcaccccaccgtccacgagccaaggttgaggatgatctagaaatgggtcttgacatcctcaagaccacagggcgcaggacggataaattcagcgatgaggaattggagcctgcaactggaagcaatggtattgaatatcgcacgccagattcagagactgagattcctgttaccagaactaagacagagatctttaatgaagttagggatctggacttatcggttagtaatggtgcacaatcttcatctcctgaacaagaacagcacccagacaaactttgctgatggtatatgaaatgtgcctactcttggaacaaatggtctctctgcatttccgtagtgcagacaccaaattattcaccagggctgtgaatggttgcatttgaaggcagatttcctcctttgccgtctgctttcaggatttaagcctttgcttggccaatcatagattcataggtgtgtaaagatcctccagtttgtgcggtttatggaggttctaaaagattctaggaactgtttcagattcttctggtgtgtgaaggctaaccgtacataattttcaaagctacctgatcactacataattttcat

SEQ ID NO: 57338 - DNA, 265 bp, Zea mays
  Clone ID: MRT4577_152287C.1
cgggtcgacccacgccgcccgcgtcttctttgcttccgcatggtttggactgactgctgcgctttcgctaggcacccttggatctctgactccagcccgttccccgaaattaccagttgcttgcttcttcctgttggaggaggatggctgtagcctgcaggggccggagagagcatgaggaggcggagacatgggtagcttggctaagctggagaggagggcggtggagacagacgctccggccatggtgaagatacaagaactg

SEQ ID NO: 57339 - DNA, 736 bp, Zea mays
  Clone ID: MRT4577_152288C.1
ttgggtacctcgaggccggccgggctgttctttatcttcgctcctgggaacgaaagcctcgtacagtcgtacgccttcttctggaacgcgcggttccctgcgcgctcatccccttcgctcatctccctcttctccctcgcagtgcatctccatggccgcgcccctgcccgtttacctcctcggcgagctccctgccagctccatcgctgccccagcaccggccgcccttcggctcccttccccagccgcgcgcagctttttccctagccacggttcttccccaagacgcgcccatccctctgctccactgcgtcgtcgccctgctcgagtttgtcctggtggtcgttgtttgggagcagactcgaccgcgccctgcatcttccatgggcgagcgcccgaggtccccccatggcgctccctcccttcttctccctccctctcgcgttctgtttcctgcgcgcgccggccggagctctctcaagcttcccagttcgcccgaccgcggacgtccatggccctcctctgctcgtccgtctctgtcactgtgttcctggcgccggagtttttctgtgggctctctctctcccacggtcgagttcccatctcactgccctctgctcggcgcctacctcggaccgtgcgtcctgcccagcatcacgcgctgggcttgctccctgctcgctccgcgcgcctggctagcctctgctccggacgcgcccagcgccatgagcgtctt

SEQ ID NO: 57340 - DNA, 333 bp, Zea mays
  unsure (1)..(333): unsure at all n locations
  Clone ID: MRT4577_152289C.1
attgcagtgtcaacacggaggtgatgcagaacaccattgcgctcgagcccctcgccaggagagtggtgagaccgctttttatctttcactatgtacctcccattttttgcttgctttcagtgctttgaatcatttagtaacagttcgttcaatagttggtatgatgtgcgccctctgcgtagttaaattcttccctgctgttgactgcattgccgatacatctctgtggcctgatgacactctcatgttgattttgggtcattcaaacagnnggcnnanattattaaaaannngnaaacccaactgnntccaacttatggtgtgtttggttag

SEQ ID NO: 57341 - DNA, 214 bp, Zea mays
  Clone ID: MRT4577_15228C.1
ctggggttttttttttgaaaagatttctcgaagacttaaacattgcacattgagagtatgaatagaactgctctttagcaggcgctatcggcagaaatggatgcgctacataaaaatactaatggtcaacccatgcctatcgggccttgtctttttacaagggtgggggcactatgccacacacatcggggatcaactcccaaaaaattggggg

SEQ ID NO: 57342 - DNA, 582 bp, Zea mays
  unsure (1)..(582): unsure at all n locations
  Clone ID: MRT4577_152290C.1
gtttgtttattttagtgcagcaacgggacctntgnaanaagccctattttctgctgctgtttgccaactctaagcagatcgctcgcntgaaaaagcccgccctcctcgctatagaaggtatgtgtttaacagatatgaaatgttgttcntgaaagagcatggaacaacaaagaaaaataaaaataaaaaaagaaagcacaaagtctgaacttatgaacttctgaaacctacagattattctaaaatttctattaagtctaaaattgtgaaattgtgaaattcgtgtttagtctgaacttctataattctgaaagtctacagtcacctgaacattggctgaaagtctgcagccacctgaaagtctgcaaataaagcacaacttcatctttagccgaccacgatagtggcgacgatgtcgttctccatcccggatgcgtgggagatccctgcggcagtgggtcagaggggagggctgagctctgccgcggtgatgggagggagtggtcgaggtgctcgaagctctcactgacagcagtgggggacaggaggatacaagtttactgcggctaggggaggagagcg

SEQ ID NO: 57343 - DNA, 355 bp, Zea mays
  Clone ID: MRT4577_152291C.1
caataatctgaaccctgcgatgtctctagaaagtgcaaggaaccattaatacacgatgcctctgtccgtgccgggctatttcatttgcgtggagccgaagcggggggaaactgtgctgaggcctgttgctgtggtgttcgtggtacacaaagccactcatcgcgggtgtattggatcagactaagcaacgatgtcctctcccgtcatgaggatgcgatgacccttgcgactaacaacgggggatataggattagtgactacatggagagacacgctgaggtcgcacacaagattttggaggtcgtcagcatataacaggacaagaaggccggtggatgcatcccagggtttgagg

SEQ ID NO: 57344 - DNA, 2095 bp, Zea mays
  Clone ID: MRT4577_152292C.1
ccggccgggctagagggtcatggcatggggcatggggtggactggtgcgtctgatcctgatcttgccgagtgcaatcgagatccgtgccagcccgtccatactgcggtggcgtggcggtgacgtgccggcgcggcgcggcgcggcgccgataagaggtagagagagggggaaaaaaaacaacaatcaattctccagaccctccccggcaaccgcgtccggccgtccgcttccctttccttggataaccacggcacccgcccgcccgcccgccggcaagcgaaagcgaagcgagcaaacccagccatggagaaggcgatcgatcggcagcgggtcctcctggcgcacctcctcccctccccctccgccgcctcctcgcagcctcagcttgcggcgtcggcgtgcgcggccggggacagcgccgcctaccagaggtcctcctccttcggggacgatgtcgtcgtcgtcgctgcctacaggacgccgatatgcaaggccaagcgaggaggcttcaaggacacctacccagaggacctcctcactgttgttctcaaggctgttctggacaacactagaatcaatccagctgacatcggtgacatcgtcgttgggacggtgctcggccctggttcccagcgtgcaaacgagtgcaggatggctgcgttgtttgctggcttccctgaaaccgtccctgttagaactgtcaaccgccagtgttcatctgggctacaggcagtagccgatgtcgcagctgctataaaggctggttactatgacatagggattggtgctggtttggaatccatgtccataaattccattgcttgggaaggacaagttaacccaaaaataagcgcattccagaaagcacaggattgtcttctgcccatgggaattacttctgaaaatgttgcccatcgatatggtgtaaccaggcaagagcaagatcaggccgccgctgagtctcataggagagctgctgcagccacggcctctggaaaattcaaggatgagatcgtcccggtcccaacaaagatcgttgatcctaaaactggagaggagaaggaagttgtgatatcagttgatgatgggattaggccagggaccacagcatctggattggcgaaactgaaaccagtttttaaaaaggatggaactacaactgcaggcaattccagtcaagtgagtgatggtgctggagctgttcttctcatgaaaagatctgtggctctgaagaaagggctgcccattcttggtattttcaggagctttgcagctgttggagtggatccagctgttatgggcgttggtcctgctgtggccattcctgctgctgtgaagtctgcaggccttgagattggcgacattgatctgtttgaactgaatgaggccttcgcctctcagtttgtctattgctgcaacaagttggggctggaccgttctaaagtaaatgtaaatggaggcgcgattgcccttggacaccctctgggtgcaacaggtgcccggtgtgtggctactcttctaaatgaaatgaagcgccggggcagagactgcagatttgggtgttgtcaccatgtgtatcggatctggaatgggggcagcagctgtgttcgagcggggagacgcggtggatggactctccaacgtgagggacatccaggcacataattttctgtctaaggatgcgaagtagaggcgcagaaaaaacatccatccttgagcagcataagcctgctgcatttgtaatatattcgaaatccgtattttttttcttcacaaacactactctatatacgatgaataaaagggcgacaatacagtgtcatcttgtagccacctaagatgcgaaagagaaaagaaggccggctgttcaatgttctgggcttgttctgttattgctttccgtctctcaaactaaacaagcatggcctttggtgtgtttgaaccagaaggatggaaagagtaccttgatttgctgagacgcgtgcttgccagttgccaccactggtatgttgcaaatagtagttgactgcattttatagtgtgctggatgtacgtaactgttatctgatccatcggcgtgactaatagtgatag

SEQ ID NO: 57345 - DNA, 274 bp, Zea mays
  Clone ID: MRT4577_152293C.1
ggcggatcggcaggcgaaagagttgctgcacaaggcggagccgactttcggttccccaccaggagcttgccaccatgggtagaggattgaacaagcatttgtagaggctctatgcgcccaagcatagtatgctggacacagctcggcagagcttttgcttccaagccatactctggaccttacaagtctagggagtgcctgactatgatactcatcatcactaacacgctcaagtatgctctctcataccgagaggtcatttccatcctgatgc

SEQ ID NO: 57346 - DNA, 190 bp, Zea mays
  Clone ID: MRT4577_152294C.1
cggacgcgtgggcggacgctttggcattaaatttgcagtgtttttgcttagctgtacgggcttcccaactctcaacttattccagggccttcaggacatgacgggcatactactgcagacattcatccagagtctccatcaaatgatggaccacgaagcgaggatgctgctgaccactggctattcgcac

SEQ ID NO: 57347 - DNA, 356 bp, Zea mays
  Clone ID: MRT4577_152295C.1
gcgactaacaaaaatcacgtattgcaaaagcgcaaataccgagacggaacccaatcaataaatcgaaaactgtacatggtaacagatctcaacaggtcgcacgatatcagcaacgatcacaaaccacacttgagatgatgaaaactaggcattgccaccgcaagcgcatgatcgcatcatctcttcttgacaggcgcccaagacaccatggggccgggcgaacctttattctccacactcttgacaactccaacagcttccgtctgcctcatgacacgctcaggaaaccctaccaagggaatgatactgtgacaaacgtttccacccccacgggcctggccggaatcctcagcacc

SEQ ID NO: 57348 - DNA, 408 bp, Zea mays
  Clone ID: MRT4577_152296C.1
ccggccgggcttctccccggccgtttcttgtcgacccactcggtttggggctcccgtcggcgcccatcctgggcggcgtcgcgatccacgaactactaacatgtttcggcaagatctagactggagataatctagcttgtcgattaatatctgcaacccggacgtgttgtacggtcaccagatccaccgatgcgaccgatgatgcttacgatgatgttctttaatcatgtgttcatcaatttccagagatatagatctgtcaatctcttagagacgtttactagaatcgtttgtctctaaagatcgattaatggatgcaaacaccttaagatgcctctaaaaataattccatccaaaagttatcgataactttttaatatgaaaaaaaaaaaaaaaaaatttgcggcc

SEQ ID NO: 57349 - DNA, 277 bp, Zea mays
  Clone ID: MRT4577_152297C.1
cggcttcctagtgagtcggcggctgatttagaaggaggttcaggctacggtgagccgaaggtgggtggtgaaagcgtgtggggcccgttcctaggggcccagctccctttgctccaagagatccagctcctcgcctttcctggggcttccgcctttatttctggtttctcctgcagtgtagcctccatccttcttgctgccgctaaagccttgtttttcttagaggtgtggggactgcaagcgctcaaagaccatctgggaaacctgcctattccca

SEQ ID NO: 57350 - DNA, 364 bp, Zea mays
  Clone ID: MRT4577_152298C.1
ctttgattatcacccgggcacgccgacggagcgacggggccaactgacacgggaccgccgggcccgccgcgccagaggcctaccggcacgcgaccacaggaggcctcagtggcacgatctacgcggcgaccgaccgcaccggccgcacacgaggtgaaccggggcggcgcagcgcagcgcaaggggagaaacgcacgctgggccgctagggacgaacggcgctcgaagcaagatcataccaactagcgcagcgagctaagatcgagcaactaaaacaacagtgacggacgcctcgcgcatgagaacaagcaaaagggtgcgcgcaaaactgagctgcaaggagaaaggcggaagccgtcacaac

SEQ ID NO: 57351 - DNA, 412 bp, Zea mays
  Clone ID: MRT4577_152299C.1
ggggtaccctcgggtccgtccggttctctttgacacctttctccttccgacgcgccgtcgccgcctagtcgagtgcctcgccggtactgtaccaatagcgactttaatctttcccttctcccgccgctatcagggccatactcgccttcgccttgggctcgactcaatgtctccgccgtctggtctacttttcttcctaaaatctcttttaaactcgttaaagatggagaagtagagagggagaggaagaagagaagatttaaatgttgaacactgatcaattgaaatgatatgtagctttttttactccttccgtccataaatatttgtcgcctccactatggtattcgtgttagttaaattttttaaatttgactaaatttatagaccagacaaaaacaaaaacaaaagc

SEQ ID NO: 57352 - DNA, 203 bp, Zea mays
  Clone ID: MRT4577_15229C.1
attgagcaccttctactcctccgtcgtgtaacaactcaacccccgcaaccgccacatcggccattttcacctgctcaaccaagcccaacaccctttacgggcaagccccagcttaagcctctctttacacacccaaagttgcgccccaagccactccaatctccgttgatgttgccgctgattaacaagtaactgaaaaagtt

SEQ ID NO: 57353 - DNA, 356 bp, Zea mays
  Clone ID: MRT4577_1522C.1
gcgtcgtcgtcgtcgtccaggcgcagccgttcgccttgtcacatcggtcgccgttctctgaggcgcctgccggccttgtcgtgtccctacctgaaaccttatcttgtctcccgctcggatttcgatgacctctgctctttggaataaggtactcttaaaatctcagggaagcttagccgcccagcgcatgtacgccatggacccttgcgctgcgggctgcggctggcaacgtttcttttcttttatcggtgaggtcctcgttgccgtctttgtggcttccgatgatggaattttagccagctccgttccgtccttcaggcttcaaccttgggggaagggacgcgtgaaggtttggt

SEQ ID NO: 57354 - DNA, 223 bp, Zea mays
  Clone ID: MRT4577_152300C.1
cttcgatgcgaatgtagcaatagcatacggagcaggtgcagagcctgcagcaatggaggctaaaactgaagatgctccaagataaagagggcgttctttggcgtccacgggggatagactttaatgatgatgtaggttcaagccaaaggatggcttgttctagtttaaaatatgtttgatctatttttaaaggaactattggaaaaagagtttaaaaaaatta

SEQ ID NO: 57355 - DNA, 209 bp, Zea mays
  Clone ID: MRT4577_152301C.1
tggccgcggccaacaatatcctactcagatggcagctccttcattcttcaggccagaacggtgaacgagccggacccgctcgtgaagcccaagcaggacaagtacgcgctccgcacgtctccacggtggctcggcccccagtacgaggtcatccgagccgtccccaagtacattgagcccgaggtccacttcttcaacgacaacccggt

SEQ ID NO: 57356 - DNA, 377 bp, Zea mays
  Clone ID: MRT4577_152302C.1
acacaatagactttagatttagatggccttttagtttagtttagatatatgatgatgatatactacatccgttctcgaatatttgtcgtttcatttttaaactaaaacgcgactaaaaaagaacggaggggtacatgataacaataatataacagcttatgccgaaaggaaaatctgccagtgccaccaatcacctcggaaaaaagaaaaccaactctcccttttttttactggaaaagcatgcggtagtgtggccaacttgttggacatatataggagacaaaaaaaagaagctaggcttcacgtcctttactcttttttgcttgttcgttttggtttttggtggaaggcttatgctttatgtgttgtcattgaat

SEQ ID NO: 57357 - DNA, 1239 bp, Zea mays
  Clone ID: MRT4577_152303C.1
atggcccgatatgtggcgtggtgtcgtgtgggtgggaatccacttcgagctggtgaggtggtacacgggcaacaacagcggcggcatctcgacgcacgcgtgtggcgcggcggcggtgctgtggactgtggtgcactccgaacttcgaagtttaagatgtcagaagcacttcagaaagataaggaaattggtgaagaggaagaggaagaggagtatgtattgttagagttggacaattgtctttattcagacatatcccctggtgctcagttcgtactctctggtttggatacattgacgcctaccttgatagtaggtgacaatctgaagatggtcggggaatatgaagaaactattggcacctgctatctattctctgaaagtgaaactgaaccaaaacctacaagtgatgagatggcaccttctaaagaaaacacagaaattaacagcagtaaggaagcgcccttgaaggaggtgcgtgcgttcaaacagcactcacgcgccatcctaccttccggtgtggtctactcttctggtgggtcaagttgggtacttaacactggatgtataaatcacatgaccggaaagaatgacatgtttcactctttgcaactaaccgaagagttacaagatattgtatttggggatagtaacaagagtgaggtgattgatattggtgacattcttatctcaaatcatcaatcactttcaaatgtgttgttagttgattctttgagctacaatttcttaaagaattgggccctcattgaagttgcaaggccgatgatatatgagtacaagacgctggacaactattggaccgaaatcgtcaacactgcgtgccatgcaatcaaccgagtctatctccacaagaaagtcaagagctcaaattttgcttctaaagtggatgaggacttcttgcttggttatgcatcaaatgctcatggatatcgtgttttcaacaatgtcaccgaccttgttgaaatcgcggtagatgtgacatttgataaatataatggcttgcaaaggcaagtttctagtgatgtgacagataatgaagcaccaccttatgaggcaatcaataagttggctgttggtgaattaagaccacaagagaaagatgaagatgaaagaaggatttggatgacaaacgaagttgtcaatgagaatacaagggtagtgggatgtcaaccctccatccaagtaaacccattaacttcaagtcacccaactcaataa

SEQ ID NO: 57358 - DNA, 299 bp, Zea mays
  unsure (1)..(299): unsure at all n locations
  Clone ID: MRT4577_152304C.1
gggtntgggtttttttttttttggggccattcattatagattcatatagtttaccggacaagaaccttttttttgggaggtagaccaaggaaaaagattttttaaaaacattggaggatttttgttaacacacccctacaaaaatggggaacatttttttatgtttacaaaaaaaaaatattaagtccaaccggctgggactccaccaattattgtgcccacagaaaaattaaggacccttaaaagggggttggggtctggggaataccggttaagttttaccacagcagataactttt

SEQ ID NO: 57359 - DNA, 230 bp, Zea mays
  Clone ID: MRT4577_152305C.1
acaaggaacaaaggggcattaccaaaataaaccggggacctacatctaaataagccatcatcacgtgcaaaacacccatctgcgcatattcccgcgtcatatctgatacataataactaacattattcaagctaccaacgcatatattgatgtgtccacacaccacccagcacaaactgggctcccagaccctgactatggcagcatattgccgtgttgcaccactactt

SEQ ID NO: 57360 - DNA, 372 bp, Zea mays
  unsure (1)..(372): unsure at all n locations
  Clone ID: MRT4577_152306C.1
caaaaactggggttttcaaaaactttgttcccaaacagggcctaatctgtatgtggcgaatacaatgcttccagggctccataaaatcggttcagcctgtcgcaaacacaatgccatcatgctggcagtctaaaacacactgtttttttcccagacgctcaagctgtaccaggagcggggactttggggtagtcgcacccccccggctgcgcctcccactccgtccaggacccgtcgtagactggcacatcncgctttccgatcctgtacagccccngagcgagtttgccggcngggccgtccggtccgcnggtcccgctttttggtcggtcgccctccttccccgggggcgcggngttcggccgcttgcgg

SEQ ID NO: 57361 - DNA, 481 bp, Zea mays
  Clone ID: MRT4577_152307C.1
ggacgacacgaacggacaagcatacatgtaagggaaacagatccaggcattaggctaaaacattttatacgggggcggaaaaaaaaacgttctcgtatacagacccgttgcaacagttacaactccctcccagagaaaaaaaacaggaaagaacagggaacgggaaaacaaaccaatttacaggggcttttctgaaaaaaaagggggcgggctttttaaggatcccccaaagctctgtcaagccaaatagttgaaaatctgggggttacccctggcccgctccagggactcccgggctataaagctctctattcttttcttgatatcagcgggctaaacagggaactaaagctgcgggaaaagctcggttataaaaaggggggggctaaggaccttccgcgttttaattattcgaactatggccgaataaacctgatactgccgatcctggaaactttttaaggggggctcgtgttttctt

SEQ ID NO: 57362 - DNA, 1341 bp, Zea mays
  Clone ID: MRT4577_152308C.1
cccccccccccggccgcgcgtgcgcccctccacccccggcgattggcaccctcgaggcccggccgggacacggcttttggcagctacaaaccacccaaaagccacccccagaaaccggcggtccttgggtgttccggatctgagccagcagctgagaagaggatgagcgccgtggccgccatggcgacgtcgtcgctgaaccccaacgcgccgctcttcatcccggcggcgtaccggcaggtggaggaattctcgccagagtggtacgagctcgtcaacaccaccgcctggttccgggaccactggttccgccagcaccagcaccacgaggccgccttcgccgccgccgacgccgagctcgacgtcgccgcgctccttcccgacgactccgtcgacctcctcgacaccgacgacctcttctacgcgcctgacgtccaccacccccacaacgccaagccggcgctgctgcccgggtacgacctcgacatgctcagggcgctgagcctcagctccccccgggccgccgccgcgccgtcgccgtcgccgttgctgcgcgcccagcagcagaggcacgcggacaggccggcgcaccacgccaggggcgccgcgcgccgcgtcatcatccaccagcctcgctagaagcagcctgatcatggcgggctgccgccatggctgttgtgcctagtgtaacctcaagcaagtctagtctgtttctgtctgtgtatacgactaaaaaaacaacagatgggggattcggacgaggcggccagtgctctctcctcatagccagcttctcctgttcaagctcagttcttgttcatccagcagagcacaaaaaaaaacagacaggcggagtgatgtacttactattcctcctcctcctcccatgtccatgttgttgaatatatatatgatggcaagcagcctgatcttttcaataaaaaaaaaaaaaaaaaaaaaaaaaaaaagggccgccaccatggctgttgtgcctagtgtaacctcaagcaaggctagtctgtttctgtctgtgtatacgactaaaaaaacaagtctagtctgtttctgtctgtgtatacgactaaaaaaacaacagatgggggattcggacgaggcggccagtgctctctcctcgaagccagcttctcctggacaaggcggccagtgctctctcctcgtagccagcttctcctgttccagctcagttcttgttcatccagcagagcaccaaaaataaaaaacagacaggcggagtgaagcactaactattcctcctcctcccatgggcatgttgctgaatatatatatatgatggcaagcagcctgatctttttcaaattg

SEQ ID NO: 57363 - DNA, 163 bp, Zea mays
  Clone ID: MRT4577_152309C.1
gctccgtggcgtacggcgcgacgtggcagttcgacacggagtgcgctgcccaacgaacctcatcaaggcggcgggctggccgtggcgcggtggaaggaacggggaagctggaggctcaaccatgcaaggaactagcccctaactgcccatcgacgggcttcct

SEQ ID NO: 57364 - DNA, 801 bp, Zea mays
  Clone ID: MRT4577_15230C.1
caaaatctagatgccacaccctatcccagccgccgccgccgccgccgtcgccgccgccgccgctgcaaccgccgccttcgattccgtggaattggaggggaagacaattggatctgtctgccgcaggaggagtggggagaaatagaatgaaggcgcgacagttcctgaatgttgtgatggagaggtatggcactggcggtgccggtggcagcttgtatacggtcagtcgcatcaacgccaaggaacacctcttctaccgatccacggccgaagcacaggcagcagaaaaatcaaggttcgatatggagtgcccatcatcagccgttgtgccaccatggatggagaccatctcgcggatgcctccgtccaagctcagattcgagcggtccacctcagacaacaaaagactggatttcctgcccttccatgaacgaggcagcggtgctgcgagcaagatcctctgcgtggacgccgctggccacaccgccctatacgacatggacgccggttcggtccagccaattccatgcctcaacagtcccaaggggagcaggcccatcagcttctccaccaccaatcccgaagcctctgaccgtgaacgtgctgatgccttctacgttatgggaaggttcccttccagctatgacccctacaacttcgaggtactcatgtacagtaacccttctaatggcaggacgatgaaaggctgggattggctcaagctaccaacaccacctgcctatgctgacaattgcattgtcaattcccatgcgctgcttgaaattgaggtggactcattct

SEQ ID NO: 57365 - DNA, 1684 bp, Zea mays
  Clone ID: MRT4577_152310C.1
taaaattcacatctatgcattgggtacctcgaggccggccgggacggcacacgtctcggcagccacaagaaaccacccccttccggcacacgggctcgaccacctgactccatcaccgtgcctgtctgtgttctagggacaagaagagcagagatatacaggagcgagcagaggcggggagaagaggatgagcaccacaacggcgtcgtcgctgaaccccaacgcgccgctcttcatcccggcggcgtaccggcaggtggaggacttctcgcccgagtggtgggagctcgtcaacaccaccgcctggttccgggaccactgcttccggcagcgccagctccacgaggccgcctgcgacgacgtcgccgcgctcctccccgacgacctcctcgacaccaacgacctcttctacgcgcccgacgtcgtccaccaccaaccagcgacggcgctgctgcccgggtacgatgtcctcgacgtgctcgcggcgctgagcctcagctcccccagggccatccgccagcctcgctaggagaagcctgctcatggcgcctggcgggccaccacctccaccacggctgctgtgcctagtgtaaccccaagcaaggctagtctgtttctgtgtatacaatacgactgaaaaactaggagaggggggattcggccaaggcggccggtgctctctcctctcctcgtagctagtttttcctcctgttccagctcagttcttgttcatccagccgtgttaggaaaacaaacccagccccgtgcccatgttgttgaaaaatatattagtctggtatttaccaactctcaaaaaaaaaaaaaaaaaaaaaaaaaaaaaagggcacgacagtcggcacacgggctcggcagccaccacaagaaaccaccccctaccggttccggatcgagcagaggcggagaagaggatgagcaccacaacggcgtcgtcgctgaaccccaacgcgccgctcttcatcccggcggcgtaccggcaggtggaggacttctcgcccgagtggtgggagctcgtcaacaccaccgcctggttccgggaccactgcttccggcagcgccagctccacgaggccgcctgcgacgacgtcgccgcgctcctccccgacgacctcctcgacaccaacgacctcttctacgcgcccgacgtcgtccaccaccaaccagcgacggcgctgctgcccgggtacgatgtcctcgacgtgctcggggcgctgagcctcagcacacccagggccatccgccagcctcgctaggagaagcctgctcatggcgcctttggggccaccacctctccaagacggctgctgtggctagtgcaccccccaagggggcctcgtctgccgctgcatcttcaatacgactgaaaaaaagcggcctgggtgaggcccccgacgtggctgttgtgcctagtctaacctcaagcaagtctagtctgtttctgtctgtgtatacgcctaaaaaaacaacagatggaagattcggacgaggcggccagtgctctctcctggtagccagcttctcctgttccagctcagttcttgttcatccagcagagcacccaaaaaaaaaaaaacaggcggagtgatggactaacaattcctcctcctcctcctcccatgtccatgttgttgaaaaaaaatatgatggcaagcagcctgatcttttc

SEQ ID NO: 57366 - DNA, 297 bp, Zea mays
  Clone ID: MRT4577_152311C.1
tattttgcatttattttcatatttgtatttttatttaggtgtgttatttttttttagaaaagtgttaaggataatatgaaacgggaaggacatgtagaggtttagtttatacgaggggggggggggggggctaacaaacaattagcgggggccctaggggcaaaaaaaaaaaatgatcactattatggggaaacaatgtgggaggatcttgacgaaggggtgataggatggtaaaattgtaagaagagggggtggaggttttgaaggaaaagaacgggggtgggaagttgttaaggg

SEQ ID NO: 57367 - DNA, 1335 bp, Zea mays
  Clone ID: MRT4577_152312C.1
accactgcctcgccaagatagccgaggccggccgctcgtcggagggagccaagtcgccgatctcgctcttctcccgccactcccgccgctcctcctcgtcctccgaagatggcagcgtgaagtccgcggggagcaagaaggtggatccaaggtgcccgaacgctggcaatctgttccatgaatgcggtgagcattgcgccgccaagatgcagcggtcggagcagcagcacaagggggtcaatctcaagtcaccgcgcaggaaaggggggaagaacgctacagcgatcccaaactggaaggttgatccgaggtgccctaacgcgtccaatccgttccacatgtgcgcccagtactgcttcgaccatctgagtgaaacagcgcagacaagtgcagcaaagtcagacaagagacgaggcaagggcgtttctgaagacgagggaagaggagaaaccaaaaccaaccctggttgcgccaacgcgtccaacccctaccacaagtgcggtgaccaatgcaagagaaagggcggtggtgataggtagaccgtagacgaggaaggtaaatttttccgctcataactcagttccatcaaactgtcgtcggtcaattggtggcagcgaacattctccagttttgcgcgagcatcaagccaaagttaggtggatgtcaatttaagggtagacaaacggtcatctggttaaaactgaggcattgtaatatgcttactacaggctagtgaagttcctctgccaaccgagtcagtcgttcactcatttgttatctttgagtaagagctgctgctatattgttggtggcgaaatttttttgctattttgcctcttacagttttgttactatgtcattcgtgtgtctatgatttgtgagagcgcagacaagtgcagcaaagtcagacaaaagacgaggcaagggcgtttctgaagtcgagggaagaggagaaaccaaaaccaaccctggttgcgccaacgcgtccaacccctaccacaagtgcggtgaccaatgcaagagaaagggcggtggtgataggtagaccgtagacgaggaaggcaaggccggcaagacaggatctgtccggacggacgatcgacggcgggcgatgaaggaaaaaaaaacaaagctagttcccatcgaccgtccctgcgggctccgttctgtatgtagagtggtgtgcttccccgttttccattgtaatgcactatgtttctctgacgatgaaggctgcctgtacgagcagaagcgtcctggagtgtttggtgccatctttttttctttttcttctggttcgctttcacggaaatggagacatgttttggggttcca

SEQ ID NO: 57368 - DNA, 314 bp, Zea mays
  Clone ID: MRT4577_152313C.1
tttttctacttggtaaagggaggggtttggtttgtatatgctagcggtgccttgacctgagcacattgcgaactatgccctggcccatggttggacgatactgacccttatgctgccccaaatgctactgtggttcatgttatgcctgctcacacatggcaccgtaataacaggtacgacatatacagcccggtgatcatatgaaattacgcgagggtgcatgtctgtggagtgtgcgctgctgggccgtatgctgaacctgactgtcccgcctcagggcggatatttcacagggagaccaacccccgggttcg

SEQ ID NO: 57369 - DNA, 2908 bp, Zea mays
  Clone ID: MRT4577_152314C.1
tttgccggcaagtcctcgagctggaagcctgaggtccaaacactggcacgtccatgcatgctccgggatcagcagctcaccaaccattcttttacacacttgaatacctgacgaagaaataaattaatagcaaaggccgctcaaatgtgtacagatctgcagtcgttgcattagtcaaatgaatgaatgcatacacaaagcaacaaacgcgagcaaacgcacggggaaaagtcggaaaggttaacgagaaccggacggggcgaggccagcatcaggattggaccggtctgcctgccattcgtcggggttacggctctcatccactcccaaactcccactcgtggcgtcgcccgtcgcccgctggctcgctagcctactacgacttggaacttggaccccttccccttcctcctcctcgtgtcctcttccgttgccgtgccaaccaccaccctcaattgtcaaatcaggcctcctccttccggttccggttccaccaacgaccaagcacccatctctactcgagtctctgcgaatccgttgccggtagcctctctgcggtgagagttccgctgccgcctgctggagatgatggacgacggaggaggaggggtgcagtcgcagggcgtcaacccggactgccccaacgccgccaaccccttccaccgctgcgccgcgtactgccccgtccccgccccggcccccaccaaagccgccgccgaagccgtcctgcgcagcaagccgtctccatttcgtcaggttgcgactgccttggctgcttcctgcgggacagctaagcacggagacaacgctgcgcgtgtcgctccctgatcggacgctgaagacgacgacgcttggccccatccacctcccacctcgcggcctgttgcagactgctacccggcttcttcttctcggggaaaaaggaaagaaaacgcgagacgaaaggaagaaagaaaagtagaaaacctaggcgtatagctgctgaataacggattgagaaaaagcatcgcggaacgcttgaccatctcggtggttggttgggatttcgaacgctaccatatctcacatgcttttcttcctttgattgatggacaggcaggccggcaagacaggatctgtccggacggacgatcgacggcgggcgatgaagggaagaaagaaaaaacaaagctagttcccatcgaccgtcctgcgggctccgttctgtatgtagagtggtgtgccccacgcgtccggcggcctcccgctctacgtcttcctgcgcgaaggctccgacggcgacggcaagaaggtggatccccgctgccccaacgcgcccaacccgttccacgtctgcaccgaccactgcctcgccaagatatccgaggccggccgctcgtcggagggagccaagtcgccgatctcgctcttctcccgccactcccgccgctcctcctcgtcctccgaagatggcagcgtgaagtccgcggggagcaagaaggtggatccaaggtgcccgaacgctggcaatctgttccatgaatgcggtgagcattgcgccgccaagatgcagcggtcggagcagcagcacaagggggtcaatctcaagtcaccgcgcaggaaagtggggaagaacgctacagcgatcccaaactggaaggttgatccgaggtgccctaacgcgtccaatccgttccacatgtgcgcccagtactgcttcgaccatctgagtgaaacagcgcagacaagtgcagcaaagtcagacaagagacgaggcaagggcgtctctgaagacgagggaagaggagaaaccaaaaccaaccctggttgcgccaacgcgtccaacccctaccacaagtgcggtgaccaatgcaagagaaagggtggtggtgataggtagaccgtagacgaggaaggtaaatttttccgctcataactctcagtttcatcaaacggtcgtcggtcaattggtggcagcttgatggggggaaaaaaaagaacattctctagttttttcgcgagcatcaagccaaagttaggtggatgtcaatttaagggtagacagacggtcatctggttaatccaaaacaaacacccccttatgcttactacaggctagtgaaagttcctctgccaaccgagtcagtcgttaactcatttgttatctttgagtaagagctgctgctatattgttagtggcgaaaaaaattgctattttgtctcttacagttttgttactatgtcatccgtgtgtctatgatttgtgagacatctgcttcaataatttgtgggtccgatggtaaatcgatgaagcccatagatagtaatggcacagaaagttgacagcttctatgccctttcattccggagatcatcttaaacgatgttcgtatgtgtctcaagaactgccaagctgcatctttctttcgccgtcttcttaaacgatgttcccctgatcgatctttcaagtcttgggctcttggccccatccacctcccaccccagaacgtgttgcagactgctgggtctctctctttgcagggaaaaagaaaaggggaagaaaaaagaggaaagaaagaaagaaaaggagaaaacctaggcgtatatagctgctgaataacggattgagaaaaagcatcgcggaacgcttgaccatctcggtggttggttgggatttcgaacgctaccatatctcacatgcttttcttcctttgattgatggacaggcaaggccggcaagacaggatctgtccggacggacgatcgacggcgggcgatgaagggaaagaaaaccaaagctagttcccatcgaccgtccctgcgggctccgttctgtatgtagagtggtgtgcttccccgttttccattgtaatgccctatgtttctctggcgatgaagaccgcctgtacgtgcaaaaaaaccccaaaaa

SEQ ID NO: 57370 - DNA, 324 bp, Zea mays
  Clone ID: MRT4577_152315C.1
cttcatttctattctgttttaagcgccgtcaatcccgaaggagggcccggaggctcacaacctttcatatgcacaccacctagaggccatttatcatcctgtatctgcaagctgtaccggtacaccatttacaacaagttcgttagttggcaaatgaagctgggataccgccggcgccgggaaatcactggttacattatacacggcgtaattacacgccgtaggctcaggacgggaaccacaccaactgatgggttgcacatgtgtggcgtggcgcccatacgatttaggatttgatgggcctttataccaccgatcggaaaa

SEQ ID NO: 57371 - DNA, 319 bp, Zea mays
  Clone ID: MRT4577_152316C.1
acgcccacacttccgcccacgcgtccatccactcacttccaaactacaactaattcaaaacgcggaaccttcatactccaagtactagattaatcaaccaatgtacccaatatttaccctcttctaaagacaccatactatctgcctcttttatcctaagtatattaaggcctcagcactacacattacgaactgccatgcaggaatttttcaacaatttgacttataaatcgtcgtgttcaaaatacacaaatctgtcaataataatacgcattttccactgacgtgtcttacttaattggccaccccatattttctt

SEQ ID NO: 57372 - DNA, 714 bp, Zea mays
  Clone ID: MRT4577_152317C.1
aattcggcacgaggctcacgctcccctcgcctagacaagacgcctagtccgctagtcgcctccgatcgaaatcgaatcgagtcgggtgggctcgggcccggtcttgtttgttgtcttgtctcccagctaggaatagcgcaacgagatccctcgcgcgcgcggaccccggagaggccgagggagggtgacagggcgtggcagctcgaggggaatgggatcggagggacgggcctggaacggcgcgggcatggccgccggcagcggctatggcggcggtggagaggcgaaagcgaccaccacggctgtgtcggccgcggcccccgcggaggttcccacgtcggcggcctccgtcgacatctcgcttccgctcctgaagatgtcgcctcgcatcatagctctctgcaaggaattggtcgaagggtggtcgtcgattgacagctcgctcttctccatcgagaccgtgtccgggggcatcacgaatctattgctgaaggtttctgtcaaagaagacaacggcaatgagtcttctgttactgttcggttgtatggaccaaatacggacttggtgattgataggaaaagggaattgcaggcgataccatatctctcagctgcagggttcggggctcggctacttggaatatttgagaatggagtagttcagtcattcatctatgctcgaacactgtcaccagcagacatgaaagaacctaa

SEQ ID NO: 57373 - DNA, 213 bp, Zea mays
  Clone ID: MRT4577_152318C.1
accaaaaaacaacaagtttctgattggaggacaatattactccatgttatacaaactggcattttggctgcattggcacttgcagagcccttttgtagctgattttgggcgcaaagctgcagtttcaagcaaagatgtatcactatggcctatttttgaagcataaaggctttataccctaatatatttttaagctctggctatgtgcattat

SEQ ID NO: 57374 - DNA, 2828 bp, Zea mays
  Clone ID: MRT4577_152319C.1
gggcgggctcgtgcccgatcttgtctggtcctgtcttggctccccgccaggaatagcgcaccgagatcccttgcgcgcacggaccagcagatcgcgcgcgggagtgagagggcgacagggcgtggccgcgaggtgggcatgggatcggagggacgggtctggaatggcgcgggcgtggccgccggcagcggctatggcggcagcgtcgaggcgaaagcgaccaccgcggcgcccgcggacgttcccacgtcggcggcctccgtcgacatctcgctgccgctcccggagatgtcgcctcacatcatgcaagtacccccccctactctcctatctctcttcgatcctcttgcttccgctcgcacctcgggctggtctcgtgccgctgtgcgcctgtcagcagctcgtgtcatgttcgagcattcgcgagcgcgcggggcgtcgtacccgtgcccgcgaaccagccggtaaatgcctccgcgtctgcgggtgacaggaatgtgctgatgcacggaaagtctctctgatttggggattgctggtgccttttcagaggtctctgcaaggagttggtcaaagggtggtcgtcgattgacagctcgcgcttctccatcgagaccgtgtctgggggcatcaccaatctattgctcaaggtttctgtcaaaggaaacaatggcaatgattcttctgttactgttcggttgtatggaccaaatacagacttggtgattgatcggaaaagggaattgcaggtgagaatctgagtggtatttatatgctttccatagaagcagtttttttgcctttgggagtggtacaagattgtgtgttacctatagtattccacaatgactctaggcttcttgcattaccccttgtgttagtcatatttttctagtggcacgttttcaattcttctagacacataatagtaatgcttttgtattagcatctgttctaccaaatgcattgccttttgtttcatatctgtaccttttccctgatgaatggatttcatttcgttctatggaaaatgctaacatagaatgataattttaagggtccctagactgtacacgtagtataatgtacccataaaattaaatctcatttcgattctaaaatatttcctaatgcatacatctactaccgtcatggttaggcgataccgtatctctcagctgcagggttcggggctcggctgcttggaatgtttgaaaatggagtagttcagtcattcatctatgctcgaacactgtcacctgcaggtaggcatacttcctgtctgaacaacgtatcgggtgtggggtcctaatcaacttagtgcgatagtttctctattctcttttgtagttttaggtacaatttcaaatgcgacttcaaacagattgtgtttttttccctttctctatagtcagcattatccatgatttggtatgtcaatttgaagccttggatgtttggaggttttatgaaatgcttctgaaaataaatctactgatcctttgttttgtagacatgaaagaacctaaaatagcagctgaaattgccaaggagctacgcaaatttcatcaagtagatataccagggtctaaagaaccacaattgtggaatgatatattcaagtttttgaagaaagctgcagcattgaagtttgaggataacgagcagcaaaagagatatgtaaagatctcatttacagaaatacaagatgaagttaaagaacttaaggtaccttgaacttgacaatgtaccttctgatatttcgggcccattttgcttcttaaagtgatatttccttttttttgtttgggcacaaatagcagctgatccttctctggtatagtgggaacatccgtctagcatagttatgaagcaaaatattggttgtgatggtgatgggtttaggcccatactagggaactgaaactgaagataacagttactcctgccaatttcctactatctgtactttgtatttcttcatcaatgtccatgcaccttgtaggatctcttggacattctgcatgcacctgtggtttatgcacacaatgacttgctttcaggaaatctgatgctcaatgatttggaagggaagctatattttattgattttgagtatgggtcatacagctaccgtgggtatgacattgcaaatcatttcaatgagtatgcaggatttgactgtgactttaatttgtacccagataaagatgcccagtatcacttcttcaggaattatctgcatcctgatagacctagtgaggtgcaggcacaagatatggaagtgctttatgtggaaacaaacactttcagactagcatcgcacatttactgggcattatgggctcttattcaggcaaaggtatccccaattgactttgactatcttggatacttcttcttacggtatggtgagtacaagaaacaaagggactcctgcttcgccttggcacaaagtttcctctccgggctaagaaatggctagagcctgagaatctggtcaagggtttgcactgttgtacgcatactcggggcgggtacgcgttgtgatcatcgtctgctactcagaaactctattatagtggtggtagcagcctcattttgttgtatctgatggtagtttcgtcatcgcctgataggaaagtctcatgatcgccctcgggaacgcagggtggcgagatctgtacttatatttgtaataaacacaatccggatgggttctgtcctgtgcaatttgttgtgcgcataagcattccgtgtttttatacattattgtgaggaattgcataagtttttttgtttttcgattaacccacacactgcccccc

SEQ ID NO: 57375 - DNA, 652 bp, Zea mays
  unsure (1)..(652): unsure at all n locations
  Clone ID: MRT4577_15231C.1
gtgcgggnggcggncgacttcgntgagttcgaccccacgccgggcgggggggggtacgacctcgccgtcaccttcgggcgcccgctgccaccgtccgaggaaacctgctacccgtgctcggcgccctcgacctcctacgacgcaccgcaaacgcaggaggaacaacaactgcggccgtttgagcttgaggttgagaggggggcggccttcactctgggcctcctagctgtaaagcctgaacatcaacaatttatagttgatgctggtgcactacctcccctagtgaaacttttgaaaaggcagagaagtactgcaaattcaaggatggttaatagcgttatcaagagagcagctgatgcaattaccaaccttgcacatgagaatagcaacatcaaaactagagtcagaatggaaggtggaatcccaccacttgttgaattgctagaatctcaggatcttaaggtgcagagggcagctgcaggggccttgcggactttagcctttaaaaatgatgaaaataaaactcagattgttcaatgcaatgctttgccaactttgatcttaatgctgggatctgaagatgccgcaattcactatgaagcagtnaggccttgtgctattctccagtttgttttgagggcctgaattctct

SEQ ID NO: 57376 - DNA, 574 bp, Zea mays
  Clone ID: MRT4577_152320C.1
cctcgaggccggccgggacacgatgtagtttctcgccgccgccacccttttcggcttcgctgccgccgccgttgagaccgtcactatctccaactttggctacgtcggcgtcaatggctacccccagatctcctttcaactttctgttgatggagtgagctgcgcagctgatcacttcaccgccgacttactgggtaacaaatgcgataaccctgagtggactttcgacattttcgaggcacaaggccgcaagattcgcttgcaccacaccgttgatggggtcacccacactggtgatttcctcattcgcttgaacggtcctattcccaccgtgctcgaccagattggtacctccaccgccgacctcgacaagatcacgtcctagaaagttatgaaccatagatatattaatataacgtacctcacgggttcgtgtcacacacgggttcgtgtcacagttttgccaagccctcaccaaaaccactacattatggcccaaaacagcccactttggacctatatagcgcaaagaaatacaatttattattcgaaaaaaaaaaaaaaaaaagcggcc

SEQ ID NO: 57377 - DNA, 2531 bp, Zea mays
  Clone ID: MRT4577_152321C.1
gcggctttgcctgcgctcacggacggtcactggctcacgctcccctcgcctgcgtcgcctcgcctagacaagagacaagacgcctagtcgcctccgatcgaaatcgaatcgagtcgggtgggctcgggcccggtcttgttgtcttgtctcccagctaggaatagcgcaacgagatccctcgcgcgcgcggaccccggagaggccgagggagggtgacagggcgtgtccaccgcgaggggaatgggatcggagggacgggcctggaacggcgcgggcatggccgccggcagcggctatggcggcggggtagaggcgaaagcgaccaccacggctgtgtcggccgcggcccccgcggaggttcccacgtcggcggcctccgtcgacatctcgctgccgctcctgaagatgtcgcctcgcatcatagctctctgcaaggaattggtcgaagggtggtcgtcgattgacagctcgctcttctccatcgagaccgtgtccgggggcatcacgaatctattgctgaaggtttctgtcaaagaagacaacggcaatgagtcttctgttactgttcggttgtatggaccaaatacggacttggtgattgataggaaaagggaattgcaggtgagaatctgagtggtacgagattgtgtgttatagtcatattatactaacctagtaacctgcatcctatagtattctacattgggtctagtatgagccctggtatttgtcagagttatatagtgtcatgttttaaattcttctagacatagcatagtcatggtcttgtagtagcatctgtcctaccaagtgcattaccttttgtttcatatctgtaacttttccgtgagaaatggatttcatttcattctctgaaaatggctaacctgcaatgatagttttaagggttcctagactgtacacgtagtagaatttatctcggttctaaaatatctccgaatgcatacatcaattaccgtcatggttaggcgataccatatctctcagctgcagggttcggggctcggctacttggaatatttgagaatggagtagttcagtcattcatctatggtcgaacactgtcccctgctcgtacgaatagatcccgtctggattacacctatcttgtgctctacttttctcccaagggaaacagtggcaatgattttttttttagtttccgtttgtatggaaaatataaattctaggtaattaatggcaaaagcctttcgctgtggtcaccatttttcacgggtgggggtttgggggctggggtgcttggagtttttgagaaaggagtagttcaataattcatctaagctcgaatactgtcacctgcagacatgaaagaacctaaaatagcagctgaaattgccaaggagctacgcaaatttcatcaagtagaaataccagggtctaaagaacatcagttgtggaatgatatattcaagcttttgaagaaagctgcagcattgaagtttgaggataataagaagcaaaagagatatgaaaagatctcatttagagaaatacaagatgaagttcaagaacttaaggatctcttggacattctgcatgcacctgtggtttatgcacacaatgacttgctttcaggaaatctgatgctcaatgatttggaagggaagctatattttattgattttgagtatgggtcatacagctaccgtggctatgacattgcaaatcatttcaatgagtatgcaggatttgattgtgactataatttgtacccagataaagatgcccagtatcacttcttcaggaattatctacacactgatagacctagtgaggtggatgcacaagatatggaagtactttatgtggaaacaaacactttcagactagcatcgcacatttactgggcattatgggcccttattcaggcaaaggtatccccaattgactttgactatcttggatacttcttcttgcggtatggtgagtacaagaaacaaagggagtcctgcttctccttggcacaaagctttctctccgagctaaaaaatggctagagcctgagaatctgttcacgagtttatactggtgtacgcatgctcggagcgggtacgcgttgtgatcatcggctgctacccagaaactctattatagcggttgtagcagcccctcattgttgtatctgatgttaggttcgtcattgtctaaggactagtttggatactctagtatcgagctcaattcatgtgtatgagatggattcgggtgtaacttaaactaatttacacactaatccaactcaacacatgtggattggggtcaatactaaattacccaaacaaagcctaacagggaagtcacagggtagcaaattctgtacttatatttataataataaacacaatcctgatgggttgtgccctgtgcaatttgaaggtcgattattgaggtcactggtgcggcgagacaccctataactcctgtaagacctacctagcagcaggttgactttcgtgagcattgtagttatcctatggatgcacctcatg

SEQ ID NO: 57378 - DNA, 286 bp, Zea mays
  Clone ID: MRT4577_152322C.1
aaaagaagcttccgggcaccttttgggaaaggtgaaaccaaaaaaaaggtgaaccgttttgaagaaaatgttagacacaccaaagttgcccataccaattttttttttttaaattggggccaggaccaaacccctttttttaaaaaaaggggggacacctaggaacataatgtgaatgtttgtttaaagaaaaaaccttactaccaaaattgggttttttaaccttaagggggcccatgggaaacttcaatgggcgccttctaaaggaaaagggcattattttttt

SEQ ID NO: 57379 - DNA, 442 bp, Zea mays
  Clone ID: MRT4577_152323C.1
cagggctcatgccccgacgcttacatagacaccaccggacgattcatgaaattacacggcggacactgaaagcacaggcagaagggtgacaggggctaggccggagcatgcttgtgtcaaagactggtggcctggactactaccattgcgctgtacaacagagccagcgcggtgtactttgcaactgaagcgcttgttggtctagtatgctatgtcttgatggttactattgtcttacaccatctacacatgattgatcgctgagaatcctcttgaatgacaggatctatccagagagtggaactatcatatgctgttcatctagccattacaggactaactgataactaatgattaagattgtttgcatctgagacttgacaagagccttgaaatgatggcttatgataaataggaatttgtatcacctttgtgaccgggc

SEQ ID NO: 57380 - DNA, 660 bp, Zea mays
  Clone ID: MRT4577_152324C.1
ggggtaggcataagtagcacacggtttatttactcttcatcttcacaccgtcaggcggttcaggtttagcagcatagcagcgcgacagtgccccccgcccaggcttcctgcctccacggaccatggatgccggtcggagcagcaaaagcaggagctggcgagctgctacgagcgaccaagcgggtccggagtggactacggaggccggagcaccgagcgcgtgctaccgtgccacgccccgtgatggcgagccgtgccgcgcccgagaaccgagatgccgcgtccgcgacgtgatggagcaccgctacacccgcgatggagagccctatcgccgtgtcgcgaggggccgagcggcggctggaccgtggataccgcgttggggctgagctgacctatttttcgtgggccgtttttactgggtcgcgaccggggctgcagatccgcccctgctgccggatgtcggagtcaccgtgccggcttatccgcttgtggtctcccgcaagcacccagccgaacgagttttttgctattatagtattagttttgttaggcttctctttttaagtattttgtattttcaatttaattttctttcaaatagtattcgtaagttgacatattctttaaaatattattctaactctttttaactattattct

SEQ ID NO: 57381 - DNA, 835 bp, Zea mays
  unsure (1)..(835): unsure at all n locations
  Clone ID: MRT4577_152325C.1
gcgcattactaaaagactcccactcaaagtctaggtctggtggtgatcagcattcatatctgaagngttgattctcttggaagagtgtcattctcttccatacgtaggcctcgccctcttcttgaagttgatattcctgcatctggtgatggccacaagtcatctacgaggccactggagaaagagccaatgctggcagcaagaattaccgttgaggatggtatatgtcttcttctagatgtaaatgatattgaccgtgtgtgacagtctagccaggcacaggacagcagcttccaactgaggcgaaggcgacaggtcctccttgaaggcttagctacatcacttgagcttgtcgacccttttggccccaacaaacctggcaattcatctggattggccccgacggatgaccttatttttctccgtattgtttctctccctaaaggacgcaagctcttggcacggtatctccgacttcttgcccctggaagtgagctgacccgcatagtctgcatggctatctttcggcatcttaggagcttgtttgggggtttgccgtcagattctggtgctgcagaaacaacagttagtcttgccaagaccgtgtcctcctgcgtgcatcacatggagctcagtgccctcagcgcctgcctcgcagctgttgtctgctcgtcgcagcagccacctctccgccctcttggcagctctgctggtgacggtgctgctctaatcatcaaatcagtactggacagagcaactgagctactggccgacccccattctgcagccaactacagcaggtcaacccgttctctttggcaggcgtcgttcgatg

SEQ ID NO: 57382 - DNA, 262 bp, Zea mays
  unsure (1)..(262): unsure at all n locations
  Clone ID: MRT4577_152326C.1
atcacttgtaaaggtgttgcactcagacccaacactgtcatgataggtggatggattgtgttccgaggaaaaccaccaaaacctcatttggacaattatggaactccgcgcacctgngggttaagtaacagccccgaggctagaccaatcactcccgatacgataacttcagttanaacacccacgaaaacgttgtatgctacaacagcgaccttagtaaccaaggtcaccctttgtgcgcagagccttggcttagcgcttt

SEQ ID NO: 57383 - DNA, 566 bp, Zea mays
  Clone ID: MRT4577_152327C.1
cccacgcgtccgaacattctcatcaagcttatggcggttgaatcccttgtcttcgcccccttcttcgccgcccatggtggcattatcttcaaatggctctaaagatagcgacaacgttagttagtcgcaagagaaaggccgcagttctgcggctgcgaggggaatagagcagtatgtcagctatacaacatctatggcatgtgctttgctcctccacttgattatagcccccgttgtgtgtttcggtttctgttttcctggagtttttggttccaggcttccgaccatgttttgatcccataaattctcctccagccttcgagcaactgagtccatcttcgtaagtcatcagccctagccagacattgaagcatcggaaaactttaagggcttgttcgttttggtgataatccacatgtattgggtgggattgagccggtttaaatccataacaagtcaaaatacatctcaatctcacccaatacacttcaatacacatgtaatatcaataaccgaacaagccctaatagtttttagagatatggtgatgattatgatgatgattt

SEQ ID NO: 57384 - DNA, 443 bp, Zea mays
  Clone ID: MRT4577_152328C.1
gggcaaaaacatgggggcttaccatattcattttaccaatcagagctttcaataaattaaagggaccaatcagctagcctcttggctcaaatttggagctaaaacactgggttttcggaaaaatacatgtttggagtttttttacaatcacccccctaaacacactggaaaacacaacttaaaacacccactgtacatgccctgacaagggccaaaacacgcaggggtgttcaaagttcaccccttggggtccccaggagggacagcaagccggggggccccgcgcccccgcccaggacccggatcgcccccacaccagggaggccgccctccccaaacacaacaaaaaaaaaatgattccccccgtgtcctggtgttttaggcccacgtaaacaggaaatttaacgcagggagctaccgtgccgatgcatgctaaaccgggt

SEQ ID NO: 57385 - DNA, 608 bp, Zea mays
  Clone ID: MRT4577_152329C.1
ctagttccaaaacgcaagcggcgccctgttttagtaaccaaaaggatccgagcgaacttccttgacttcatctgtctaccaacctggtagcgagatctgatcggggggctagggatccggtgcgcctttacagctccacacaagactaggctgggcatggcatggaatatgtacgccctcaaaaaagctcctggtgcggtgcacatacttaacggtgtctgcacctcgctcggataagcgtctacaaaatttggacgcctctctggccagtggcataaagcacaaggacggggtcaacactaactcagagttacatagactttaatgctatggcattccactgagcacggagttctataacgactacctaaaagaaacactatgagactgtgaatagcaatctttggaccagtatgcaagcaagccagggacttgttgcgtgatcttataggaaccattaacgcaagcatgccagcaaaaaatccatcttctgttgtggcgccagcaggatgagggcgacgcagtggtccagggggcacgagcagcaactacaagactaatctgtgcgagaacttcttgaatctatgcgagaacttacaacacgacta

SEQ ID NO: 57386 - DNA, 326 bp, Zea mays
  Clone ID: MRT4577_15232C.1
ggggtgtcgtcgtccgaaacgacccgacttcagttggcagtaagcagtgtagccacaaacccgacgtcttctcaatcattcctgttagcaattagttgaccggagaagtcagccattgggtggcccttgccgtcgtcacaaatagaggcgtagagcctatatcctttagtatcgtcaatctaagtttgagtgcgctcgttggcggattgtgcgaagctggcggcgatgtagccatacgtgtactcgcactgtccaccaccggcgccctaataagcgagcctgtccgcacgcacggtttccggcccggactctagggggcgtttccc

SEQ ID NO: 57387 - DNA, 587 bp, Zea mays
  Clone ID: MRT4577_152330C.1
agcggcggccgggccgacggacacaagtcgcgaagcaacataccgaatagcataaactattccgatgagtactacgaatgaataaatatgaggaaaggatctatggatgaagatgcaataaaagtgtatatcatgcaatcgaaactaaatcatctatagaatagtaagaaacggaaccccaataactaaaaaacgaaggatatgaatgactagaaccatcagcatattatatctgaagcaactaagcggaaacccaactcttttcctcaagatctatcgaatgatattaaggaacgaagcacgacgattatatatatattcatagagaattgctatctgctattcaacacggatcatgtaaaaagcggagagctttggttccattcagacacgaatagctgacctatatgttaagcggtgagaatattcataagagagccgaatgaaatcaaaattccatgttcggctatgaattagagagcgaaaaaatagtcaaccaacgtcgactataacccctagccttccaagctaacgatgcgggttcgattcccgctacccgctccattctgcataaaaagactattcca

SEQ ID NO: 57388 - DNA, 294 bp, Zea mays
  Clone ID: MRT4577_152331C.1
cccacgcatccaaagggccatgctgggagacagattcccggcgtgcgttcaaaggccgtcaccgtatctggcgggtccctgatcagcctcatgagagccatgaacgagtaaactggagcttaaaaaactgcatggtctctggagcattctacacgctggcgcaccgcacacctgtagcgctgacacaagccatcgccgacctgaacatgagatgaaccatgatgagcttttgccatacttctagcgatacaagtgacttcgaactatatatccgaaattgctagtgcaagggcg

SEQ ID NO: 57389 - DNA, 297 bp, Zea mays
  unsure (1)..(297): unsure at all n locations
  Clone ID: MRT4577_152332C.1
acagggacgcgtggtttaagaggtcaggataagtttaagcattanatnagcgagcttggtaacctgagtcaggccaatctggttgcttttcagggttactactggtcatcctcgatgcagttgcttctgacggaatttgcagccagcagcagcttgtatgaccacctacacggtagccatcctcacgctttgtctttacaccagcacctacaacgcgggaggaaaacaaagctgggaacatatgatccacttatgaactttgacccacacagcacttgcttaccttcaccattattt

SEQ ID NO: 57390 - DNA, 131 bp, Zea mays
  Clone ID: MRT4577_152333C.1
atataaaaatcgggggtttagtctttaaacatccaaagcctcacaatacttatacataggaggatacaagtttataacaatccatacaacacccgaacatgctttcaaacaaaatctgtacaaaacttagt

SEQ ID NO: 57391 - DNA, 690 bp, Zea mays
  Clone ID: MRT4577_152334C.1
cgagttgcaagcagcttatatattacattcaaaattatagaaatactacacactttgtttgacaaatattacattccaaatgtttttacaataacagctattcttcttttaaaacttcttttgtagcttcgtttagtagttgagtcacaacttcgtccataatagcttcggccatctttgtaatttcatcttccttttttgcttcggggtcgaccaatgactcgaaaggctccgggggaggagatagttcagctatccgcctttcaagttctgcagttttttcagctgcctttgctgcttctctagcatcgtgagtatctccttcacttttctttataatttcgtgagccatccctcggccaccattttcccagatgtcggtgaaaaactttccgccaactaagctcgcctcggctgaggggtcttttgtatcttcaatagagaacgcagctttggcttgggccagaaccttcacgtgttcgcatcctgtcttctccaagatagccgcaattcccctggcacctgagaaggcgcagacatctccacggccactcaaaacttcctcaaaggcttcggtttcgccgttgatccattcgattggaccatcgggatcgcctagtacgaagttgtcctcatttgaatacgcgcccgatttggcgaaactggtttttatcttttgtacacatgcca

SEQ ID NO: 57392 - DNA, 301 bp, Zea mays
  Clone ID: MRT4577_152335C.1
cccagcacgaccaaaacccataacctgagaatggcacacttccttcgcggcaaggccgccaccgccgtcaccgggtcggcggcgctgcgcgcgtcgtgtccgacgccatggctgcggaccgcctcctcgtcgtaccaccacacgatccaggctgtaccgcgggagacagccggcccgcgcgccgaggcgcgcgagcgccgtcactgccgagtcccggcggtgctgctcactctcgatgtcgccgcgccagggaacggtattgcccaccgggacctccttaccgtcgacaggaggcagctcg

SEQ ID NO: 57393 - DNA, 269 bp, Zea mays
  Clone ID: MRT4577_152336C.1
cctcgagccggccgggagccgcacgcttcttgttgccaaagaattccctcccctagtcgccgccgccgctcgtctccctgagaggagccgggaccgaggatttggacgagttctaggaagagaatcggatttgcttgtctcagaccggtgtctgctgcctctgatgatggtgaaaggtagaaattcctgagatatgaaccgaatcacgcgtgacaacacggcaatctaggagttcacacatagccttccctcgatttacatttcatgca

SEQ ID NO: 57394 - DNA, 1568 bp, Zea mays
  Clone ID: MRT4577_152337C.1
tcgtagtctgccctaacacttacattgtcatcagtcatcgcggcctcagctatctgaatcacttgtcccgctcggtacgtagtagtagtagcatgggctgctgtggcgccgccatgtccgccaggccgcggggcatccacgaggagacgctgctgcgcgtcccgggcgcgtccgtgcacctcctggccggctcatccgacggcccggtcgagctcgcgcgcggggacctcgccgtcgtcaggctgaccaaggacgacgtggccgtggccaccgcggtgcgcgtcggcagggacctgggctggccgctggcgcgggacgagcccgtcgtcaggctcgacccactgcactacctcttcacgctgccggcggcggacaaggacgggacgttcctcaactacggcgtctccttcaacgccggcgccggcgccgacgcctccgcgctggcgtcgctcgacggcttgcttcgctccaacgcctgcttctccgcgccttcctccggggcggtggtcccgccgtccaagggctccagcagggcgcggccgcagccggggccggttgttgcgtcgggggacgggtactggaacgagttcgcgccgagggtggaaggctacaacggcgtgctggccaaggccatcgccgcgggcaccggccagctcgtgaagggcatcttcatgtgcagcgaggcctacgccagccaggtgcttctgtttctgtacgctgcccagtgcccctcccgtgctctgtggcaagtgacaagtccatccagtggagaatagctttgctgtgcgtcatgtctcacgtcccggaccattgttggttgcttgcaggttcagagaggagccgatctgtttcgcccacaggctgccggcagcgcacggagcagattcggcgacgccgctggtggcgccaacaggaacaccaagcctggagcagtcaacaagagtctcaagagggtcaggaagctgtcggagatgaccgagaagatgagccagtcgctgctcgacacggtcatctcggtgaccgggtccatggcggcgccgctgatccgctccaagcaagggcgagcattcctcgccaccgtgcccggcgaggtcatcctggcatctcttgacgccatcaacaaagtaatggatgcggtagagaacgccgagaagaagtcactcgctgcaacttcgaatgtcgtcgctggtgcagtgtccaggaggtacggcgagaacgcaggagaggcaacccaagacgcgttcgcgacggccggccacgccgtggggacggcgtggaacctcttcaagatccggaaggccgtcacgccatcgtcctccatgcccgggaacatggtcaagagcgccatcaagaacaggaactgacgtcggcaccagacagttgctcattgtgctcctcttgatgatcatatacccagaatgatcggacagtaattcaatgcgctcctcttactctggatgataatgtacccataatggcgtgtaactatcgtgtgtgcaccatcgacattaacaaatacttgttccaacaacggccgctcgcgatctagaacctagcggacgcgtggg

SEQ ID NO: 57395 - DNA, 420 bp, Zea mays
  Clone ID: MRT4577_152338C.1
catcccgcctgccaatattttaagggagccccggggcggaaaatataccaaagggaaccgaaggaaaacaaaccaaaccggccaacttaaaggcccaaaaaacgcgccctaaaacacgacccacccaaagaaacgaaaccaaagacgccaaccaaaaaagaaaaggcggggggggacaaaaaaatgacggaaccggggggcaagccgacctctaattgaacctggccaagagggccagagcgggggccaccgggggcaaagccgggacgggaccccccctggagggggaaaaggagccgcaccccttggagaacctaaagggcccgccgaacctttccaaccttggggaaaaggaagaggacctcgccaagtgaaaaaaaaaggaagccaccaagacataccccgagcccgggggggcga

SEQ ID NO: 57396 - DNA, 247 bp, Zea mays
  Clone ID: MRT4577_152339C.1
cccaaaccaccccaaaaggggggctggattttttcaccaaaaaaagcccccttaaaaaggggtcaaaaaaccccgggtggttttattttaggggcaaacccgggttttaaatccccctggacccctgaaagggggccctctgaagggccggcaaaactttaaacgggggggggcccctgccccccggggggggggaaatttttccaaaggccccccaacccttcccaaaaaatgttttgcccccccc

SEQ ID NO: 57397 - DNA, 159 bp, Zea mays
  Clone ID: MRT4577_15233C.1
tccacgcgttcgaccacttctttttccactctttcttccaggctttcgtgcactcttccgttcgggcgttcggccactcgttctttcactcttcctcccacgcgttcaaccactcgtacgtcacgcttactctatatctcgagcagcctttctataagt

SEQ ID NO: 57398 - DNA, 506 bp, Zea mays
  Clone ID: MRT4577_152340C.1
ccggccgggtacttccatggcccgacacaaagccttgtgttgtatcctctggatagaaccctggctatggtaacgtaaattcaccagatttgagtgaatcagctcgatccattctatttgggctagacataaaaaaacagacatgtttttaaaccgtaacaaacgaacggacctttaactggaacaattccgagtacaatcggacagaaacgaaggcctaaggaacgagtcgtccctccgtcgtcccggtgcaaaagtggaattttgtgtcgcctcccgaccgaatttgctagctgcatgctccggtccgccattctccagagtccgaagaagacgtagaagaaatgtccgcctgccttacactccggtcaagtctttcttgcgttgcgttgcgttgcgtcgactctccagttctttgagggcatctggtttatcctattctatcctatcctatcatatcatatactccgtgtaattagaaaaaaaaaaaaaaaaaaggggcggcc

SEQ ID NO: 57399 - DNA, 435 bp, Zea mays
  Clone ID: MRT4577_152341C.1
cctattttttccggaaagggggggggctttatatccttcatggctggcaggtagggtcaatcaatccggcctattcgggcaaaccaagaggacccttgctcaggaaactctcgggggaaggaaggaacatcccggttctctttgcgctgaagacggagacttccggagccggcagctgctcatccgtcgtccaatcagacccggaggctggcgagctctcgaacacaactgacgtcagccactttgggtactaccagcgtaacgtcgaccgtgagaacatcgtgttcactgtccataccggagtttactgaacccagacaggccagcggtagaccgttcagcgcgaatagtatacgggacactcccacaacagaaatgggctttgtgcggcggcatttagggatgatcactatcctgtacgacgtgcattaagta

SEQ ID NO: 57400 - DNA, 734 bp, Zea mays
  Clone ID: MRT4577_152342C.1
ccggccggggcggaagccatcgggattcaggacaaggtggggtggggtttcccgtccgacccaccgccgagtcgtgaccctcactcgctgaccccatccggcgattttacgcgagaaacggacaagggagttccgtgctggctgacgggacgggacgggacgcccttggacgctgcggctggatgatccagagctctgttcccggtcgatcgagtcgagtgcgttcagttttggacgggacgcgggggttggtggcatgtgcggctcctgatcagagatctcggcaggcatgcagcagcagctgaaggccgcaggtgcaccacgtccccccggctcagcatccgcggtggcgcctccgccggaggcccgctccccaggtccaaatcttgtcgggtccgagcagctgcctgttggccatgcacagcgcgacccgccggcgcagggcagcagatcgtgcctgccgcgacctgcgatgtgcacgcgccatgatcgatctggattctcgagtggaggccgtcccacgtgagcgaccgggcagcggctccccttacgaaaaaagatgaactatgggggtctgtcgaccgcgctcactggaaaccacctccggtccgcgccgcggttgtcgactggaagtctagaacacacggacgcgcgctgggcagagcatcaccgcaccggcagcaagtacactgcgctgcggatccaagtcgcgtgggtcgctagggcgtgcgtgt

SEQ ID NO: 57401 - DNA, 218 bp, Zea mays
  Clone ID: MRT4577_152343C.1
attgtgttgtctaaatttcttaaagcaggtagtatgcttgccagcatttttttattgcagagaaaaaaatgggttacattcaggaacgcatctacacttcgacccacagggacagggacgtattacccttagcattccccaccttcgaagaggggcctagcctcccaagccgcaaagggggccggccttgctcttggacccctatacaacattcatgg

SEQ ID NO: 57402 - DNA, 573 bp, Zea mays
  unsure (1)..(573): unsure at all n locations
  Clone ID: MRT4577_152344C.1
tgccgccgccgctgctgccgcggagtccgactcagaagatggctacaacaacaacgactatgacgatgacgaaggatctcagtagtcgccgtcgcgttctgtatcttcgggctttggtggtggtggtggtggtgctcctcctgctgttggcagcaagaggaagatgagcagtggcagtggtggtttcggggagctagcgagggcaattgagactttcgcggatatgtacgagcgcatggaagccgctaagcagcagcacgcggaggagatggagaggcagcgaatcaagttcctcaaggatctggagctgaagcggatgcaggcttttgtggacatgcagctacagctcgcgaggacaaagcacgccaggaagggtgacgcttcctcggatacgctcatgtctctcgctgcactgccattcctcagcagccctgcttatctctaaattggaagagttaggtaaaggaatgctttggccttaaattaggatacagtctgttggttgatgtgatagagttgttagtggattgtttatgttcttgctaagaactgtcgttgnttcatacgaaccac

SEQ ID NO: 57403 - DNA, 808 bp, Zea mays
  unsure (1)..(808): unsure at all n locations
  Clone ID: MRT4577_152345C.1
accctccgaggctctccgggtgtccacagaaacggtaaataaaaattgtgagttacttggtttaaacatatactcataagaccagataaatcaactttaatagagtttggcctagtttattttaaaatttattgaacttcgatggaaactccgatgtaccttcgtcccccgtcgacagtaaaaaaaagtttattgaactttgaaacataacatgtatggaatgaaataggtctaatatgaaaaaagatatatatattttatgatggattttagaggagataacttagatactaaatttactgttagacggtatggtggaaagattgtattgcgcctgcgcattgtgaagccatttactgtagtttgattatcggaaacggacgaactaagctagtagtaccatagcccatagggcacacatcgctgtccatgtctctgtcttcgtgtaaatctctctctctctctcttcccagcctttcgatcatctgatggttacttcaagtttgtatgcttctgaagaggagcacattttttctagctttttcaaatgcagggccgcacgtctcctgttttcaaatgcagggccgggaccttgtgtgcgaataaaacaaaacggccgcgtgcagtgtaattgatctctgtgtgtcccacgtttccggtagcggttactgtcgctgattagcgtcgggcttctccatgcgatttaatactatttcagctagtttattcgttttgattcgttcgtttgccgncttttggagatcagcggcgtggtattaaaaagctcgnncgacgtggacctgtttgg

SEQ ID NO: 57404 - DNA, 1114 bp, Zea mays
  Clone ID: MRT4577_152346C.1
ggccgcttttttttttttttttttattgtaaaccagtaaaaattccttctcatctaagaaaaaacttgagcataatgcattgcaaggtacatttaaaatttaaagacctaatacctctgtggttcgtatgaaacaacgacagtatcttagcaagcacataaacaatccactaacaactctatcacatcaaccaacagactgtatcctaatttaaggccaaagcattcctttacctaactcttccaatttaaggcttagttcggttaggggtggattgaggggattggagaatccatccctaactgaacaggcccttaaagataagcagggctgctgaggaatggcagtgcagcgagagacatgagcatctccgaggaagcatcacccttcctggcgtgctttgccctcgaaagctgcagctgcatgtccacaaaagaccgcatccgcttcagctccagatccttgaggaacttgattcgctgcctctccatctcctctgcgtgtcgctgcttggcggcttccatgcgctcgtacatatccgcgaaggtctcaattgccctcgctagctccccgaatccaccgctcccgctgcgcctcttcctcttggtgccaacagcaggagcaccaccggagcgagaagatacagaacgtgacggcgactgctgagagccttcgtcatcgtcgtactcgttgttgttgtagccatcttccgagtcggactccgcggcggcggcggcggcggcggccgccgcggcggccttatggatgaagtttgcggaagggaggtcggagccacggcggtaattgtgcagcgggagggccacgggaagcggcggcggcgattgcggcgacggggagcgcggcggcgtctggcgcctccggaacacgggcagcgcggcgcgcggcggggacggtttcttggtgccgttgagcgtgggcccgacgaggatgtcgagctggccgtagaaggaccacggcgacggcccgccacgcgcgcgctcggccttgtacttctccttgagcgtgtcgacgcggttcttgcactggatgtcggtgcgcagcgggcggccgcgcgcggaggcccccgggcgggagttgacggcgtcggcgaact

SEQ ID NO: 57405 - DNA, 862 bp, Zea mays
  unsure (1)..(862): unsure at all n locations
  Clone ID: MRT4577_152347C.1
atcgtacggagacgatggagaagaagtcggacgatcggccggcgaggaggagggatggcaaggaggagaggatgggcagggcgggcgtggtgctcatcgtgtgcctctgcacgctgccgttcctggtgttcctcttccgcgcgccggccgtctggcacaacgccgccaagctcaccgccacagccggagggttagtgaacgtctctcgtccaagcgtcgccggtggcggcgcagacgagctcttcggcggcctgctcgcgccgggctccgaccgacgcgcgtgcctgagccggtaccagtccccgcgttactacaagcactccccctacgcgccctcgccgcacctcttgcagaagctgcgcgactacgaggcgcggcacaagaagtgcggccccggcacgccgccgtacgccaagtccgtcgatcacctcagctccggcagcagcagcacggaggacgatgagtgcaactacgtcgtgtggatcccctacaacggcctcggcaaccggatgctgtcgctgctgagcacgttcctgtacgcgctcctcaccggccgcgtcctcctcgtgcactccaccgacgacttcaccgacctcttctgcgagccgttccccggcgggacctgggcgctcccgccggacttccccgtcgcggacatgtcccggctcggggcgcgctccaacgagtcgtacgggaacctcctggacggcaagaagatctccaacgacccggccaggncggacgcgcggtcgntgccgccgtatgtgtacctgcacctggcgcacgacctccggcgctcggaccggctcttctactgcacgacgaccagctggtgctggccaggtgaactggctgctgctgc

SEQ ID NO: 57406 - DNA, 444 bp, Zea mays
  Clone ID: MRT4577_152348C.1
cccacgcgtccgcggacgcgtgggttcacgttagggcccgagattcaatttttggcccgaaatgcagtttttggcccaaaattcacatgagggcccgaaattcaaaacagatttaataagacaaataaatttgaccaaaagcaaacttaataattatattaagttactagagctatgcaatgactacctcgtttacaaatcattttgttagaaagaaaaagagcctaatcaggtctaaataaagttcgtaagttcaggttattatctaatgttcataacaaaaataaaattatatcacatactctaactgaaagctacacaaacacatctaactaacattatctatagctctgtgctgtttatcaagtacatgaaagtgtggaatgaaatgtgattttaatcaacatataggccttttagtgcctctatatgggccatttcgtg

SEQ ID NO: 57407 - DNA, 363 bp, Zea mays
  Clone ID: MRT4577_152349C.1
gccacgcgtccggggacatacaacgcacactatttcagttataataacagccaaatcaacacgggtaaagatgctttttgagctctctctgtgtcgctgtttcagcaagcatattaccgtaatgctcacaagctgctattgatgttctaagaaacccatacctgttactttcgatgtatcaactatgtgaaaatcaactgtttatactcatacatcatccatatggcaaacctagcgtgcatattacgtttatcatccttgtacctcccacaatcattatgcctactacagcacatacctatgcatcattaattgacacaaataatcagggtacatcaactacgacaacttgagctagcaaac

SEQ ID NO: 57408 - DNA, 303 bp, Zea mays
  unsure (1)..(303): unsure at all n locations
  Clone ID: MRT4577_15234C.1
tagtaaagttttttttttttttggacggaaaanaaaaaaanatnttaattcttcaaaatgatgtacatggctcacttcattccccaatgatcaataaatcggccaaacaacccaacccaaccacaaacacccacatgctaacggtacataaaaaaaatgctccaaacaacaagaaactaccagttcccatctgctgatcatcattcgatcgggacccgtaacatcgccggcaacccataaaacaacatccacataatattggggctgaaatccattgtccatggcagcaacttctcttcacaa

SEQ ID NO: 57409 - DNA, 377 bp, Zea mays
  Clone ID: MRT4577_152350C.1
ggggctgctcggaattcgtgcgtcgagccacatacgccaaggagttttttgctggtacgctcttcagttgatctgggggccatgactacaagagaaagatcatgaatgactcatggcctctggaggagctagcatctatgtttaccgtcggctctgcagcggtacaaggtcaacattgggtctgagcgcatgggcactcaacaagccatggaactaaaccgacccactttaaagaatacggatgacctcggtcctactgcggacacctgtaaagacacgttcctgacgtgcgaattgctagactacttgcttgttgggacgcgtcccgaagaacctcctgcttgatgctcggacattttccaggtacatgccatacc

SEQ ID NO: 57410 - DNA, 127 bp, Zea mays
  Clone ID: MRT4577_152351C.1
gtgaataatgatctgtccatgcactccaaactctgaaagaacagatgttgcatggtacgttgaaaaaaactaagttgacactacgtatcactctttgtgcgaaaattgctagattatttcagcatag

SEQ ID NO: 57411 - DNA, 1686 bp, Zea mays
  Clone ID: MRT4577_152352C.1
atggcggaacccaccatcaaggatgtcatggaggcgctgcaatcaatcaccactgagatgtccaccctgaaggccgagatggctgtgatgaaggaaaagtcgtccccgtcattggcggacagcaggggcgctcgacaggaggggcctcacgatctcgaatgccctcccagattccagaaactgggttttccccgctacgacggcaagtctgatccgatgatcttcatcaacaagtgcgaatcgtactttcaccaacaacgcaccatggcggtggagcgcgtgtggatggcgtcatacaacctggaggatgtcgcccaactctgcgcccctgttcgaattggagtgccgccgcacgggacggtggaggactactccaaccggttccaggctctcctgccccgcgtgggtcgcctcgaggagggccaacgcgtccagctgtacacgggcggtctcctccctccgatgagccacgccgtccgcatccacaacctggagacgctcgccggggccatgagtctcgcccgacaggctattgcgggcgtccccatctgcaaatccctgcagttgcgagtatcgttgggcgcctccaccctcgtcgcgctcctcgatacgggttccacgcacaatttcatcgccgaagctgcggcgcgctgcaccggactgcagatccagccccgtccacgtctcacggtgactgtggccaacggggagcgcgtcacctgcccgacgtcatacggcgcgcctcgctcatcatcgagggcgatcggttctccgtcgacctcttcgtcatgccgctcgccgggtcggctggtgtgctggtccgacatcgcagagcggccgaggccgctggtcgctgcagccacatcaacggagggcctcctcgatgacctgctccacgccttcgagggcgccttcgtcgagccagccaagctccccccacagcggactcgggaccatgccatcgtcctcaaaccgggggctgcaccggtggcggttaggccctaccgctacccagcggcgcacaaggacaggttggagcggcagtgcgctgccatgctcgcccaaggcatcgtccgtctcaatgattcggctttcttctcgccggtgttgctcgtcaagaaacaggttggacttacgctccagaccaccaaattcggatgcggccggctgatgtccaaaagacggcgtttcgcacccacgggccacgacgacctctataagttcttggtgattccgttcgggcttagcaacgccccggcaacattccaagcgctcatggacgacgtccttcggccgatactccgccgattcgttttggtcttttttgatgatattttaatttatagcaagacatgggcagatcacttgcgacacatccgcgccgtcctcgatgagctgcgccgccacgtccacttcatcaagcggtccaagtacacctttggctccccctcggtggcatacttgggccacattatctcggctcaaagggtggccatggatccgaccaaggtgcaggccatccacgactggccggctcctcgctcggcgcgcgcggtgcgcggcttcttaggcctcgctgagtattatcgcaagttcgtccacgactacgacaagattgcggcacccctcacctcgctcctcaaggaggggttcttctggaacgacgatgctcaggcggccttctag

SEQ ID NO: 57412 - DNA, 1896 bp, Zea mays
  Clone ID: MRT4577_152353C.1
atggcggaacccaccatcaaggatgtcatggaggcgctgcaatcaatcaccactgagatgtccaccctgaaggccgagatggctgtgatgaaggaaaagtcgtccccgtcattggcggacagcaggggcgctcgacaggaggggcctcacgatctcgaatgccctcccagattccagaaactgggttttccccgctacgacggcaagtctgatccgatgatcttcatcaacaagtgcgaatcgtactttcaccaacaacgcaccatggcggtggagcgcgtgtggatggcgtcatacaacctggaggatgtcgcccaactctgcgcccctgttcgaattggagtgccgccgcacgggacggtggaggactactccaaccggttccaggctctcctgccccgcgtgggtcgcctcgaggagggccaacgcgtccagctgtacacgggcggtctcctccctccgatgagccacgccgtccgcatccacaacctggagacgctcgccggggccatgagtctcgcccgacaggtcaagatgatggggttggcccagttggctcagccccttgccctcgacgcccctcgcgccttgctggccgcgcctagcgcgcatggccctcgcccaccgctacctgcaccaccggcgggctattgcgggcgtccccatctgcaaatccctgcagttgcgagtatcgttgggcgcctccaccctcgtcgcgctcctcgatacgggttccacgcacaatttcatcgccgaagctgcggcgcgctgcaccggactgcagatccagccccgtccacgtctcacggtgactgtggccaacggggagcgcgtcacctgcccgacgtcatacggcgcgcctcgctcatcatcgagggcgatcggttctccgtcgacctcttcgtcatgccgctcgccgggtatgctttggtcttggggacccaatggatggtcacccttggccgaatcagttgggatttcatcggccgcaccatctccttcactcaccaaggtcggctggtgtgctggtccgacatcgcagagcggccgaggccgctggtcgctgcagccacatcaacggagggcctcctcgatgacctgctccacgccttcgagggcgccttcgtcgagccagccaagctccccccacagcggactcgggaccatgccatcgtcctcaaaccgggggctgcaccggtggcggttaggccctaccgctacccagcggcgcacaaggacaggttggagcggcagtgcgctgccatgctcgcccaaggcatcgtccgtctcaatgattcggctttcttctcgccggtgttgctcgtcaagaaacaggttggacttacgctccagaccaccaaattcggatgcggccggctgatgtccaaaagacggcgtttcgcacccacgggccacgacgacctctataagttcttggtgattccgttcgggcttagcaacgccccggcaacattccaagcgctcatggacgacgtccttcggccgatactccgccgattcgttttggtcttttttgatgatattttaatttatagcaagacatgggcagatcacttgcgacacatccgcgccgtcctcgatgagctgcgccgccacgtccacttcatcaagcggtccaagtacacctttggctccccctcggtggcatacttgggccacattatctcggctcaaagggtggccatggatccgaccaaggtgcaggccatccacgactggccggctcctcgctcggcgcgcgcggtgcgcggcttcttaggcctcgctgagtattatcgcaagttcgtccacgactacgacaagattgcggcacccctcacctcgctcctcaaggaggggttcttctggaacgacgatgctcaggcggccttctag

SEQ ID NO: 57413 - DNA, 635 bp, Zea mays
  unsure (1)..(635): unsure at all n locations
  Clone ID: MRT4577_152354C.1
gcagaaaaccattgacccaagtacttataacactgacgacaccggtacatcacaggcacacatcgcctgcttgttcttattacaggcacgagcatcacgttgctactatcacaaccagtcctgatgcacgccatgcctgatacgactgtattatagtagaaccagtattatactggtattagcacagccacacactgctatcaagcaccactactagtagtataatattgtagtgatataagcagggagcccagcccacactgctgctcgctcataaaaagggcggcgggagagcctggcagtggcaggcaccctgctcgtgctcggctgggctgggccccccccttttttcccccccattttatccccctagtagtggtgctttaaaccagtgtgtggctgtgctaaaccccgtaaaaacctggttttcctataaacccgtcgtaccaggcatggcgtgccccaggcctggtttttatagtaccccccttatgcccggccctgtaataaaacccacccgcccatttggcccttttatggcccggtgtcccccgttttataagaccttgggccaatgttttttcccaaaaaaaaaaaaaaaaaaaaaaanaaaaaaaaaaaaaaaaaaaaaaaaa

SEQ ID NO: 57414 - DNA, 384 bp, Zea mays
  Clone ID: MRT4577_152355C.1
ctgacattgaacatactgtacctgaaagctgactcagataaatcaatactgaacgtgcacgggtaccacaccaacgtttacatcctacatcatatcacattcttaaggcattattaacttctagaaaaatgttccttgaagaactgaacaaaatcactggtgctattggtaagacagtacaggatttagatgttgctgactttaatcttgctaaatatgattcatttaatacatcaacatcttggctacctacttctaataaactgttccaccaaactggcaaaggactatgacacttggctgatactttacatgacttcttggagagacacaacgatattgttaaaggtacagatgattctttattgcatactctttcccatg

SEQ ID NO: 57415 - DNA, 342 bp, Zea mays
  Clone ID: MRT4577_152356C.1
cccacgcgtccgtccatgtcgtgactgcatgtgccgcttgaacagaacagagcactctaaatccaaacacagtagatagtatctcatagttgcatttccagactaaccctattctttctgacatccactttagtctgttcatgcctcagttgctgtgcggcttttcacttcatcagcagtcatagtcgccagttgcgacagcattgagagcaacctattctccgtatataacggtttttccatgtatagcatatgccagaagaagcccaaattcgtccgtggagtactgaagcaattgtgatgctaagtatacatcatctgagtatgattctcaacaaccga

SEQ ID NO: 57416 - DNA, 621 bp, Zea mays
  Clone ID: MRT4577_152357C.1
attttccctaatctcgctttcttaggaacctcgcagcccaccacagacacgattgtaataactcatgcccggtcgcggcaaggtcggtcagggggtcgttgaggtcggtgcgaaactgcaacgcgaaggtgtctgtgctgactgcatccatggacatcaccaaggcagagatccggcggctgtggatgaggatgttgctccaagcgcatctcgacgctcatctactagaagacccgcggctcgctcaacatcttcctcgagaaggtgatccgcgacagcgcctcctacactgagcgcgaaccggcacgcaggaccgcgactgccgatggacgagcggctacagcgctatatatgcaagggcgcactcctctacaaggttcggggcgtacgctgatggactcctcccgatgatctccccttctgtagatgcgacgatttctggccgagccacacgagtcttgctggccagaaaggttcacgaactcttgataattcatctctgcatgtgggacgcttatctgaatcgtgacaatatgacggttatctgaatcgcgaggatagcaggtatacctgaatcatgaagcaatgagtgaattatgtgagcatctgatgttggaaatc

SEQ ID NO: 57417 - DNA, 414 bp, Zea mays
  Clone ID: MRT4577_152358C.1
attcggctcgagcgagccttcaacagacatctttctgaagagatataccgttgacctaagggaacctgcaggtacaaatatcacgtggtgaaacttgttcattcaggccctttaccaagccgcaattctcctgatgttcgattttgatcaagcaaggattctgcggctacagattgaatgccgatctcttgctgagacgataacaaatactatcatcttcaacacatgtgtatcttgccagatattcaatgacctcaatgcacaaaaacccgaggaacagaatgtcttgaaaggggacacgatgaatcacctgttcatgggaataatcggcctaacgacagtctttcagatgctgataattcagatcctggggaagtgcttcaaaataatgaggctagatggcagactatggat

SEQ ID NO: 57418 - DNA, 324 bp, Zea mays
  Clone ID: MRT4577_152359C.1
ggggccaaagccctcttatcattcggggggtgaaaatgggcacacaggcctaaccgacaacaggggggcacaaccttttttttggggagaataaacaaccccatccaaaacccggggaaggggtttgcccagataaaacccccccttggggcaaaaaaaaacattaggggcccaaactagcccctagggggaaggcttacccccaagacaaaaaattttctgctccaaaaaaaaaacaaggcctatgtccccaaaacagggaaccatcacctggcaaaacccgggggaaaggaggtttctgagcataaccaaaggaattacccc

SEQ ID NO: 57419 - DNA, 224 bp, Zea mays
  Clone ID: MRT4577_15235C.1
gagatcaagaaaacaataacggcaaacttaataaccgagtggcaaagcgggggaataaagtcttacaacgtaagtcgtgaaccacacagcgtcggatcgatacgaaccgacagagacatatcacgatcggagccactcagggcagatcacaggatagcagtggctcacaagcccgacgacgcctagccagtagagcgtttagtactcgtcaccctcgtggacgt

SEQ ID NO: 57420 - DNA, 219 bp, Zea mays
  unsure (1)..(219): unsure at all n locations
  Clone ID: MRT4577_152360C.1
attcctctgaaatgagctgttacccggctttgtagtctcccaagagtcaattggcaatggtcggtcaacttttctaacttgtttgaacaagttaaattgcccagatattttggtttggtccattccagctcaagaattcaaagctaagcattgcacaattatgctngntttgttggaaagtttttggagttaattcatatcttaagcntgagtttgctt

SEQ ID NO: 57421 - DNA, 430 bp, Zea mays
  Clone ID: MRT4577_152361C.1
ttccgagagaggcgatcactaatccccctcagtctctgggagcccatttcctggaggcgatgtgggcgactggggtgaggactgggatccggcgcatgatctccgtctctgccttggcgccgacgaaagtgaccaccgagcgccccaatggacgatccatcccccaacctcttcatgtccggcttaagtgagagtaccacaaagagaacgacttagagaagcctttgagcatggatgacgacagatttgcatgctcgacgctgagtaccagatcacgacaagcgggatttctagcgcatatggctgtgtacggtatacaactaccgaataccccggcatggaaagtatacgaaatcgatgttatcgatactgacgaacgcgaagttttgccgatacccaattcccccaataccgacgcagattacacgcg

SEQ ID NO: 57422 - DNA, 404 bp, Zea mays
  Clone ID: MRT4577_152362C.1
ggacctttgggctgctttatgtgcttgtttatgtgcatggttatgtgcatgttcacatgcctgtggatgtgcgggtcgtgctgtgtctacgagttagttgctttttcagcgtttgtttacttgatagttgtaggtcctcagtccccgctttagatggtaggttgttatttgttaggttgtacttggtgattgcttggtttcgatgtggcgatcgtgactcttcttgcctcatgcgtgttatttcgaactggcgaggtggacattcgtaagtattgattcgtttcggcctggtggactttcgagagttcactcgttaattggcctagaaatctttgacttgtatgggttaaggttgacctgtgtcttcgtaattccttcgtgtgcataatagtcagtgacaaatc

SEQ ID NO: 57423 - DNA, 590 bp, Zea mays
  Clone ID: MRT4577_152363C.1
cttcacctactcctacaactacatcaccggcgagccgccggtgtgcatgcacgtcaaggcattggacgatcgccggaactgcatcccgaaccgccctgaccagaggtcaaccgagcagtgccaattcttcaacagcaaccatgtcaactgcgacgccttcaggtgcaagaagttcgtgttgccgtcgccgccacctcctccgccttcaccaccgccaccaaccccatctcctccgccaccttcaccaccgccgccgtcgcctcctccaccaaccccgtctcctccacccccgtctccatcacccccacctccgtactacgaggtctcacctgaggaacggtacctttcgccgccacctccagcgtaccaagagccgacaacgcctccccactacgaggtgccagctccctactacgaggtgtcaccggaggaccggtaccactcaccgccacccgcagcttaccaagagtctccacctccgccctactacgaggtgtcaccagaggaccggtacctatcaccgccaccgccagagtacgaagagccgacaacaccgccccactacgacctaccagcgccgcccaactacg

SEQ ID NO: 57424 - DNA, 3942 bp, Zea mays
  Clone ID: MRT4577_152364C.1
atgccttgtggaaaggcccaggtacgtgctgccatgcgcggcgcacgtctggagggatacctcaccggcgcaaccaagatgcctgatgaggagactgtcgacaacaagggcaagaagagccccaatcctgcttttgaagaatgggaggcgaaggatcaacagatccttagctatctcctctcatctataagcagagaggtgcagattcaagtcacctcagccaagactgcggcggaggcatggcactccatcgaggccatgttcgcatcacagacccgagcccgggctgtgaatcttcgccttgctctgtcaactacaaaaaaaggtagtatgaccgtcgccgagtactacaccaaaatgaagggctacggcgatgagatggctgcagcaggaagaccgctgcaagatgaagagatggtcgagtacatcctcaccggcctggaggaagaattcctaccgatggtgtctgcccttgtcacgagggtagatccaatctcacttgaagacctctactctcagttgctgaattttgagaccaagttggatctcatgagaggtggaggcgagcagcatcaaggatcagcaaatatggctggtcgcggtggccgtggaaatcaacgtggaggcagtggtggtcgtggccagcgtggtggccgcgggtcatctcgtggtggccgtgctagttggtccggagggcgccaaagcaaccagggaggctacatcaggcgttccaacaactccagcgacgagaggccggtctgccaggtctgcttcaagaagggccacaccgcagccaggtgctggcacaggtttgaagaagacttcgtcccagatgagaagcttgctggagccgccaccaactcctaccacgtcgacaccaattggtacacggacaccggcgccaccgaccacataacaggagagcttgagaagctctcaatcagggagaagtacgctggtggtgatcaaattcacactgccagcggttcagataactctgccttcatagaatttcatccaaatttttttgttatcaaggacaaagacaccaagaacattttgcttaaggggcgatgtcacaaaggactgtatcccatccccgctacatccacaataaagaacgctcttggtgctgtcaagccctccatgtcccgatggcacaatcgtttaggtcatccatcttctttcattgttcgtcagtataagtctgaagtttttcagaagtttcatgaatttcaaagccttgttgaacgactttttgacaggaagattcttgctgtccaaactgattggggaggggaatatcagcgcttgaataccttttttaataagatcggcatttctcatctggtttcttgtcctcacgctcaccaacaaaatgggtcggctgagcgaaaacatcgacacatcgtagaagttgggctttctttgcttgcacatgcgtctatgccccttaaattttgggatgaggcatttctagctgccgcatatctgatcaatcgcactcccacaaaaattcttaatctagacacaccttttgagcgcttgtttcataaacaacctgattattcagttctccgcatttttggatgtgtatgttggcctaatcttcgcccatataactctcacaaacttcagtttcgttccaagcaatgtgtttttcttgggtatagtagcttacacaaagggtttaagtgtttagatgtctctactggcagggtatatgtttctcgagatgttacatttgatgaaaatttttttccctttgcttccttgcatagcaatgcgggtgcacgattgagatctgaaatccagcttctttcacctgatcttttaaatcctgccacatttaattctggggtagacagtttgattgatcatgcggctgatatgtctactgaccctaaccaaatttctggagacaattctgttcaagatcaggcagaacacacaccaaatatggatgtcctagcgccttcagtaccaaacactgctcctgaagctgatgcggtgcatattcctgggagtgcttcgcactcgggatctgctcctgcagcgccatcgacagctgcaccgtctccaacctgtcgtggcgactcgcgcgttgccacgcacccttcagctagccacgattatgtggcttccgtcgacatgtcccgcggcattgcgggacgggaagagagcttcttgacagctcccactaccgcgacatcaccagcgagttctgagccgtctggttctctgcctgcgaccgctgctgatgcacaagtccctgaaccgattttgggaggtgtatcttctatggaccctgcatcaactcgcccaaggacaagacttcaacaaggggtcaggaaaccaaaggtttatacagatggcactattcgatatggttgttttacttcttctggtgaaccttatgatctaaatgaagctttaggagatgttaattggaaagatgctatggatatagaatactcagctcttatgaaaaataaaacttggcaccttgttcctccaaaaaaaggtaggaacgttataggatgcaaatgggtgtataaaattaaaaggaaagccgatggaagcttggataggtacaaggcacgactagtagctaaagggtataaacaacaatatgggatagattatgatgatactttcagtcctgttgttaaacatgctaccattcgtataattctttctattgctgtgtcacgagggtggagtctatgtcagcttgatgttcagaatgcattccttcatggagtattggaggaggaagtctacatgcagcaacctccaggatatgaggattccacaaaactcaactatgtgtgcaaacttgataaggcactctatggattgaaacaagctccacgtgcatggtattcacgattgagcaataagcttctttctcttgggtttcaagcatctaaggctgacacatcattattcttctacaataagggaagtgttactatttttgtgcttgtgtatgttgatgatataattgttgcaagctccactcacaaagcaacagaagcattactaagtgatctcaacaaagagtttgcactcaaggacttgggtgacctcaactacttcctaggaatagaggtgaataaggtacgagatggtattatcttgactcaagacaagtatgcttcagatttacttaaaaaggttggtatgtctgactgcaaaccgatcagtacacctctttccactagtgagaagctatctatacatgaagggtcacctttaggagaaaaagatataacccagtacaggagtatagtgggggctttacaatatcttactttaactagacctgatattgcattttcagttaataaagtttgtcaatttcttcatgctcctactacgttgcactgggcagcagtcaaaaggatacttagatacatcaagcaatgtacaaacttagggctgcatatccatagatcagattctactcttgttagtgccttttccgatgcagattgggctggcagtgtagatgatagaaaatctacaggtgggtttgctgttttcttaggatcaaatcttgtctcatggagtgcaagaaagcaacctacggtgtcaagatctagcactgaatctgaatataaagctttggccaatgctactgcagagttgatatgggtacaaattttactcactgaaattagtattaaaagtcctagagcagctaagttgtggtgtgacaatttgggagctaaatatttgtcagccaatcctatatttcatgcaagaacaaaacatattgaagtggattatcattttgtgagagatcgggtcgcaaagaaactacttgatatagaatatgtgcctactggagatcaagttgcagatgggtttactaaacctctttcagttcggcttctggagaatttcaaagtcaatctcaacctcactcggttatga

SEQ ID NO: 57425 - DNA, 360 bp, Zea mays
  Clone ID: MRT4577_152365C.1
agtatcttactggtttggggccaaatcttgaattcaaaacgtagcagcacggaccaacagctttctgtacaaactagcttgcctttgttgtttgctggctgctgtgcccttctcttctactactactaagagaactttgtaaagctaaaggactgacattgcagaacagaccctactaatctccgataattacacagaaggttttcctgaaaggcgcgaagctgaaatggaccgcaggctgcttcatatgctgctgcatctcgacggccgtggtgactgtgtatccggctgggaacgatgtggctgacacctttgtggtccctagacgagcagctgccactgccactatccctcctatgc

SEQ ID NO: 57426 - DNA, 601 bp, Zea mays
  Clone ID: MRT4577_152366C.1
ctcaccaaagcgccgctcgagtcacggctatctgcccactaacaagcctgcatgcatcgcattcggcccatgctatcctggaccaagattacacaccaggcgtaccgcgtccttgcaaacataccaatacgcctagctgaccgtgctgccgccatgaacttacgcctatcggtcaatcaacggtgagacaatcaatcacttcgcacgccatttgctcgcacctcctgtatgcattgaggcggctcagcatccatggtggcagacctgcgcatgcggatctgtggttgcgcctgccccggaagacggagctgatgctgcagccagcacgcaaacacctcgtagtctctctctccgacgctcaacggggggaagcacatggtccgaggaggcgatatgccctgttgagcctgcctccatatgaatgaagagaacaagcagcttgtctgaaactggacctggacctgtggaatggtgaacgcttgtacctattgctgctgagtgcctgctgtggatcactgttctgactctgtgaaagtgccgtgatgtataatccttggtgtacccactgcagcgaacctactcttactgatgtagctcataa

SEQ ID NO: 57427 - DNA, 305 bp, Zea mays
  Clone ID: MRT4577_152367C.1
actctgtacgtccacagctgcgttcgatgtatgtgcatattcaaggcccgttgatggatgaacttttgtagttgtggtccataggtgtacgtatgtgggacgggcataaaaaatatgattttgatctacgtgctttgttattggcgaacaggcgagtgagtgaagagagaagccatgcctctttcgagtgaggcaagcgatgaacgagtagatgctgccattcaacacgggattcagggtctgcacctattgtttagatgagatcggcttcttgtatctacatcattgtagagaagttgtttaca

SEQ ID NO: 57428 - DNA, 444 bp, Zea mays
  Clone ID: MRT4577_152368C.1
tttttttttttttttttttttttttttttttttttttttttttttttttttttttttttttttttttttttttagggcccagatttgttgtaactaaaacgaaattatttttttgaaacgcgaaacttgtttttcaagcttagggggaagcggcctaagcacaaaatggaattaaaaagtgggcccaaagttagaaacaggagcaaaaattcgtttacctcctaaatatgaatgaaatattacacttggtattgggcacataaaatattattattcaaagtattttgtttccctggcaagtttttaatggggcaggtttggaataaattttttgaggaaattggggttaaggaacttttttttccaccatatttttgttttccgatactgaaaagcacatatttgtatttgatcatatgtacaaattggcgctttattttaagg

SEQ ID NO: 57429 - DNA, 917 bp, Zea mays
  Clone ID: MRT4577_15236C.1
gacaccaatagtttgcagcggaaatcttattaccaaattttacaagttacaaaaattttacactatatttatcagagtgattacaaaagtataagtttgaaatatatgctagctcaagtgaccatcctcagtaagaagtataagggagttacttagatttataagaaggttgagcccaccggcacttaacaccatcatcagcagcacaaaactatgacctggaataaacactaggttagtgttgttaagtggcgaccacttggcgagcatcctttggcttggcactcgttcaaattatccatcttcctgttcgtccatcagcatcatcctgtggattagcccacgcttggggtcgacttggatcatcttccgcttcacgcgattatttatcgtacctcatgagatgcatgatgcacatgtatgagcacgaatataatatagataatctatactaagaaggatgaaacactaaaaaccaagcattaattattatggatatcacatcagggcatcgactacatctattaaccaaattgatataataacactcgaacatctatttttattcctagctttttattaactctttaaactgtgtatcttaattacttgatttaccgatttatctaaatcaatcatcacaatatactcttgctaaattaataacattcattgggaccaataattctatttactctatttatagacctagttaacgggaatacgaatcaacttaccctgactaattcgacgagatagtcggaagcaagactacgggttctggttgacgtcatccaggggcctttttttcttcggtaatcaattgttgaagatcttttccttgactgaatacttttgactaaccgaacttgagaccgtgcaggatgtcccagattttctgttgtgcccttggtgaa

SEQ ID NO: 57430 - DNA, 237 bp, Zea mays
  Clone ID: MRT4577_152370C.1
acaaaaaaatccaaaaagaaaaaattcataaaaaaacaaaaaaaaaaaaaaaaaacaaaaaaaagaaaaaaaaaaagcaacatggcggcacacatcaaaatgatacaagtcttaatatagcggggcggcggctctaaaggtctatggctaaggttcccttgctttgcatgattgactgcttctacatagctgcttaacttcaattcacgggcctttttttaaaaaagtcgtattgga

SEQ ID NO: 57431 - DNA, 318 bp, Zea mays
  Clone ID: MRT4577_152371C.1
cccacggtcagggaggtggtagtgttgatgtctccctcctcaccattgaggaaggaatctttgaggtcaaggccacagctggggggaccatcttggtgggggggactttgacaacaggatggtcaaccacttgggggggggagttcaagaggaagaacaagaaggatatcactggcaaccccagggcccaccgggaggggatgaccgcaaaaaaaaaggcgaagaggactctgtcttccactgcccagaccacgattgagattgactcgctgtatgagagcatcgacttctactccaccatcacccgtgccagatttg

SEQ ID NO: 57432 - DNA, 479 bp, Zea mays
  Clone ID: MRT4577_152372C.1
tttttttttttttttttttttttttttttttggggaaaacactgatcgatcctagtgtttatatgtgtatcttctcaaaccaactcatcaaaaaagcgaagagcagccaaaaacaaggaaatcaaaacatcaagtcctagcttctataatcaaagggtataatggattaataagaaaaaaaagagaagaagggtaaatatgagaagaaccgaaacaagcagaaagaaagaatcgttgaactttcctttgatttttgcctttagggcacagatcgagatccaaagctgaacgcgcctccctcttggaggaagaccacgaccacggagaccacgccgcggaggactccccgccatggcgaggcaattctagtagccttaaagttggagtcctttgctgccacccgggcatctgcaatgacaatgcatccccctgatggctagcctcgccgcccccatctgggttggtggccagggtgaccc

SEQ ID NO: 57433 - DNA, 1626 bp, Zea mays
  Clone ID: MRT4577_152374C.1
attgggtacctcgaggccggccgggacgggcggcctcgtagcggagtcccagtcctctcgctttctccctgcgattcgcctcagcttccatccgatccgattcgggagtcgggactcgggagatagaggcagacggagagagggaagaaaggcaaggcaatcgccgcgcgcgtgcttcctgccttctcggtcggctccagctcgccgttcattcccgcaatcccgttccgctcgcggtatcgggccgtggtagtgatgccgctggctgagccgccccagtggcgccgcaaagccacggatttcttctccacatctagtgtcaagctgaagcaggcagggcaatcggccggggataatatagctgatgttgctgggaaagttgggtccgcggtgaagagtcggtgggtcgtcttccaggaggctaggcagcagcagcagcagcaacggccaccgcatgagacagtgcaagagcgtatcatcaccgctgctgccaccactggtttgcttttcaggaaaggcatttcagagacaaaggagaaggttgcagtgggaggaaaaaaaaagagaaaaaaaaaaaaaaaaagaaaaaaacaagacaggccgggagagcattagtgagctgttgcaaaaagcaaaaatatcgtctagcatcagtagcatccccctgcagtgctggccacataatggcgaataagtccgctgccgctgccattctgctcgccgccgccgtgctcggctgtcttgtctcggcgtcgctcgccgaccagggcaccgccacctactacaccgtctacactccgtcggcgtgctacgggaaccaggacgagggcacgctgatcgcggcggcgagcgacgcgctctggaacggcggcgccgcgtgcggcaccatgtacacggtcacctgcgtcgggggcaccaacgagaccccgaacccctgcaaccccggcgcctccgtcaccgtcaagatcgtcgaccgctgcccgtcgcccggctgccaggccacgctcgacctctcccagcaggccttcgccaccatcggcaacctcggcgccggcaagatcgtcatcgactacagccaggcgtaagatatatacatgcatgttgtgggaagcaagcacgaactacgtacatacatgcaaaagcttcattcaagcttatattattcggggatgagttagtaaatactaagcaataacaaatcatgtcgtattagtctcaagctacgactatacaatcctagtgcaaacaagtgatttgtttgctgaaataatgatctgcaccatacgagtgtgcgtgtataatcgtacctttggagaaaaaataaccgggcagtcgggcttatctaaaaaaaaaaaaaaaaagcggtccaaatgaaaccgtgtggagatgatcaaggtctcttctagatctctctggtgttagctcgtgctacgtattagttccaggtaggaaggtggattaccgtccgttattgttaggtataagcattttggctggaacatttttggagtaggtttgtatatatgccgctagtgttaattctccccgggactaagatctggtcatgttatagcaatataagtcttgggtggatgtaaaccagatggacacaggacacgattgtgc

SEQ ID NO: 57434 - DNA, 226 bp, Zea mays
  Clone ID: MRT4577_152375C.1
tgtaaattattgtgtgtgtgctgtctttacatacatacacatttgtgtgtgttcagaatacagtgctttgtgttcctggctgtttttgttgtacatggattcagacttcctactcttccaggatgatgtttgtatgtaaagcacatcttatggtattgccttatttttgttgctttattcatggcaaagtgtcagtttgagaatgtatgtttaataagcagacaat

SEQ ID NO: 57435 - DNA, 1176 bp, Zea mays
  Clone ID: MRT4577_152376C.1
cctcgaggccggccgggccgggactgcgattcgcctcgcttccatccgattctattcgggagctagaggagagagaggagaggagaggtatggtaatcgccttgagcgtgctctgcttcctgcctcttcggtcgcctccagctcgctgttcattcccgctccgcccgctgattcgccggatcgggccgtggcagtgatgccgctggctgagtcgcccccgtggcgccgcaaggccacagatttcttctccacgtccagtgtcaagctgaagcaggcaggccaatcggccggggataatatagttgatgttgctgggaaggttgggtccgtggtgaagagtcggtgggctgtcttccaagaggctaggcagcagcagcaacgtccgccgggcgagagtgagctgtatcaaaaagcaaaaaatatcgtctagcatcagtagcatccccctgcagtgctggccacataatggcgaataagtccgctgccgctgctattctgctcgccgccgccgtgctcggctgtcttgtctcggcgtcgctcgccgaccagggcaccgccacctactacaccgtctacactccgtcggcgtgctacgggaaccaggacgagggcacgctgatcgcggcggcgagcgacgcgctctggaacggcggcgccgcgtgcggcaccatgtacacggtcacctgcgtcgggggcaccaacgagaccccgaacccctgcaaccccggcgcctccgtcaccgtcaagatcgtcgaccgctgcccgtcgcccggctgccaggccacgctcgacctctcccagcaggccttcgccaccatcggcaacctcggcgccggcaagatcgtcatcgactacagccaggcgtaagatacatgcatgttgtgggaagaagcacgaactatacgtacatacatgcaaaagattcattcaagcttatatatattattcggggatgagttagtaaatactaagcaataacaaatcatgtcgtattagtctcaagctacgactatacaatcctagtgcaaacaagtgatttgtttgctgaaataatgatctgcaccatacgagtgtgcgtgtataatcgtacctttggagaaataaataaccgggcagtcgggcttatctaaagcaaaacaagttctataaaaaaaaaaaaaaaaagcggcccagctt

SEQ ID NO: 57436 - DNA, 2074 bp, Zea mays
  Clone ID: MRT4577_152377C.1
agccggcggtagagcgggcagaggcacacagagtctcagacacaggcacagcagacagcagagcgccccccaacaaaaacccaactcgttttcagctcgcgcaacgggcggcctcgtagcggagtcccagtcctctcgctttctccctgcgattcgcctcagcttccatccgatccgattcgggagtcgggactcgggagatagaggcagacggagagagaagaaaggcaaggcaatcgccgcgcgcgtgcttcctgccttctcggtcggctccagctcgccgttcattcccgcaatcccgctccgctcgcggtatcgggccgtggtagtgatgccgctggctgagccgccccagtggcgccgcaaagccacggatttcttctccacatctagtgtcaagctgaagcaggcagggcaatcggccggggataatatagctgatgttgctgggaaggttgggtccgcggtgaagagtcggtgggtcgtcttccaggaggctaggcagcagcagcagcaacggccaccgcatgagacagtgcaagagcgtatcatcaccgctgctgccaccactggtttgcttttcaggaaaggcatttcagagacaaaggagaaggttgcagtgggaaaggttaaagttgaagaggttgctaaaaaaactgcagataaaagcaagaatatcttgaacaatattgaacgctggcagaagggagtcgcaagcactgatgtgtttggtgttcctattgaagccactgtacaacgagagcaatctggtaaagctgtgcccttggtgctagtgagatgtgcagactacctggttatatcaggtttgaataatgagtacttattcaaatctgaaggtgacaaaaaagttcttcagcagttagtttctctttacaatgaagactctggcgcatctttacctgaaggtgtgaatcctattgatgtaggtgcactggtgaagtgctaccttgccagtatccctgagccgcttactacattttcgctttatgatgagcttcgagctgcgagggttagcattcctgatcttagggatatattgaagaagcttccaaatgtgaactacatgacaatagagtttgttacagcattgcttcttcgagtcagccataaatcatcacttaacaagatggactcccgcagccttgctgtggaatttgcgcctttgatcatgtggcggcaaggtgatgctggcacagatttgcgtaaccacctcaagttaaccctgaaaccgcctccaaaaattgtggatacaacatcaaatactgccacgtgggacctgtttgatgaggatggcgaggatgcttcatcccagatccccttggacgatgcttcacccccagactacaactccattgaggtcatccagtgtctgatcgagcatcataatgccatcttcactgatgcaaatgaaaccgtgtggagatgatcaaggtctcctctagatctctctggtgttagctcgtgctacgtattagttccaggtaggaaggtggattaccgtccgttattgttagggataagcattttggccggaacatttttggagtaggtttgtatatatgcgctagtgttaattctccccgggactaggatctggtcatgttatagcaatataagtcttgggtggatgtaaaccagatggacacgattgtgctgcatttgctgaattcggcttatacactgctgttactctagcacgctcgacctctcccagcaggccttcgccatcatcggcaacctcggtgccggcaagattgtcatcgactacagccaggcgtaagatacatgcatgttgtgggaagcacgaactacgtatatacatgcaaaagcttcattcaagcttatatatttttttcggggatgagttagttaatcctaagcaaaaacaaatcatgtcgtattagtctcaagctacgactatccaatcctagtgcaaacaagtgatttgtttgctgaaataatgacctgccccatacgagtgtgcgtgtataatcgtacctttggagaaataaataaccgggcagtcggggcttatgtaaaaaaaaaaaaaaaa

SEQ ID NO: 57437 - DNA, 191 bp, Zea mays
  Clone ID: MRT4577_152378C.1
gcgtccaaatggaccaaccatagcatccgagctgcgagtccgtggaagccggtcatactgatgagaagcgcacaggcatcgctcgccggcgataccgacgacggatgggcctcctgtaagacgccctggaggctttcaccatctgcccgcagtacgttgaaatcgtccgtggctacgccgtcattgtcctc

SEQ ID NO: 57438 - DNA, 1348 bp, Zea mays
  unsure (1)..(1348): unsure at all n locations
  Clone ID: MRT4577_152379C.1
atttattctcggcggcctagtcctctccctttccctccccatcaccttggtcttccttcctcgattcgatccgaacccatccgattcggaagagaggtggtgatgccgcttgtggaatcgcctcaatggcgccggaaggccaccgatttcttctcttcatctagcttcaagctgaagcaggcagggcaatctgcaggggataatatagctgatgttgccggtaaggttggaacagtggtgaagagtcggtgggctatcttccaggatgctagacagcgaccgccacaaccaggagatactgtgcaggagcgcttcatctctgctgctgccaacactggagtgattctgaggaagggcatttcagagacaaaggagaaggtcgcggtgggaaaggttaaagttgaagaggctgccaaaaaaactgcggacaaaagcaaaactattttgaacaatattgaacgctggcagaagggagttgcgagcaatgatgtttttggtgttcctgttgaagccactgtacaacgggagcaatctggtaaagctgtgcctctgatactggtgaggtgtgcagggcccggggtaaaatcaggcttagtgagctgttgcaaaagaaaaaatgacgtctagcatcagtagcatccccctgcagtgctggccacataatggcgaataagtccgctgccgctgccattctgctcgccgccgccgtgctcggctgtcttgtctcggcgtcgctcgccgaccagggcaccgccacctactacaccgtctacactccgtcggcgtgctacgggaaccaggacgagggcacgctgatcgcggcggcgagcgacgcgctctggaacggcggcgccgcgtgcggcaccatgtacacggtcacctgcgtcgggggcaccaacgagaccccgaacccctgcaaccccggcgcctccgtcaccgtcaaggtcgtcgaccgctgcccgtcgcccggctgccaggccacgctcgacctctcccagcaggccttcgccaccatcggcaacctcggcgccggcaagatcgtcatcgactacagccaggcgtaagatatatacatgcatgttgtgggaagcaagcacgaactacgtacatacatgcaaaagcttcattcaagcttatattattccggggatgagttagtaaatactaagcaataacaaatcatgtcgtattagtctcaagctacgactatacaatcctagtgcaaacaagtgatttgtttgctgaaataatgatctgcaccatacgagtgtgcgtgtataatcgtacctttggagaaataaataaccgggcagtcgggcttatcctaaaaaaanaaaaaaaagcggcc

SEQ ID NO: 57439 - DNA, 266 bp, Zea mays
  Clone ID: MRT4577_15237C.1
tgatgacgctcccggaaaacctaattgtcccgcttaacccgagtagaatctttagcatgacagggctttggagtcctgctcttgctagatctatgcacgcagagtcctggcactagagatgcaaaattattgcatgtagaagaacatatatgagaagagatagaggtctcctaaaaaggagtatctatgagttgagttgtgacttagctgagagagtagaagtggtgcacgcacttatcataggtgcacaaagagatggttcacta

SEQ ID NO: 57440 - DNA, 460 bp, Zea mays
  Clone ID: MRT4577_152380C.1
ggccccaagggaaagcattgattcaacacgggggggggcaaatattacaaaccaccaaggcccaacgggggccctcctaaaaaacgagaaccccattaacaaaggagcgaacttggaaacccctttttcccactcaacacaaaacgaaacccccccccacggggtgaaccaaccccaagcccaaaaaaaaccgagttaaaaaaaccaaaaacaccttcccgtcaaaggacggggcggaacaaaggcgggcttaaaaagacccccccaacctgtcaaaaaagggaatggggaacgggtccctcaaggggggggcccaaatgttaaacggcccctttccgggggggggggccctcaccggaaaacccaagaaagggaccatggggaggcccccctgcttaaattcccccaagtgaaacccctcctttttttaaagggtggcccccaagcccaaccggtcaaa

SEQ ID NO: 57441 - DNA, 1697 bp, Zea mays
  Clone ID: MRT4577_152381C.1
ccgggaaggcaatcgccgcgcgcgtgcttcctgccttctcggtcggctccagctcgccgttcattcccgcaatcccgctccgctcgcggtatcgggccgtggtagtgatgccgctggctgagccgccccagtggcgccgcaaagccacggatttcttctccacatctagtgtcaagctgaagcaggcagggcaatcggccggggataatatagctgatgttgctgggaaggttgggtccgcggtgaagagtcggtgggtcatcttccaggaggctaggcagcagcagcagcaacggccaccgcatgagacagtgcaagagcgtatcatcaccgctgctgccaccactggtttgcttttcaggaaaggcatttcagagacaaaggagaaggttgcagtgggaaaggttaaagttgcattgggttccctcgaggccggccgggagagcattagtgagctgttgcaaaaagcaaaaaatatcgtctagcatcagtagcatccccctgcagtgctggccacataatggcgaataagtccgctgccgctgctattctgctcgccgccgccgtgctcggctgtcttgtctcggcgtcgctcgccgaccagggcaccgccacctactacaccgtctacactccgtcggcgtgctacgggaaccaggacgagggcacgctgatcgcggcggcgagcgacgcgctctggaacggcggcgccgcgtgcggcaccatgtacacggtcacctgcgtcgggggcaccaacgagaccccgaacccctgcaaccccggcgcctccgtcaccgtcaagatcgtcgaccgctgcccgtcgcccggctgccaggccacgctcgacctctcccagcaggccttcgccaccatcggcaacctcggcgccggcaagatcgtcatcgactacagccaggcgtaagatacatgcatgttgtgggaagaagcacgaactatacgtacatacatgcaaaagattcattcaagcttatatatattattcggggatgagttagtaaatactaagcaataacaaatcatgtcgtattagtctcaagctacgactatacaatcctagtgcaaacaagtgatttgtttgctgaaataatgatctgcaccatacgagtgtgcgtgtataatcgtacctttggagaaataaataaccgggcagtcgggcttatctaaaaaaaaaaaaaaaaaaaagacgcggccaatactgccacgtgggacctgtttgatgaggatggcgaggatgcttcatcccagatccccttggacgatgcttcacccccagactacaactccattgaggtcatccagtgtctgatcgagcatcataatgccatcttcactgatgcaaatgaaaccgtgtggagatgatcaaggtctcctctagatctctctggtgttagctcgtgctacgtattagttccaggtaggaaggtggattaccgtccgttattgttagggataagcattttggccggaacatttttggagtaggtttgtatatatgcgctagtgttaattctccccgggactaggatctggtcatgttatagcaatataagtcttgggtggatgtaaaccagatggacacgattgtgctgcatttgctgaattcggcttatacactgctgttaatctagggaactgttgtcctgtacgttcacggttagctggtagcgtttgtcgtc

SEQ ID NO: 57442 - DNA, 2253 bp, Zea mays
  Clone ID: MRT4577_152382C.1
ctcgaggccggccgggccgattcgattcgggagctagaggagagagaggagaggagaggtatggtaatcgccttgagcgtgctctgcttcctgcctcttcggtcgcctccagctcgctgttcattcccgctccgcccgctgattcgccggatcgggccgtggcagtgatgccgctggctgagtcgcccccgtggcgccgcaaggccacagatttcttctccacgtccagtgtcaagctgaagcaggcaggccaatcggccggggataatatagttgatgttgctgggaaggttgggtccgtggtgaagagtcggtgggctgtcttccaagaggctaggcagcagcagcagcagcagcaacgtccgccgcatgagacagtgcaagagcgtatcatcactgctgctgcctccactggtttgcttttcaggaaaggcatttcagagacaaaggagaaggttgcagtgggaaaggtcaaagttgaagaggctgctaaaaaaactgcagataaaagcaagagtatcttgaacaatattgaacgctggcagaagggagtcgcaagcactgatgtgtttggtgttcctattgctgctggccggccgggagagcattagtgagctgttgcaaaaagcaaaaaatatcgtctagcatcagtagcatccccctgcagtgctggccacataatggcgaataagtccgctgccgctgccattctgctcgccgccgccgtgctcggctgtcttgtctcggcgtcgctcgccgaccagggcaccgccacctactacaccgtctacactccgtcggcgtgctacgggaaccaggacgagggcacgctgatcgcggcggcgagcgacgcgctctggaacggcggcgccgcgtgcggcaccatgtacacggtcacctgcgtcgggggcaccaacgagaccccgaacccctgcaaccccggcgcctccgtcaccgtcaagatcgtcgaccgctgcccgtcgcccggctgccaggccacgctcgacctctcccagcaggccttcgccaccatcggcaacctcggcgccggcaagatcgtcatcgactacagccaggcgtaagatatatacatgcatgttgtgggaagcaagcacgaactacgtacatacatgcaaaagcttcattcaagcttatattattcggggatgagttagtaaatactaagcaataacaaatcatgtcgtattagtctcaagctacgactatacaatcctagtgcaaacaagtgatttgtttgctgaaataatgatctgcaccatacgagtgtgcgtgtataatcgtacctttggagaaataaataaccgggcagtcgggcttatctaaaaaaaaaaaaaaaaaaacggccctaaacaaaaaatatagtatcgcatcagtatcagtttggaagagtgctgggtagattagcgctcgctattgctgctgccgcgcattttggccggaatatttttgaagtaggtttgtatatacactagtgttaactgttaattctccacgggactagaaccgggtcatgccatatcaataaaaatatatttggatggatgtaaacgaaatgtgttgtttccatcattgattgtattcagatcatataataataacaaagcctttgtccccagttgggctagactaaagttgaaatccaataaaagccacaaattatggtttagtcatgatcgcggcggcgagcgacgcgctctggaacggcggcgccgcgtgcggcaccatgtacacggtcacctgcgtcgggggcaccaacgagaccccgaacccctgcaaccccggcgcctccgtcaccgtcaagatcgtcgaccgctgcccgtcgcccggctgccaggccacgctcgacctctcccagcaggccttcgccatcatcggcaacctcggtgccggcaagatcgtcatcgactacagccaggcgtaagatacatgcatgttgtgggaagcacgaactacgtatatacatgcaaaagcttcattcaagcttatatatattattcggggatgagttagtaaatactaagcaataacaaatcatgtcgtattagtctcaagctacgactatacaatcctgcaaacaagtgatttgtttgctgaaataatgacctgccccatacgagtgtgcgtgtataatcgtacctttggagaaataaataaccgggcagtcggggcttatctaaaaaaaaaaaaaaaaaaaaaaaaaaaaaaaacaaaaaaaaaaaaaaaaaagcggcc

SEQ ID NO: 57443 - DNA, 503 bp, Zea mays
  Clone ID: MRT4577_152383C.1
ccggccgggctgcagcggagccgtacattgacctgactcattacccagatctgccgtgctcgatcttttcgtcgctacacaacaagctccggtgatcataccggctatatactgggctcgggcctgtgcttggtcagtaagcggcctacaaacaggagagcgaggagtgacccagccaaggggactgttgtcatacggtgcacctgtgctgtacgaactgcggattgacgagcctgttgcggggcactactgctgattctacgcgatgatgacaggtatctgaggatccaccgagaaggtgacagaccgacgaccactgactccattctaattgtgcttatgaaccaggtggagaaggatatgaagacgatgactttgcctgctgactacaatctatatttggaggcagtggcattcaacggctctgctaccgcagatgaacctgaccgcgctgtacgagctggcatcaacactgttaagaccttatatgctggaagcatatt

SEQ ID NO: 57444 - DNA, 612 bp, Zea mays
  Clone ID: MRT4577_152384C.1
cccgggccaaaaccctaccattaatcagtgcacaccgccctctctgagccgccgggtgggatacaccttcgtcatgaccaagcctgaccgagcaccaaaggggcctgattgcagagaccatgagccgagccgagaacaaaggcttctacctacatgcccctaaccttgtgaacgaccagaggtcgatagctgagaagcactacaccggtctcgccttcaaacccttcttaccggcctgggagactacatcatctatcgccctgtggcggccatggtctgggagggcaagagcttcaccacaactggccggaagatcattggccccaccaaccccctggcttctgagacccggcaccatccgtggcgactttgctgacgacattgctcaggaatgtcattcatggaattgacagcattgagagtgctaataaggagattgccctgtggttccccgacggccctgctgattgtgcacagcaccagcacccctggatctacgacaagtaaacatggcaaagtttcacatcaaaccttgagagccagaggaagcatgtcaccatttgtgctttagcaatgttttccaaaagatatgatctgtatcttgaaacctta

SEQ ID NO: 57445 - DNA, 259 bp, Zea mays
  Clone ID: MRT4577_152385C.1
acaacagtgtttttttgtttttttttttttggcattatgttctcttattttctttcacgacgggttttaagaagtccaacataacatgtcaaaagggccctagaatttttccagttactgacactaattggctggttggtggtgcaatttaaaactctggctattggccataggggatagggatacaccctttttctggaaggcgactgaaataaaagggcccgcggggtgagcccttttatgttaacccacatttttt

SEQ ID NO: 57446 - DNA, 486 bp, Zea mays
  Clone ID: MRT4577_152386C.1
ccctcgcgtgcgcactatgcaaacaagaacgcccctttcctctaccatctgctgaagaagcctacgaaggggcgctacatggtcctggccatggatgatgccgctgatgagcatgctgaggagcatgtcgacgagtagctgggctagaacctcaactaggccaccaagcttggtgtgacccttgatgagaccaagaataagaagaagcatgaaggagaagctggaggatatgtgcaagatcatgaacgaggatcatcaacgacgttgttgacaacgaggttgagaatgaccgggtggctgacccacctggctacttaccgacctgtcatgatacttgtgcagacagcttgacaagcaacatgaagaggctcatcatggcgcactctctcatggactctaacatgtcgagctacatgactatcgaaatgactctggaaatccccctcatgaaccaactcctggatcacctccatgctcacaccaatg

SEQ ID NO: 57447 - DNA, 512 bp, Zea mays
  Clone ID: MRT4577_152387C.1
ccgggcgctagagtgtatcatggtaggaggtttgaacgatgttcctctatgatggttggcgccacgctggtgacagagagtgagagagacggagcacgatcgggcgagtagaggataattacttgtgccatgtggcatagtatgtttagccactgcggagacggtacttgtttgtttatgtggcacaccttctacgcctgaatggaggtcatcagcaaattggccggcttctctaccacgcatccaagcatcagaccccctgcttgcaactacctaccttttttatactgacatccaaataaaatacactgggatgggttactgaatctcatgaatggtaaaactctggcattctgctcagctttaacgaacagaaacaaatagaccctatcctactatggacgaggacccatacaggtaagctcataatcacaactacaaactctttggtcaagtgatagaccagtacctggtgccctatcctgacccgttaatcacgagaccctgtggtg

SEQ ID NO: 57448 - DNA, 573 bp, Zea mays
  Clone ID: MRT4577_152388C.1
ctcgaggccggccgggatgcacgttccccaatggcagagcttgcgcccgcaatggtactcgacaccgcctcctcgtactccaccaccggcgtcacagggctccccaggaatggacaaagggcgtgatcctccttcctacgagggaagacactaggtgagacaggtccaggcgggccgatcgtcattcggcatgcgggccgcggcgtaccccaacaaggcgatctggatgcccgacagcacccctacatcgcgcatccacggtagccttcccggcgagttctgctttgatccctggggcctcgaatctgacccttcagagactgcatctgtaacgtgcacgagcaattggcgcactgtcggggtaagatgctcggcgcggcgggcatcttaatccatgagttcctgactaaaatcggtgttctcaacacacccttatggtacaccgtcgagcgagcagcagtacttcaccgacaccaccaccctcttcatcatcgaggtcatcctcatcagatgtgccgacggccggcgatgggttgacatcatcaatgccggaagcgtaacaccgaccacatc

SEQ ID NO: 57449 - DNA, 168 bp, Zea mays
  Clone ID: MRT4577_152389C.1
ggacgcgccttgtaccggggctttaagcccggcggtttttggggttactcccagggggaccgtttaattggccagggccctagggcccgttcttttcgtttttttcccttcttttttggccacgttggcgggttttcccggtaaagttttaaatggggggttcccttt

SEQ ID NO: 57450 - DNA, 291 bp, Zea mays
  Clone ID: MRT4577_15238C.1
tctttttcacctgggcgccttaagaggaggagctcgtgcacccgggcttccggggattgctcacccacaacggacggaactccatccaaataggccatctcacaggtccttcccaaggtctgctggccacgggactgggaccattccagcaacatgaggtacgtgtgcgacaagtggtaggagggctcggagactcgtgggggaacatttggagagaggccatatgaaggccgccatcgacaggctctccggcaccaatgactggggagagatcaaggagaggatgaagga

SEQ ID NO: 57451 - DNA, 374 bp, Zea mays
  Clone ID: MRT4577_152390C.1
aacgaggacacccagcgactgacagggcctggggagcaggcggcggtcgatggacggcggcggcgcacatggacggcaccacctacaaaggctacaccatcccacacaacaagcgcgggcacaccgttagcggaaagggcctgcgcgctgtgatgtggtactgggtattctacagggctaagcacgatggtgctacgctcttgcgtttgcgtcaaacttgggatgggcaagaacaccactctcatggacatggacatgggaatgaggcatcccgacattaacaggtctactattagcggacagggatttgatgcttggcatgtcacaacaactaaagattgagtgaaaaatggtaccacccttgatgggactca

SEQ ID NO: 57452 - DNA, 1536 bp, Zea mays
  Clone ID: MRT4577_152391C.1
aatgggttgagatctatagtgtcgccccacccgtccgtgctcaagcaattgcaagtaaaaggccacaattcatcatgatggcagatgaactcttcgaacaacttcagaagttcaatataggttctcaatatccttatgaaaacgagatggacctcgcattagaaagggcactctgctcgttacttgtgggggatatttgcaattgcagaatgtggcttggaattgataatgagtcctcgtcatatagggaccccaaaattatcgagtttgtggtgaataactctagcatgaacgaagagaatgatcttcttccagggctgtgcaagctcttggagacatggcttgtctccgaggtattcccaaggagcagagatacccgagggacgcagttcagactgggagactattacgacgacccaaaagttctaagctacttagaaaggatggaaggcggtggtgcttcccatttagctgcagctgccgctatagcaaaacttggtgctcaagctactgctgcgcttggtactgtaaaatcaagtgctcttcaagctttcagtaaggttttcccattgatagaacagctagacatgtcaggcaaggatatcccaagtgatgatcttgataaatctcttgaaaaactcgcccaaggaagtgttgctggagacgctatccatgattccagaaatgacgccttgaagattatctctgctggtacactgcttgcactatttgcagtgttaggtctcaagtgcttgcctcgtaacaagtcacttcctgctcttaggggcgagtatgggtctgtggcggttgttgactccattgatggtccagcggcagatgaagagccactggaaatccctaggatggacgcgaagttggctgaagacattgttcgcaggtggcaaagcatcaagtccaaggctttggggccagaacacactgtcacggcattgcaagaggtcctcggcggcaacatgctgaaggtgtggacggaccgagccgcagagatcgagcgccacggctggttctgggagtacgcgctctccggcgtgacgatcgacagcatcaccgtctccgtggacggccggcgggcagcggtggaggcgacgatcgaggaggtgggccggcttaccgacgtgaccgaccctaagaacgacgacgcgtacgacaccaagtacaccgcccggtacgagatgacctactccaggccagcagggtggaggatcaccgaaggcgcagtcctcaagtcgtaggtagaacggctgtgcttgtgcagctgcagcaggagtaggcgagtagcggtaagctcgattcccattcttttcttttcttttggcagcgtgtgtaaataaacagtgtgagcactggctcgttccagtactagaaagcttggttaggttgctgagtgatgagctcctgaggtcgaaatttgtcatgtagtttttattgatagataatttggtgttactattgctgggtcagatcctctgagacgattgatcctaatgatggcggcagtgcatcactgcttaccac

SEQ ID NO: 57453 - DNA, 298 bp, Zea mays
  Clone ID: MRT4577_152392C.1
gggggagagctggggtggaagtggtcattcgctcactgattttccttttgaaactgatggctctgccccacagagctatttggctgtcttgggaagagcgatctttggggacaataaagagtctccatccacgcaccacctgactaatgaggagtttgtgagccctccaggggggccctgccctgtcctgaggtgggtcttctccagcctgagcatgtcttgtctcttgtttcccaggaagcgtcagcccccgtagcacctctgttaccacgacttctagtgcctctgttaccaccac

SEQ ID NO: 57454 - DNA, 1754 bp, Zea mays
  Clone ID: MRT4577_152393C.1
gggaatcgcaccggcagggccgcggccggcgggcgtcgcacttctgcgacgaggacggctacgacttaccttcgtcagcctacgatgcgacgccgcgccaaaacgaggaatcctctgaagacaacgacgacaccagcgacgcaacagcggaggacgaaccagagagggatacggaagcaggcgagcaggaccaatggcaaggatcaatgccttccaagtttcacctataccagctctccgtgcagcaccgagtggatccgtactgatgcaagaaggacagcaattggcttagacttggatcttgagtcacttgagtggtgccttgaaaacaacctaagcaagattggagctgatgggtattcaagaatgttgcttttccatggaaatgttctacaaccaatggaatcccgtcttgtcaagcaaaagtttactaatcttgtgcatggtctagatttgaacagcaacaatggcacaggaagtaacagttgcaagcagatgggtcttgctgactcgaagtgcttagccaatctgaccatgtcagaggcagattttcctgcaagggatattatctgtgcattcaactacagctgctgttgcctgcatagtagaaaggacttggttttatatttcaggcatgtatgcagtgtgctctcggaaagaggtggtatatttgtaatggatgtatatggtggcatatcatctgaacgcaagttacgtctccagcggaaattccccagcttcacgtatttctgggagcaagatgagtttgatatcatcagtcgccaaacaaggatcagtctccactttcaaggcggaaagaaacagatgctgcgatatgctttcacataccattggcgcctatggtcgattccggagatcaaggactgcttggaggaggctggattcaagtgggtccacgtttggatgagggagatgccaaatacccagtcaggtggaaacgccaaggagtataacgccaaccgggacgtgaagtacgaagaatcgcagcatttcaaccaaggagatgcttggaacgcctatgtcgttggagtagcaaatgtctagccggtacgtgctgaattctgctacgaaaatgtgatggtggctctcagtttcccaggttcgtggacgcttccgctttgatcacaactcctgcatcgcgttgctgcggaggaagtatgcagcaggctggctattaccggacccagagaacttttactccagaacacggcctcagtgatgtttctgttttcaaaatgaaatgctggcaacgtgacatgcctttgaatgtatttcttacggatgtttccgggtccgttccagacgcggcagacttttcgtttggttaaaaggctggacgctgctttggaccacttcagcggaccgctaaaagataaactgatgcagcagcttgtttttgagttttgtctgcagccgcacagtaatagtgtgtttggtttgaggaatcagctggtacatcatcttctcactcctcactatttttgtttggtttgtggaatagaatgagttgattcatcaccatctcattcctcatagttagttagttagtattaatattaggaatggagtcattcccccaaatctgaggaatgaacacatgatgcaccaccttaatttggatggagtgattcctcaaaccaaacactctataagtgtgggtgcccatcctaaacaaagtgttgacagattcttacttttcgttgtaaagaagacggcagattcctgttgccttc

SEQ ID NO: 57455 - DNA, 420 bp, Zea mays
  Clone ID: MRT4577_152394C.1
tccgtgacgctttttttcatcaaggaacaaaaaaaacctaacgagggtctttttcacagccctgtgtgtggcaggcaccaccgcactccgacgctcccagcgcggcggaggatcaaggtgagcagcctcgaccactcactctggccctcaacgactactccttccctccttatgtagggcccctaattcctggactaccacccccatggaagatggctgcaccgtgccttcaccttattacttcaagtagctgtccatgctcttcatccccttcagcccttttcgctggttcttcacgcatttcttgtcccgcacctggtaccgttccgtcgtgaaatctgacaaccacataccctggaagacaaatcggagggtcttgtccacgttcttagcccttttcctgggccggtggggcagctt

SEQ ID NO: 57456 - DNA, 2233 bp, Zea mays
  unsure (1)..(2233): unsure at all n locations
  Clone ID: MRT4577_152395C.1
aacattgtatgtaatacgcaacatagaatatgtttgagtgtaatgtttttcccatttgagcaatataattttctgttggtgtcccagttcatttttctgcagctatatgttatgtttgatttaatttggtatggacatgtactaagctaatatatttaagacatttaaagtgagcaactcacaaagagttgccatctatggagtgaatgagatatattagtttgacctggttttatatgtcttaaatatctttagttctttcgaaatttgaaatttaagttggatctttactagtgcataaagattataatatcgccatgacactttgcgtttagtgtccatcaagcttactagtcttataatttgtgcccttgtgctttgcaagttgatacattgtattttgcagttgcttaaacagagtagagcagtactaaatctttaattttctccccgggctgcaagctgttatgtaaaaccttgattgtccagttctgcttactagctccagtttccaaataaagcgctgctctttgtctccagatttcagacccaaaatcgatgggcaaaagcggaaagaaaccgagggaatcgcaccggcagggccgcggccggcgggcgtcgcacttctgcgacgaggacggctacgacttaccttcgtcagcctacgatgcgacgccgcgccaaaacgaggaatcctctgaagacaacgacgacaccagcgaagcaacagcggaggacgaaccagagagggatacggaagcaggcgagcaggaccaatggcaaggatcaatgccttccaagtttcacctataccagctctccgtgcagtcgccgaagggggacatcagctacttgcagaagttcttcctgatgtatgtcggcgggcgcgcccctctccacctgcaggaggatttctgtggcacggccctcctcagcaccgagtggatccgtactgatgcaagaaggacagcaattggcttagacttggatcttgagtcacttgagtggtgccttgaaaacaacctaagcaagattggagctgatgggtattcaagaatgttgcttttccatggaaatgttctacaaccaatggaatcccgtcttgtcaagcaaaagtttactaatcttgtgcatggtctagatttgaacagcaacaatggcacaggaagtaacagttgcaagcagatgggtcttgctgactcgaagtgcttagccaatctgaccatgtcagaggcagattttcctgcaagggatattatctgtgcattcaactacagctgctgttgcctgcatagtagaaaggacttggttttatatttcaggcatgtacgcagtgtgctctcggaaagaggtggtatatttgtaatggatgtatatggtggcatatcatctgaacgcaagttacgtctccagcggaaattccccagcttcacgtatttctgggagcaagatgagtttgatatcatcagtcgccaaacaaggatcagtctccactttcaaggcggaaagaaacagatgctgcgatatgctttcacataccattggcgcctatggtcgattccggagatcaaggactgcttggaggaggctggattcaagtgggtccacgtttggatgagggagatgccaaatacccagtcaggtggaaacgccaaggagtataacgccaaccgggacgtgaagtacgaagaatcgcagcatttcaaccaaggagatgcttggaacgcctatgtcgttggagtagcaaatgtctagccggtacgtgctgaattctgctacgaaaatgtgatggtggctctcagtttcccaggttcgtggacgcttccgctttgatcacaactcctgcatcgcgttgctgcggaggaagtatgcagcaggctggctattaccggacccagagaacttttactccagaacacggcctcagtgatgtttctgttttcaaaatgaaatgctggcaacgtgacatgcctttgaatgtatttcttacggatacgatgtgtaggatatgatgggtgcttcgacggataccgatactacctttcatgatagcttcgtatgcattaggggttggtatgcgattcgtgtttgggcgattgatcgtccggttggcgatcggtcatacatctttctaccaaacggaactttcccgctataaaaagcctttcagcctattgtaccgaaaaaaaaaaaaaaaaaaacccgggggggggggggggaaaaaaatngatgg

SEQ ID NO: 57457 - DNA, 394 bp, Zea mays
  unsure (1)..(394): unsure at all n locations
  Clone ID: MRT4577_152396C.1
acactgagagtatccatactgtgtgcgtgtttttgtctatcgctggtggtgtcctgtctctctgtgcgcctttcttcgttcggcctttgcatgtttttctctctctgtcgtgccctcttgcgtgggtttcttgggcccgtttcgccttgttcactgtcgtttttcctttgtgtggttgcgctctgtctgacttgttcatttctgaaccctctgcttccctttgctttgtcgtctctttggcttcctggtctccccagctgctgnttttgctggtctgtggtggtggttccccttcccctgctgtctttctgccttgttgttgggctgatggccgcctgnttggggccttgtgtcccttcggttctggtggcttcgtcccgctgttgcttgctct

SEQ ID NO: 57458 - DNA, 380 bp, Zea mays
  Clone ID: MRT4577_152397C.1
acccgaacctcagcattcggctcgaggcaatttctttgctgactcagctaccacacgggatgggttaacttgttagggggggcgcacaattcagcccaaatgccaagtacaatgaattgtcaaacaactgacaccaggtgtagtaacatcaataatttcaacctaacatactttgaacatgttaagatgaggaaaggctgtcctatgaaattaagaactaagctatctacatactgaagcatgaagagactctttaccgagatgaaacaggggcaatataaatatcatgacgcaaaaattgacttcaatctaacgatgcatgagcctcctgtttatgtaaatcacgagagatgtatggcagtgtcagctgttaaggatat

SEQ ID NO: 57459 - DNA, 1583 bp, Zea mays
  Clone ID: MRT4577_152398C.1
cattgggtacctcgaggccggccgggatcatattcccacctcgcgaacgaggacgaactgctaccccctcgcctcgccctcgccgcctcctctccagttctcccccaccaaccgcagcagcagcgagactgagaatggccgcggcgccgtcgtccctcgtgtcctcccatctctcccgcctcgccgcgcccagcgcgtcgtcgccatggctggatccggcaagttcttcgtcggaggcaactggaagtgcaacggaacaaaggactccgttagcaagcttgtctctgaactgaatgctgctaccctcgaaactgatgtagatgttgtggtggctcctccattcatctatatcgatcaggtcaagaattcactaacgggtcgcattgaggtttctgctcagaatgtgtggattggaaaaggaggagcctacaccggagagatcagtgcagaacaactggtggacatcggttgtcaatgggttatccttggacactcagagcgtagacatattattggtgaaaatgacgagtttattgggaagaaggctgcatatgcattgagccaaaatgttaaggttattgcctgcataggagagcttctagaagagagggaagcagggataacttttgaagtatgttttgagcagatgaaggcttttgcagatagtatttcaaactgggccgatgttgtgattgcatatgagcctgtttgggctattggaaccggaaaagttgctactcctgagcaagcccaggaagttcatgctgctgtacgcgattggttgacgaccaacatatcacctgatgttgcctctagcacccgaataatctatggaggttctgtgaatgcagccaactgtgcagagctagcaaagaaagaggatatcgatggttttcttgttggtggtgcctccttgaaggccccggacttcgccaccattatcaactcagtgaccgccaagaaagttgcagcctgatggaccaccctgtgaagaaataagaggccatcaccgtgtcgcctcatctgccacgccttaaagcctgtaggaggcgtcacctcctgtttttgctgatttgcagcacggggacagaaaataatgttttgctctcgtggatctgcacgtgacgaggagagttcagttgtcgtgagcgatgtacgttgggaatattgttatgtggtccttttctaaagaaaaaaaaatgttgacagtcaaggagaaatgtaagcgtgtttttttttaacagagaagctacatcttactgtgaaaaaaaaaaaaaaaaaaaaaaaaaaaaaaaaaaaaaaaaaaaaaaaaaaaaaaaaaaaaaaaaaaaaaaaaaaaaaaaaaaaaaaaaaaaaaaaaaaaaaaaaaaaaaaaaaaaaaaaaaaaaaaaaaaaaaaaaaaaggggggggcgctttttgaagggttaaaattttattaagggggggtttgggaattttttatttttttttttggggggaccttaaattaaatttattggggggtttttttaaaagagttggggtttggaaaaaactttgggttttccaaatttaattaattttgggaaaaaaatcctttttt

SEQ ID NO: 57460 - DNA, 500 bp, Zea mays
  Clone ID: MRT4577_152399C.1
ccttccttttttcctattttatccattattttttcttttctgttttgtggaaacataaccccccgaacaaccacaaaaaaccgaaacccgtaaaaaaaaccacacaaatcaaacaacccccatccagccgacccctttcactcatcacaaacacataaaaaacacgggaaaaaaaaaaacacaacaaattaaccaaaaaaaattttcttacacaaaaaacaaactaaagcgacagagtaaaacctaatcaatttataaccccctctatcccaaaccaggatcaaaccaaaaccaaatctcttactctccacctcccatataaaaataaaaaaaccacttgtcaccctttaaaaaaaaaaatccccccctcccaataaaagaacctattcttcaagaaccaccaggatctattttattcaaccataacaaccaaaaaaaaaaaccgctcttcaccccttgctccaaaaaaatgtcaaaaaaactctaacccgtatcccccc

SEQ ID NO: 57461 - DNA, 646 bp, Zea mays
  Clone ID: MRT4577_15239C.1
gccggccgggtcgggttttaaaaaaaactaaaataagaaaaattcggaatcctcaccccgcgcacaccgcagccggccggggtgccgcccccaatgggggctgactgggcgtgggagatgtgggccgtgaagcacgtcggcccctccgggaagccggtccaggctgcgctgctgctcaactacgccccctccgggccatctcggctccttcccgtcgtagcaagagagaagacaactttcagcttttgatatgcaaccattcctggactttgtcaagaggggcaatctgcagactgaattcttttctgttgggccgacctatgtgtgaacttaattttgtttatatgacatgtcaaattgattgccattgttgtggccagcaatttgtgacagaaaattatgatttgtacatttggtcacgtcaatccatgagaactggttttgcgtaaaaaaaaaaaaaaaaaatttgcggccaggtgaaggagtaatagctatgcagattggagcttacttgatagtctctatgtatgtactttttcttcaactttcaattcatggaaattggttgccatattttttaacatattgctatttaattcataccagtttcttaatttacaaaaaaaaaaaaaaaaaaaggccccta

SEQ ID NO: 57462 - DNA, 257 bp, Zea mays
  Clone ID: MRT4577_1523C.1
atcttctttctccttgggggggggggggggggggggtacaaagagatcaaaagaagcgttggtggcgatgcttttctaatgaactatcatggcatggttgccaaggcacgttgtttgaaaggccgacaaggcgacaacgcttttatcgagttaaatatccagcatgggtcgcttcaaaccaaccaacaaatcaatcataggaaacaattaaccaataagcaacagcaaattggctactgcagctagatgcatccacc

SEQ ID NO: 57463 - DNA, 1348 bp, Zea mays
  unsure (1)..(1348): unsure at all n locations
  Clone ID: MRT4577_152400C.1
tgagcaagcccaggaagttcatgctcctgtacgcaattggctgaagaccaacatatcacacgatgttgcttctagcactcgaataatctatggaggctctgttcaaggataagaagccagtcaaggtcatcaagaagaactcggctgcagtttccatgcatgacaactgaagttaataggtttcctttgctttctagggtttctttagccatgttattagtcttgacctgtctaggcatgtaccaatatttcatggcaaatcttatatcccaagnnnnnnatatgctcaacaggccgcacttgaataaatcttatatcagtttgaggnnnnnctccaagctgaaagagaggaagctgctaggaagcaggaagagttgcaatctgtttgatgccttttctagaacatatctgtggttagaactttgtcagaactacgtgcaatctgtttcaatgcttcaaacctttgtggtggaacctttgtatgtttgaacctctgttgtggaagaactagtgtgctggaattgtgtatgacatgtgatgagaatgttgtgtatgatagcttttctgtgcgtanacatattattggtgaaaatgatgagtttattggaaagaaggctgcatatgcattgagccaaaatgttaaggttattgcctgcataggagagctgcnnnnnnnnnnnnnnnnnnnnnnnnnttttgatgtatgttttaggcagatgaaggcttttgcagatagtatttcaaactgggcagatgttgggattgcatacgagcctgtttgggctattggaaccggaaaagttgctactcctgaacaagcccaggaagttcatgctgctgtacgcaattggctgacgaccaacatatcacctgatgttgcctctagcactcgaataatctatggaggttctgtgaatgcagccaactgtgcagagctagcaaagaaagaggatattgannnnnnnnnnnnnnnnnnnnnctccttgaaggccccggacttcgccaccattatcaactcggtgaccgccaagaaagttgcagcctgatggaccaccctgtgaagaaataagaggccatcaccgtgtcgcctcatctgccacgccttaaagcctgtaggaggcgtcacctcctgtttttgctgatttgcagcacggggacagaaaataatgttttgctctcgtggatctgcacgtgacgaggagagttcagttgtcgtgaccgatgtacgttgggaaaattgttatgtggcccttttctaaagaaaaaaaaaatgttgccggtccaaaaaacccaaaaaaaaaaaaaaccaaaaaaaaaaaaaaaaaaaaaaaaaaaaaaaaaaaaaaaa

SEQ ID NO: 57464 - DNA, 1326 bp, Zea mays
  Clone ID: MRT4577_152401C.1
cgaggacgaactgctacccccctcgcctcgccctcgccgcctcctctcccgttcccccaccaaccgcagcagcgagagcgagactgagaatggccgcggcgccgtcgtccctcgtgtcctcccatctctctcgcctcgccgacctccgccgcgcggcggcgccggccactcccaccgtcccacagcagcttcgcgtcggctgctcgcgccgccgcgcccagcgcgtcgtcgccatggctggatccggcaagttcttcgtcggaggcaactggaagtgcaacggaacaaaggactccgttagcaagcttgtctctgaactgaatgctgctaccctcgaaactgatgtagatgttgtggtggctcctccattcatctatatcgatcaggtcaagaattcactaacgggtcgcattgaggtttctgctcagaatgtgtggattggaaaaggaggagcctacaccggagagatcagtgcagaacaactggtggacatcggttgtcaatgggttattcttggacactcagagcgtagacatattattggtgaaaatgacgagtttattgggaagaaagctgcatatgcattgagccaaaatgttaaggttattgcctgcataggagagcttctggaagagagggaagcaggcaaaacttttgaagtatgttttgagcagatgaaggcttttgcagatagtatttccaactgggccgatgttgtgattgcatacgagcctgtttgggctattggaaccggaaaagttgctactcctgagcaggcccaggaagttcatgctgctgtacgcgattggttgacgaccaacatatcacctgatgttgcgtctagcacacgaataatctatggaggttctgtgaatgcagccaactgtgcagagctagcaaagaaagaagatatcgacggttttcttgttggtggtgcctcgttgaaggccccggacttcgccaccattatcaactcagtgaccgccaagaaagttgcagcctgatggaccaccctgtgagaaataagaggccatcagcgtgtcgcctcatctgccacgccttaaagcctgtataggaggtgatccgtgtgatggtgtgcccgtcacctcctgtttttgctgatttgcagcacggggacagaaaataatgttttgctctcgtggacctgcactgcacgtgacgaggagagttcagttgtcgtgagcgatgtacgttggggatattgtgatgtggtccttttctaaagaaaaaaaatgttgacggtcaaggagaaatataagtgtgtttttttacagaaaagctaaaaaaaaaaaaaaaaaagcggcc

SEQ ID NO: 57465 - DNA, 2155 bp, Zea mays
  Clone ID: MRT4577_152402C.1
ccggccgaccgacgcgtccggtctgattactattagcgattggttgtcttagatagggtgtcgggtgtccaatgttttggttggttttttttacaggagagacccacgcgtccgcccacgcgtccggacgatagagaaggagctcaaccggcgggcggcggagacggcgagcaagcagcagctggagggcatcaggaaggtggccaagctccaagctgagtgcaggaggctgcaggccgcggcacaacggagggcgtcctccgtgaacgtcgagctccggcgttctccgagctcggcctgcgtcgagtcgctcacggattgccagtcggactgctccgactcatgggcctcggccctcgtcacggagctcgaccagttcaagaaggacaagagcggcgcgagcaccaggacagcgagcctcgtggccgcggacatcgacgtgatggacgacttcctcgagatggagaagctcgcctccgcgaacggctcgtcgaaaggcgacgccgtcgaggacgcgagcgggcaggtggagaaggcgctgcacgaggctcagcgcgagctgaggacttgccgccgccgggtaatggtggcagaggagagatcagctgagctacagcggcagctgaaccatgccaatggcgacaaacacgccatggaggcggaggcggaagctgctgaggcgaagggaagggagcttgagggcaagctcgagctcgcccgtgccgatatcgcgggcttgctggacaaggggcgcatcctggaggaacggctcgagtctgagaaggcgctgacacttgagctcgcagccaagtaccaggacatggagacgctggaggcagagaagagggagctgaacgctcagctggagacgtcacggtccgaagccaagaagctcagcgacaagatcgccctgatggagaggaagctggaggtggagaaggccctgtcgatccgactggcgacgaaatgccatggcgttgatgctctggaagcaaagaagaagggcgtcgagctcgagctggagtcggcacgcgaggaaatcgcttccctgcgaaacaaggctagtagcttggaactgcacgtcatggtggagaaagcgtcgtccgctggactcgcaatgcggtgccaagaactggaggagcttagatcccagcttgtgtcttcaaactcacggatcgttgagctgaacgagaaggttaaaacgctcgaggatgtgatcgagaaacagaggccagtgacggcggaattggagtctcagctccagtcgagacacgacgaaatcagcagcttgaaggaggacataagcctgttgcagaagaagctggagtcccagaagaacctgtcgtcagcttacatatctgcgctgggcgcttctgaaaccgagaagaaagaactggctacccggtttgaactcggagagaaagaggccgaggaattgcgcgggaagacgagtttgctggaggaacagatccacgaagagagggcacggtcatctgagtttgcggtaaaatgtcggaagatggaggaacagttctcccgcagatctcttcttggccaccaaccagtgaaatcttcggcgatcaaagatattcagataagaaaggagacagagctggccaaggctgccgggaaactggccgactgccagaagacgatagcttcactgagcagccagctgaaatcgttggccgatttcgacgagttcctccctgaaaccgagactagtggcgccgactcagccgacgcctgggacggcgacctgaagctgctccaccctgcaagctatcccacgcagattggctgtttggcagtcacatgagtcacgatcctcgttggcaggtgggcggagaaactgtttttgttcgggttccaccgcatgattgctgtggtgagattgccatgatcttccaccacatgccatatagagttaagtttataatagtctataggtgagaaaatgttcatatgaaagctgtttatagagttggttggtgaagcttcaaaggaactcataaactttgatctcccattcttcctgtcccttggaaacggcttttaaccaccagcatgtgttccatcttgattgtcttccggctattttatattctgcaggagttcattgtgcaatgaaatgaatggaatattcagttagatc

SEQ ID NO: 57466 - DNA, 1318 bp, Zea mays
  Clone ID: MRT4577_152403C.1
ggccgcttttttttttttttttttctccttgtccgtaacatttttttctttagaaaaggaccacatcatcccaacgtacatcgctcacgacaactgaactctcctcatcacgtgcaggtccacgagagcaaaacattattttctgtccccgtgctgcaaatcagcaaaaacaggaggtgacgggcacaccatcacacggatcacctcctatacaggctttaaggcgtggcagatgaggcgacagccaacaggctgatggcctcttatttcttcacagggtggtccatcaggctgcaactttcttggcggtcactgagttgataatggtggcgaagtccggggccttaaggaggcacccccaacaagaaaaccatcgatatcctctttctttgctagctctgcacagttggctgcattcacagaacctccatagattattcgggtgctagaggcaacatcaggtgatatgttggtcgtcaaccaatcgcgtacagcagcatgaacttcctgggcttgctcaggagtagcaacttttccggttccaatagcccaaacaggctcgtatgcaatcacaacatcggcccagtttgaaatactatctgcaaaagccttcatctgctcaaaacatacttcaaaagttttccctgcttccctctcttctagaagctctcctatgcaggcaataaccttaacattttggctcaatgcatatgcagccttcttcccaataaactcgtcattttcaccaataatatgtctacgctctgagtgtccaagaataacccattgacaaccgatgtccaccagttgttctgcactgatctctccggtgtaggctcctccttttccaatccacacattctgagcagaaacctcaatgcgacccgttagtgaattcttgacctgatcgatatagatgaatggaggagccaccacaacatctacatcagtttcgagggtagcagcattcagttcagagacaagcttgctaacggagtcctttgttccgttgcacttccagttgcctccgacgaagaacttgccggatccagccatggcgacgacgcgctgggcgcggcggcgcgagaagccgacgcgaagctgctgtgggacggtgggagtggccggcgccgccgcgcggcggaggtcggcgaggcgggagagatgggaggacacgagggacgacggcgccgcggccattctcagtctcgctgctgctgcggttggtgggggagaactggagaggaggcggcgagggcgaggcgagggggtagcagttcgtcctcgttcgcgaggtgggaatatgatgcccggccgg

SEQ ID NO: 57467 - DNA, 579 bp, Zea mays
  Clone ID: MRT4577_152404C.1
actcctatgggcgattgggatcctcgaggccggccgggacacgcgtagtgcgggaaatgccggcggcggcggccatgacgacgaggcgggtggtgctggaggtgctacggtcgccctcccgggactacttccggcggccttctccttctcgtcgagggcgcccgagtccaccatgcacaacgcgcccgtcacgaagcccctctaccaccaccaccacgaacacgatgaatgtggcgcagatgtacaggacgatcgtcgatatgatttcacaggccggcgactagcgacgactattgatgacgaactacgacatttcgacgatcctattcaagtaaatatcgcaaaagagaatggaggaagattgacactgagactttcgagaacctgtgccaactgcacacgactgattatatatagagcatgctctaggaagcatatatattgccaggaagctctcttgccctgcttgtctatggtctacagcaatgaatgcttattccttgagctaaaacatagtataactgctgtgactacctactacaggatctcaaggactccattgagaaccttcacatctga

SEQ ID NO: 57468 - DNA, 1503 bp, Zea mays
  Clone ID: MRT4577_152405C.1
acgggtcgctgtccctcgtctaccccgccgcccctggccctttccccccgtgtccggtggttgcggctgcccgcatcatattcccacctcgcgaacgaggacgaactgctaccccctcgcctcgccctcgccgcctgctcctctccagttctcccccaccaaccgcagcagcgagagcgagactgagaatggccgcggcgccgtcgtccctcgtgtcctcccatctctcccgcctcgccgacctccgccgcgcggcggcgccggccactcccaccgtcccacagcagcttcgcgtcggcttctcgcgccgccgcgcccagcgcgtcgtcgccatggctggatccggcaagttcttcgtcggaggcaactggaagtgcaacggaacaaaggactccgttagcaagcttgtctctgaactgaatgctgctaccctcgaaactgatgtagatgttgtggtggctcctccattcatctatatcgatcaggtcaagaattcactaacgggtcgcattgaggtttctgctcagaatgtgtggattggaaaaggaggagcctacaccggagagatcagtgcagaacaactggtggacatcggttgtcaatgggttattcttggacactcagagcgtagacatattattggtgaaaatgacgagtttattgggaagaaggctgcatatgcattgagccaaaatgttaaggttattgcctgcataggagagcttctggaagagagggaagcagggaaaacttttgaagtatgttttgagcagatgaaggcttttgcagatagtatttcaaactgggccgatgttgtgattgcatatgagcctgtttgggctattggaaccggaaaagttgctactcctgagcaggcccaggaagttcatgctgctgtacgcgattggttgacgaccaacatatcacctgatgttgcgtctagcactcgaataatctatggaggctctgttcaaggataagaagccagtcaaggtcatcaagaagaactcggctgcagtcaccaagttcctcgatgagctggctaagattggccgcacttgaagaaatcttatatcagtttgaggaaaaactccaagctgaaaaagtggaagctgctaggaagcaggaagagttgcaagcacaactacaagctcaacaggccgcacttgaagaaaaccaaagtttgctacgccagacccaagaggaagtgaaggggacgcataccaagtttgaagagaccaatgcactgctacgagctgtcctgaaacttcagaaagattgaggtagggatgcataccaagtctgaggatgatgcctttgcttaaggtttttctaccttgctagaacatatctgtggttagaactttgtcagaactacgtgcaatctgtttaaatgattcgaacctttgtggtggaacctttgtatgtttgaacctctgttgtggaagaactagtgtgctggaattgtgtatgacttgtgatgaaaaaaaaacaacaccaccc

SEQ ID NO: 57469 - DNA, 1498 bp, Zea mays
  Clone ID: MRT4577_152406C.1
acagacagacagacagatagggagattgttggctatggcgtcgtcgagggggcctctcgccgcgctgctactgctggccgcctgcgccgccttcttccctgccgccggagccgccggcacgccggacgggtcggaggagtggggctacgtggaagtccggcccaaggcgcacatgttctggtggctgtaccacagcccgcagcgcgtggacaacggcaagacgccatggccgacagtgctgtggctacagggagggccgggcgcgtccggcgtcgggtacggcaacttcatggagatcgggccgctggacgagaagcttaagccccgcgcaaccacatggctcgccaaggccgacctcctcttcgtggacaacccggttggcacggggttcagctacgtggacggcggcgacaagagcctgatggcgtccacctcgccggcgtcgccctcggggatagctggatctcgccgctcgacttcgtgttgtcgtgggggccgttgctgtaccaggtgtcccgggtggacgagaagggcctgcagcagtgcaacagcgtggcggccaagatcaaggagcagctggagaaggggcagttcgcggacgccgaggcctcgtggtcggagctggagggcgtcgtcctcgccagctccaactccgtcaacttctacaactttctcaaggacgaggcgtcgggggacgccaccgccactgccacagcggcggtgtcgacactggcgtccttcaggcgccggggcggctactcgggctacctcagctccatggcggcgtcttcgtcgtcgtcagcaggcggcttcgacgggctcatgaacacggtcatcaagaagaagctcggcatcatcccaaaggatctcaagtggggagagcagtcagacgacgtgttcgatgctctggctggagacttcatgaagcccaggatacaggaggtggaccagctcctcaagcttggcgtcaatgtcaccatctacagcggacagctcgacctcatctgcgcgaccaaaggcaccatggactgggttcagaagctcaagtgggacgacctcaacagtttcctgagctctcctagaacgcccatctactgcgacaaggaggggcagtccggcacccaggccttcgtcaagtcctacaagaacctcaatttctactggatactcgaagccggacacatggtacccctggacaacccttgccctgcgctcaagatgctggctgacattacgcgatctcctgccgagtagcaggaggaagaaaacaaggcgacggaatggaacggcctgacaccagttcttcaagattcttctcttttcatacagtcagagaaaaataagtcattggtggtagcattcatacatgcaacaataaacacaaaggaaaaggtagtgataggatcagacagatatttaattcggcagatattattgtgtagcaccgctatagagcttgcagctgaatttccaacatgatgatctgattgacagtgct

SEQ ID NO: 57470 - DNA, 1960 bp, Zea mays
  Clone ID: MRT4577_152407C.1
ccggccgggtcgtcgtgtccatactccatcctatgagagaggagaatatgcgccatgctcccggagtccctgtagcacaatactgtcagtacatactcctatatagatatgcaggcttccccgtaagacaagccgctcttcacctcggattgcgccttcaattcgttcgtccttccatgtcgattgattcttgattgattgggagtgggggaaaaggagagccggggagggaaaggcaaagcagagcccgtagcgtccttgtcacagacagacagacagatagatagattgttggctatggcgtcgtcgagggggcctctcgccgcgctgctactgctggccgcctgcgccgccttcttccctgccgccggagccgccggcacgccggacgggtcggaggagtggggctacgtggaagtccggcccaaggcgcacatgttctggtggctgtaccacagcccgcagcgcgtggacaacggcaagacgccatggccgacagtgctgtggctacagggagggccgggcgcgtccggcgtcgggtacggcaacttcatggagatcgggccgctggacgagaagcttaagccccgcgcaaccacatggctcgccaaggccgacctcctcttcgtggacaacccggttggcacggggttcagctacgtggacggcggcgacaagagcctgatggcgcacacggacgccgaggcggcgcgcgacctcgtcacgctgctctgcgcgctgtaccgcgacagcccgcggctccgtgccagcccgctctacatcgtcgccgagtcctacggcggcaagttcgcggtcaccacggcgctcgcggcgctcagggccgtcgaccagggccgcctcggcgtccacctcgccggcgtcgccctcggggatagctggatctcgccgctcgacttcgtgttgtcgtgggggccgttgctgtaccaggtgtcccgggtggacgagaagggcctgcagcagtgcaacagcgtggcggccaagatcaaggagcagctggagaaggggcagttcgcgggtgccgaagcctcgtggtcggagcctcaacaggttcctgagctcacctagaactccgtcatcttctacaactttctcaggaaccaggcgtcgggggacgccaccgccactgccacagcggcggtgtcgacactggcgtccttcaggcgccggggcggctactcgggctacctcagctccatggcggcgtcttcgtcgtcgtcagcaggcggcttcgacgggctcatgaacacggtcatcaagaagaagctcggcatcatcccaaaggatctcaagtggggagagcagtcagacgacgtgttcgatgctctggctggagacttcatgaagcccaggatacaggaggtggaccagctcctcaagcttggcgtcaatgtcaccatctacagcggacagctcgacctcatctgcgcgaccaaaggcaccatggactgggttcagaagctcaagtgggacgacctcaacagtttcctgagctctcccagaacgcccatctactgcgacaaggaggggcagtccggcacccaggccttcgtcaagtcctacaagaacctcaatttctactggatactcgaagccggacacatggtacccctggacaacccttgccctgcgctcaagatgctggctgacattacgcgatctcctgccgagtagcaggaggaagaaaacaaggcgacggaatggaacggcctgacaccagttcttcaagattcttctcttttcatacagtcagagaaaaataagtcattggtggtagcattcatacatgcaacaataaacacaaaggaaaaggtagtgataggatcagacagatatttaattcggcagatattattgtgtagcaccgctatagagcttgcagctgaatttccaacatgatgatctgattgacagtgcttaaaaaaaaacaactaaagcggcc

SEQ ID NO: 57471 - DNA, 487 bp, Zea mays
  Clone ID: MRT4577_152408C.1
cactgtcaatcagatcatcatgttggaaattcagctgcaagctctacagcggtgctacacaataatatctgccgaattaaatatctgtttgatcctatcactaccttttcctttgtgtatgtttattgttgcatgtatgaatgctaccaccaatgatttatttttctctgactgtatgaaaagatagactgactgactgaatgaatgaagtgctacggaactttaaaagagaagaatcttgaagaactggtgtcaggccgtttcattccatcgccttgtttgcttcctcctgctactcggcaggagatcgcgtaatgtcagccagcatcttgagcgcagggcagggggttgtcgagaggtaccatgtgtccggcttcgagtatccagtagaaattgaggttcttgtaggacttgacgaaagcctgggtgccggactgcccctccttgtcgcagaaatgggcgttctggagagctcaggaaactgtga

SEQ ID NO: 57472 - DNA, 271 bp, Zea mays
  Clone ID: MRT4577_152409C.1
tggttagggatccctacacgacgatccatgggggagaaaccccttgaatccaatagggaaagcaagattacccccacaacggcgagcgccggtggacaaagaagccaagaccggcagggggggccccgcgcaccacccacccgacggcgaggaccaagagcacaccgccaaaggcatgcgggagccacgcgcccggggctggggcgcagagaccacccgacggcggaaacaccggaaataaaagcgcgcagccgagagggacccatgaagg

SEQ ID NO: 57473 - DNA, 397 bp, Zea mays
  Clone ID: MRT4577_15240C.1
accaagcgggattttacataagtgtaacaaaccaaaaacattctaatttcaactgaactacgttgtaaattaaagggacaccgtgtccacgcaacctatatgatgatcaatcagggacccggcacgacactcgtttaatgacatatatgaaacacgaatactgaaggatcgaaggggaccgcaataaatactgcggggaaagcatcagatgttgcccacgtaagagcgccaatataagcccaaggccgttcaacgtacaattaagcctgaacgattaactccccggaggaaataactgggggacggggaatgcattttaaccggaggcggtggtgatttaatggtcctgaaccatggaacctacggctagaactggagccagaacaacaggggcatg

SEQ ID NO: 57474 - DNA, 357 bp, Zea mays
  Clone ID: MRT4577_152410C.1
gcgacgggaggaggaagggggagggaaagggaaaggaccgggagaacgtgagaaggaaaaggtgaggagggaacgttaggagaaggaaatggaggaagagcggtagaggtaacgggtggaaaaggagaggaaggatagtgaacggcaggaaattgagaggaaggaaagtgaacgggaggaagatgagaggatggaagaggaagaagagtgttcctggatggatcacgagttgcatcggaggatagataatgaggtggagttgcttgcaccgagacgcgaggtggaagaaagagagtggttggtggaataagatccttttaacgtaggatgaaaacgctcgaggcgtacctgttgtct

SEQ ID NO: 57475 - DNA, 492 bp, Zea mays
  unsure (1)..(492): unsure at all n locations
  Clone ID: MRT4577_152411C.1
caatacccagcatgtctctacccacaacccatcatcggcggcgccctcttttatatggctggacgagtatagatcaagactcaagatgtgcggaggagggccgaggctgcccaaagagaagaaaggacccgcccgggcggaccctcgacgagggcgagttgcaacccacaggaagacgaaagcccctgctccagcgcatgaggccgctcgtagtaagcgccgagcaactagcagaagccggtggctttatgtttggggttccctctcgcctcggcattatggccgctcactttaaggccttcttcgacgcggctcaccgcatatgggagacccaagctctcgcaggcgaacctgctggaattttctggagcacaggccctcatggaggcggtcaggagctcactgcgtgagtgcactcactcaactgctcttcggntcactccagccaatccattctaattatatatgctgaacttgctcacacatacggtt

SEQ ID NO: 57476 - DNA, 1186 bp, Zea mays
  unsure (1)..(1186): unsure at all n locations
  Clone ID: MRT4577_152412C.1
ttgggtacccctcgnaggccggccgggacttgctaacccatggccgcgtgggcggacgcgttcggtgacgatggtagctagctagctactactgtagtaggtaaagcctgcggcgctcgagcgagcagtaagacaaaggcaagcatggccgggggtggcttcgccgtggccgatggcccgtccgtcgactacggcggccgggtgaccttctcggtcgtcgtgacctgcctcatggcggcctccggcggcctcatcttcggctacgacatcggcatctcggggggcgtgacggcgatggagtcgttcctgtcggccttcttcccgggggtgctgcgcaggatggccgcggcgcggcgggacgagtactgcgtctacgacagccacgtcctcacggcgttcacctcgtcgctgtacctggccgggctggccgcctctctcgtcgccagccgcgtcaccagggcgatcggcaggcaggccgtcatgctcgcgggcggcgcgctcttcttcgccggcgccgccgtcaacgccgccgccgtcaacgtcgctatgctcatcgtcggacgcatgctgctgggcttcggcatcggctttaccaaccaggcggcgccggtgtacctggcggagacggcgccggccaagtggcggggcgccttcacgacggggttccagctcttcctcagcatcggcaacctgacggcgaacctggtgaactacggcacctcgcgcatcccggcgtgggggtggcgcctctcgctgggcctggccgcggcgcccgccgccgtcatcctcgcgggggcgctgctcatcccggacacgcccagcagccttctcgtgcgcgggcgcgcggaggaggcccgcgccgcgctgcggcgcgtcaggggcgccaaggcggacgtggacgcggagctggaggacgtggcccgcgccgtggaggccgcgcgcgcccacgagcagggcgcgttccgcaggatcctccggcgggagcaccggcaccacctggccgtggccgtggcggtcccgctgttccagcagctcacgggggtcatcgtcatcgccttcttctcgcccgtgctgttccagacggccgggttcggcagcaacgccgcgctcatgggcgccgtcatcctcggcgccgtcaacctcgcctccacgctcttgtccatcgtcacggtcgaccggtacggcc

SEQ ID NO: 57477 - DNA, 571 bp, Zea mays
  Clone ID: MRT4577_152413C.1
gcctgatttgtcagcgagcacggtggacaatcagagattgtattgagggtgaaacaaggagagaatccaacatttggattcttgatgcctgaccatcatctccacagctacttccgctaccttgttgatcatcctcaactgctgaaagatggtgctgatactgttggcacgaataaaggcaatactgagagtgagcatgcttcatctggcggggctttatcattgcttgggaccacatatgactcaggagacgagaatgaaggcacactcccgcgtagttcggaaggcatgaatcctgaaaatagcatgactcttgatgtgcagggccatgtaaaatctgcatcaattatgcctgacaaaaaagaaataggcaaaaatcagaatgctcctcctcctgcagttaaaagaaaaacaatattgatgaagaagaatcagattcttactggcaacagcatggttgctgttcagcatgaaaaggttaatgacgcaatcatagcatcaagtacttccaaatcacataccaatttaggcttattaagaataaaagaaatgatccttgaaccaccatctt

SEQ ID NO: 57478 - DNA, 770 bp, Zea mays
  Clone ID: MRT4577_152414C.1
ccccgcccacgcgtccgaacaaagctaatcctggtttccacaaaagcaactcaaacttctaaactgtcccaatgtcctaggccaaggagaagacattcttttggtgaagaggagttggcatgtctcccacacagaaggcgagatattgtattggatggtgaaagcaatgatttatttgttgctatggaaggatttgatgaaacatttgaagtttcttccaaaggagagaacaagaatcgcaaagggcttcttaactggttcaaacttcggaaacatgacggtggttctaatgctccaagcttaggtggtgaccaatctagcctgaggaaagcattggctgccccttggacacccgtagaaattggacttaattctcaaacagagcaagagatgtctaattctcccgagaatctatcagctaacctactgagcattgaccatgaagaatttcattctgatggactttatggagaagaagcttctttggtcaccagaaaaacatcagatcatgttgatttattgagagagcaactgaagatcctatcagaggaggttgcattacataaaagtgttctaaagcgactcgtcgaaggagctggaagaagcacaatgaatgggcatgtcgagatcgaaatgaaaaaggtcagtgacgagattaaggacaagcagcagcagatagcacatttagaaaggcagattaagggggagcttgaccagttagaacatacaccgtctcatgctacgctcctggagcaagtcaacgagaaagc

SEQ ID NO: 57479 - DNA, 142 bp, Zea mays
  Clone ID: MRT4577_152415C.1
gtgttaaaagcgacattcattaggaagcgttctttaattcgcgatctaactaaagaaagcttgctattgtatgctcggcgctctacatgctcggattgaccgcaagtgtggaaagataaaatcactctctagccgaatttcg

SEQ ID NO: 57480 - DNA, 235 bp, Zea mays
  Clone ID: MRT4577_152416C.1
actaagaagcacagaaagaagatgaaggcataccagtgaccgatcagccagatcaagcagtgtgagggatcctatcctggcctcgagatcaagaccaaggccgagcattgtacggatagagcagccctgatacccgcatgaaaggatgaatgctgcagataaacataatatagatgagaaatgcatgctagcattctaggagaggaccaatgacgacctatagagagctctcata

SEQ ID NO: 57481 - DNA, 518 bp, Zea mays
  Clone ID: MRT4577_152417C.1
acatgatattacttgtttttctttacttaggaactgcagctctgcaaaggcgggcgcaacgacttgaaacattacacgctttcccaaacaagatctcaacaaaaaaacacggggaaagttcgtctgcccgtctgcatattaacaaaccatctcctacgaaacaaatacccaccactaacggagacggaccagctttcgatggccattacagccttacagacttaacgttatccacaatgactactgacatgaccatattttgccgaagaatacacaaccacaagctttacaaacagttatgacttgtgaacataatacagtcttccatgtgcttacgattatccccaaacatacccccgaaactaacaaagcgaaagctacgattagacccgatcctaagatgccatagccacttcctaaaatacttcgcaattgtcacatttgaggaacacgacccaatttgaaacttttggctggaggatacaagcaccaattacaccgtaaattgtggcagcctc

SEQ ID NO: 57482 - DNA, 1395 bp, Zea mays
  Clone ID: MRT4577_152418C.1
cctcgaggccggccgggccgggggacacacacacacatcctccaccaccattcatcagaaagcgaagcacaagcctctgatgccaagccaaagcacacacacctcctccagcctttcttcctctacagccccaattcttccctgcagctctgctgctgccttgtttcgatcggtcatggcggcggtggccacagagactccgttccatgtcctggcggtggacgacagcctcccggacaggaagctcatcgagaggctcctcaagacctcttccttccaagtgaccactgtcgactccgggagcaaggcgctgcagttcctgggcctccatgaccaggacagcacggttcctcctgtccacacgcaccagctggatgtggctgccaatcaggatgtggctgtgaacctgatcatcacagactactgcatgcctggcatgacaggatatgacctgctcaagaagatcaaggagtcgtcgtctctcagagatatcccggtggtgatcatgtcctctgagaacattccttcaaggatcaataggtgagcagtcagctagcactctactatttgtcttgtggatctaaacaacagtttttaagaaaaaaaaatctaattttaaaaattggggaaaaaattacattagtgaggtgaggacttgagtagagttcaggcaagaaaacaactttatcatttataagaatatttttagcagccggcctgttcttgctcagaaaatcacatcatgttcagaaaaccattagacagtcactataaagttcttttttctctctctctccatgcatggagacataaataaatgaataagttttgaactaaatataaaatacacaagttgcaagagttgtcttttaacagcatatatatgatgctctatatatgatcaacgggagagagagaaaactaacaatccttcctggttttgaaattctgaaccaggtgcctggaggaaggagctgacgagttcttcctaaaacctgtgcggctatcagacatgaacaagctcaagccccacatactgaaaagcagatgcaaccaggaacagcaccagcaaagtgacagtcacagtggcgaacgcaggaaccccccaatcagcagcagcgatagcataaacaaccgcaagagaaagggtgcaggcaccgaagaaatcttgccccagctggcaaacagatcaaggcacagttaactgagaactgactagtacagctaaaaccttttctttttcactttactttggcctactgatttgtaacgtagatgttaagccctggatttgcaaaacggaacggaaactgtaaactgatactgcttgagtcgaatcgatcgaaatgattttgcccccaaaaaaaaaaaaaaaaaaaaaagggccggcccgct

SEQ ID NO: 57483 - DNA, 2258 bp, Zea mays
  Clone ID: MRT4577_152419C.1
ctccacccaccattcatcagaaagcgaagatcaagcctctgatgccaagccaaagcacacacacctcctccagcctttcttcctctacaaccccaattcttccctgcagctctgctgctgccttgttccgatcggtcatggcggcggtggccacagagactccgttccatgtcctggcggtggacgacagcctcccggacaggaagctcatcgagaggctcctcaagacctcttccttccaagtgaccactgtcgactccgggagcaaggcgctgcagttcctggggctccatgaccaggacagcacggttcctcctgtccacacgcaccagctggtaagaagaagatggcttcctcttcctagctcctacgagttggttggtcaaccgtgttgtgcaacactttgtattgtcttctcctagcgtcactagctagtcctcaagaagaggtttctgatgtaaccaggatgtggctggcaatcaggatgtggctgtgaacctgatcatcacagactactgcatgcctggcatgacaggatatgacctgctcaagaagatcaaggagtcgtcgtctctcagagatatcccggtggtgatcatgtcctccgagaacattccttcaaggatcaataggtgcctggaggaaggagctgacgagttcttcctaaaacctagacaggtcactagcaccactaacaaatagttgcgttgcgcgatacaccggtggcagggcactaaagtcaaagaaagaatcaaacgatattattgctgttctttcgaacaaaaaaagaaggaatcaaaagatatgtatataaaaaacacaagttgcaagagttgtcttttaacagcatatatatgatgctctatatatgatcaacgggagagagagaaaactaacaatccttcctggttttgaaattctgaaccaggtgcctggaggaaggagctgacgagttcttcctaaaacctgtgcggctatcagacatgaacaagctcaagccccacatactgaaaagcagatgcaaccaggaacagcaccagcaaagtgacagtcacagtggcgaacgcaggaaccccacaatcagcagcagcgatagcataaacaaccgcaagagaaagggtgcaggcaccgaagaaatcttgccccagctggcaaacagatcaaggcacagttaactgagaactgactagtacagctaaaaccttttctttttcactttactttggcttactgatttgtaacgtagatgttagccctggatttgcaaaacggaacggaatctgtaaactgatactgcttgagtcgaatcgatcgaagtgattctgcaccagatctccctatttcatttatcagaatcgaaagccagctgacagagtcacagtaacagcccgttggacatagcagcaggtgccgaagccaagaacatctgaaactgaccgtcggataacctacgatgggagtagccttttactgcttctaagctttagcctggatacaagttgtcactacagtagtcagtagggcagtaacttggtgcatctccaagagttttcaaaacacactgtcaatctagaaatttttggtgatgtagcttctcccacaagtggcctcttgcaaattcttcagtgatgtggtttctaccacttgtgctcttggattctcagttccttgactctacagtatttttgtcattactttctatcaacacatgtgacagcagatcattaaggattcggagagatttccatatccaatcttttggtacaaaacttattcatttatttatgtccgcatgcatggaagagagagagaaaaaaggaactttatagtggctgtctaatggttttgtgaacatgatgtgattttctgagcagtcagctagcactctactatttgtcttgtggatctaaacaacagtttttaagggaaacaaatcttaagttaaaaattggggaaaaattacactagtgaggtgaggacttgagtagagttcaggcaagaaaacaactttatcatttataaggatttttttagcagccggtctgttcttgctcagaaaatgacatcatgttcacaataccattagacagccactataaagttcgtttttactctgtggctgctatgcatgcggacgtagccatgtgaataggtcgtgtaccaaaggatcggatacggcaatacctaggaatccataaagatcggctgccacatgggtcgcaaaatagtagatgacagcatcccttgtattatatccg

SEQ ID NO: 57484 - DNA, 428 bp, Zea mays
  Clone ID: MRT4577_15241C.1
tcaaagcgccaaaggaagattagaaaaaaggagaagatgtcaagaagaagtggctcaagttcttggtatgacaataccgagctctcagatactgaacttaatccagtatatgccttgtaaagagtgtttgtctcaggaatcgagtatgtactaacagatacaatagcttacattatttgttgattgttcaatttctccagttccagtaacaacaaaaccacccagaactttcccattgtgcaaggctcttgcagttgatgaatttgatggcagccaatgtgctcaatctgttgtacatgtgagttacaatttttttttctttctgagagtcacttctgtgctttatcttcaggattgctcgtattgtaaagctcaagccaagggctgattttagatacttaatccttaaagtacttcaagttatgtgc

SEQ ID NO: 57485 - DNA, 283 bp, Zea mays
  Clone ID: MRT4577_152420C.1
cctaaccgtcctggttacttagcaccatacaaaggtgaaagatatcacatgcctgaatggcatagaggtatggaaccaagaactcctaaagaaaaattcaatcgtgttcattcgtccatacgtaatgtcatcgagagatcattcggagtactaaaaatgaagtggcaaattttatacaacatgcctccgtactccatgtacaagcaaaaaatgattgttgttgctacgatggtccttcataatttcatacgagagcataggatagaagacttgaacttcgctc

SEQ ID NO: 57486 - DNA, 525 bp, Zea mays
  Clone ID: MRT4577_152421C.1
aaaacaattaaaaggaccttggggggcattcttgaaaaggggggggacaatatgggtatgggccacactggggctaattggtaggttggtttacagcctataccctataattaaggctacacccataaggggtttttgaacattttgggctgaattacgggacacaaaggggggcaaatacaaagggggggggccggtaccgggggaagttgcaaagggccggggttcacttgggctgggggttgacatgggagaggaaagggaggaacatgttctttttgaaggggagggaaaaattggtgttgggggggggaaaagtgtattttttccgggcccgggtgagcaggttggggaacaaagggtggttgagggaggacacctttgaaacgtatcgtgttagggccttcccgaggtaaaccaccgtggggcccctggggacgtccctgggggaggggggtttggccttgccgccgtagaggtggggccaaccagagccgcccggcgttttaaggggggggagccttt

SEQ ID NO: 57487 - DNA, 514 bp, Zea mays
  Clone ID: MRT4577_152423C.1
gaccctcgggttggccgggtatagacactgtctcccatccgacgctttatgtcgtcttatattttcaattgatagtgccgaaacctattattttagatgaggctgataactaataattatagtagtagatatttgtgtggtgttcacatgtatcttgtccatgtttaagttttgtgcagagccgaggactccaacccatcccaatgcactctcctccgattcgccgattcgccgtcgttctattcaactcataaggttttatccctgaaaagggactgttaacactttccataagactccttttcatttactaggtaaacctataatgcactgttatgtttatgattttgtcggagacttttacatgttacagagttttagattcagagattccattgcagttcggttatctaagtatttcacagtgctaaaatttaactaacaatctatcttcgattatctataagtatttggtgttgcttcatatttgtttgcaacggatggtggttttgag

SEQ ID NO: 57488 - DNA, 224 bp, Zea mays
  Clone ID: MRT4577_152424C.1
tttattgaaacagggaaacaccaggcattttttgaaagggtgcatgactggggcagactgtatacggacaaactgtaattaggcgccgcgctgcagagcttcacctcccaaactatccaattcatgtgaaacacgtggtctctggctaacaaccactcaccacacggttatagtattgggacaccaaaagcagtcacacctgtgtcacaccacacacaaattca

SEQ ID NO: 57489 - DNA, 871 bp, Zea mays
  Clone ID: MRT4577_152425C.1
ggcaaagacaggcaaaaccccgtccaacacactctcctcctccgcttgctccgtttcccccaaatctgccgcacgacccaaacaaaacccttgcggcggcgacccaccccatctccggcggccaagcggaatggagcgctcggcggcgggcgcctcgtaccagcgcttcccacgcgtgcggatccgcgagctcaaggacgagtacgccaagttcgagctcaaggacaccgacgcgagcatggccaacgccctccgccgcgtcatgatcgccgaggtccccaccgtcgccatcgacctcgtcgagatcgagagcaactcctccgtcctcaacgacgagttcctcgcgcaccgcctcggcctcatcccgctcacctcctccgccgccatgtccatgcgcttctcccgcgactgcgacgcctgcgacggggacggctcctgcgagtactgctccgtcgagttccacctcgccgcccgcgccaccgactccggccagacgctcgaggtcacctccaccaaggacctccgctccaccgaccccaaggtctgccctgtcgaccagcaaagggagtaccagcaggccctcggcaacgtcgacgcctacgagcccgatgctgccggtgaccacaggggcatattaattgtaaagctgcgccgtgggcaagagctgcgtcttcgagcaattgccaggaaggggattggaaaggaccatgccaaatggtctccagctgctactgtgaccttcatgtatgagcctgacatatgtattaaccaagaactcatggagacacttacacttgaggaaaaacaaagctgggtggagagcagccctacaaagtatttgacatcgatcctgtcaccaacaggtgacgat

SEQ ID NO: 57490 - DNA, 340 bp, Zea mays
  Clone ID: MRT4577_152426C.1
tatacaatctgctggactagcacgatgactcgcgcaatggctgacctccatggggacgggctccgttgggtggctgaatttctcctaaatcaaggagctcaaggcgaagctctgggacgaggaggcaacggctagcttcacgtcgggcaaggcggagccggcggcctctgacgggcctccccccgtaggggtgggggcgttcgagagtgactccagcgcggtgctgaactacgcggaccctcccttggcggaggcgccagtgccggacgtacgggggactcttcttgactcgcccggggccgatgctggtaaccattggggcgtgttctttcccggggag

SEQ ID NO: 57491 - DNA, 348 bp, Zea mays
  Clone ID: MRT4577_152427C.1
gccggccgggctcgaaatcaaacaagatgaagtttatagttgtatttatgatgatgatgatgcttgccctaggtgtctctgctcagaaaacttggatttgcagttgctttagacctaaatacgattttggatgttgtgatgttgtcaaaggaaaaatggataatggaaatgtatgcaatgttcctggtcgtggcactcctaccaatctaaagtatgaagaatgctgtacttctattggtggaaaatacaagtgtaaataaaaagcaattgcacactctccttttaaaaaggaaaataaagcgctaaatcatccagtattgtgaaaaaaaaaaaaaaaaaaggccccta

SEQ ID NO: 57492 - DNA, 847 bp, Zea mays
  Clone ID: MRT4577_152428C.1
cgactatccacaccaacaccaaaccacggtggccgccgatcgacccggccacgcctgagagcagcatcttgccggagacatggcatccgctcctgcggcggttccccgcgtgaagctgggctcccagggaatggaggtctcggcgcagggcctcggctgcatgggcatgtccgccttctacggcgcgcccaagcccgagcccgacatggtcgcgctcatccgtcacgccgtcgccgccggagtcacctttctcgacacctccgacatgtacgggccgcacaccaacgagatgctgctcggcaaggcgttgcaaggcgacatgagggagaaggtggatctggccaccaagttcggcatctcgttcgcagacaacaagtggaacatccggggggatccagcgtacgtgcgcgcggcttgcgagggcagcctcaagcggctgggtgtcgactgtattgatctctactaccagcaccgcatcgacaaaaatgtgcccatcgaggtcacgattggcgaactcaagaagctagtcgaagaaggaaagataaaatacatcggactatctgaagcatctgcatcaacaatcagaagggctcatgctgtccatcctattactgcagttcagctggagtggtcattatggtctagagatgtggaagaagacataattccaacttgcagagaacttggaattggaattgtaccttacagcccacttggtagaggattttcctctggtggagcaaaactgatcgactcgctatcagatcaggactaccgcaagcatatgcccagattccagccagaaaatcttgagaagatacccctgatatttgagcgtgttaacgca

SEQ ID NO: 57493 - DNA, 382 bp, Zea mays
  unsure (1)..(382): unsure at all n locations
  Clone ID: MRT4577_152429C.1
ttttcgagatcttctgtccgctcgctgttgctgnggctagtcctattcccgttttttgggtgcttctactcgctagtcgtctcgtattcgtatcctctctcctcagccgccctgctcccctcccgtcctctggtgtctggtcaaaccagcggctcccaagatttgccgctgcttccttcctggagaaatcaagcctgtgcggcgagaaatcaagaggaagggggaagagagggagaaagagagaggggcgggggtggaggaaagaaagcctgccccttgcggacgtgcctgctccctcgggggcattcaattggagccaacagtgggcgggtgggcggctgctacagcacggcggcctccataaattagctccccgcgtccc

SEQ ID NO: 57494 - DNA, 504 bp, Zea mays
  Clone ID: MRT4577_15242C.1
ggattggttggggtgttaacaatgtttgggcacgggactaaatcgggggcaaagacggggccggccggggaggggggggacaaaggcacggaggggggggggggcagggacggacgggcccaaaaagaaccccggcccccagaaggaccccccccgcccgaaaaaaccgccgggaccccccaaaaaccccggccagcccgcccgcccccccaaaacgccgcgaaccccaccggagcccccgcgggcacgggcgcgcgccgggggcggcgccggaggcgggcgcccgggcggacccgacgggcacccccgggcagacccaccagccccggcagggggcccaattgagccccgggggagccaggagagaaccgggtgccaccggggagaaatttggggcccgggggaaacccggagacaaaccagacccacacaaaaaaagaaccgggggggaaaacgagggagccaggggaccctaaggagggggcgaacacagaggggccgcca

SEQ ID NO: 57495 - DNA, 2105 bp, Zea mays
  Clone ID: MRT4577_152430C.1
aattcggcacgagggagaaatcggcccagttgcacgcagcgaaggtagccgaagaaaaaaaaaattttcccgttcacctcgcctgcgggacaactggggcaaccgccgccggccgttgccccgtcccccctacgcccagctgcccagatccgagccctttgcccggcgatcacaccaggcctgctcagctgacctcacctggacaatcaagctgaagagaaatatcatagtgtgcatggtttttcaggaatgaagcgttttgtctacataaatgatgagtcttatcagaacgactactgtgataaccgagtttctaatacaaagtataccttattgaacttcgtgccaaaaaacctatgggaacagttcaggcgcttcatgaatcaatatttcttgttgatagcttgtctgcaactatggtcacttatcactcctgtaaatcctgcaagtacctggggcccacttatatttatctttgctggttctggcaccaaagaggcatgggatgactacaacaggtatatcccacgcgtccgctgggcgcgccgggccgcgccgagccgagcgagtcgtccactctccactccgcccgccacgcccacgccccgtcctcgcttccgtctcccacaatccaaggacaccgagcagcaggcggcggaagcaacccgctgtgggggcggcgtggagtccagttttgctcggctcgccgctgggatccgccggccggcgaagcggggaagggaagaggggcggagattggagagtacaagcaggggaagatgtcagacgcgctgatcaacggcctcgccggcgccggcggcgggatcatcgcccagctccttacctatccgctccagaccgtgaacgcgcggcaacagacggagcgcgacccctccaagccggcgttcaaggacggcgccgctcgccagttgtatctggttgtgaagaacgaggggtgggagcgcctgtatggcgggcttatgccctctctcgtcggcaccgctgcctcccagggtgtctactactacttctaccaaatattccggaacagggccctaggcaagggcccttgagcgatccaggagagggcttggcgatgggtctgtcgggatgctccagtctctcactgtcgctgccctgtctggctgtgtcaatgtactgctcacaaacccgagtcagtgtgattcgcgtaaggaccaaaaactatgttggatggaaactaacatcatacatgtaaaatggtttgaattgtgctcttgaagagtcccatgaatctgctagagctgaaaacgctccatacaaaacaattgaatgtttttcaggaactctacaaagaatctggagttcttggcttctggaaaggggtaattccggctcttatcatggttagcaatcccgcaattcagttcatgctatatgagactcttctgaagaaattgaagaagagacgagcctctaattttaagggagctgatggattgactgctcttgaaatttttcttcttggtgctgttgcgaaacttggtgcaaccgtcgttacgtatccccttctagttgttaaggcaagacttcaggcaaagcacatgattaacgatgacaagaggcatcgctacaaaggtacacttgatgcgttcacaaagatggtacgatatgagggtctgtcagggatgtacaaaggaatgggcacaaaaattgtgcaaagtgtttttgcttctgctttgctttttatgattaaggaggagctggtgaagggtgctcgactattggtaactggtaacactagtctggttaagaaactaccatcaaagtcatcaagatgaactacgggcatcgcaagcgttagtatatcatcctaaaaagccatttattatccgcataaaccgtaaacaaggtcgacaagctatagagctcgcctctgctttggatatgtcaactgtaggttacacaatagccagtatgattcacgtagggaccaaagactatgttggatagatatttgtatcattcatgtaaaatgtatcgtggaagatcgaaacagaagaaaataaataagtaagataatttgaacttcggccaaaaaaaaaaaaaaaaaggcccctagggcc

SEQ ID NO: 57496 - DNA, 897 bp, Zea mays
  Clone ID: MRT4577_152431C.1
atggccatccagatagtccgggttaacctccaggacttcagcccccgccgtgaagcagcgacgaatagaggcctccgaccactgctccggagggaagtcagtgagggccaccagagccaaccattcgggggtgcgggtgaacctgttagaggtctcctccgggtgctccaaggcggggacgctgtcgccatccccgggggaagcggatgccttggaggtgccaagtgggaggggagcgaggctgaggaggcccgcatcggcaacgggggagctgggggcggatgggggggaacgtctgtcgtcaggcgagtgaggcgacgacagctcccgaccaaggcgattcttcccgccacaaacgaccatgcggacgtcaaagcactggggggtaatgggtggggcgggggtggcaagggggcggggcagcacagcagccgctgccgcgcagacgcggcaatcggggtgtggtgccagggtgccggagggcggcgtggtggagctgaggggagggaggttgacatgggggtggtgagcttcaacggtggggcgggggcggccgcgcccggcgacagcgaggactcctcagggaaggggcagctgacacggggacacagggggcgggtgctgggctggaggaacagcggcgagggtggggggttagcacccgggcaatcagcatcggacaacttttgtgccgatgcccgaagcgactgcaaccgcggcagcgaactgggtcacgacagtcacgaacctggtggtccgcggcgaggcagcgaaaacagcgggaaggggcgggtgggaggcaaaaggggtggcgggggcggcgagggggagctttggcgggagagagcatcgcgtttaaaaagggggtgtagctcccgggggaagcggctgtcgtga

SEQ ID NO: 57497 - DNA, 280 bp, Zea mays
  Clone ID: MRT4577_152432C.1
gcgtacaaatgaacacgaaccttggtagaacgaagctgaagcatttcgtggtgaggctagtatggcaaacgcgcacaggatcctggccctaaggctgctgttagcgctgctgtgcgctgccgcacggaaccggtcgagcgcagaactgccgatgccagcctaacttctgctgcagcacgttcggctactgcggcacgaccgacgactactgctgctgactggtgccagtcgggcccgtgctgctcgggcggcggaggaggccgctgcggtggctgatgca

SEQ ID NO: 57498 - DNA, 502 bp, Zea mays
  Clone ID: MRT4577_152433C.1
gacgattgtttccgaccccgccccacagacagcagcgagcatcgagaagacgagacgagtgccctacaagcatagagatcagcgcaatggatgactactaacagaaaagggaccacagaatgcaacaacaaggcaaaggcaagttaggagcaaaaaggaagcctaggaacccgaggcaaaacaggcgagcaaccgacaggaggccgcaggaccgtaccagacccagcgcctccaagaagaccgcaacaaacaagggggaagacatgaacaatcccgacaggacagagccggccaagcaacaaaaaacaagaggcaagcctgaaaaaaaaccgagccaacgaaagagaacgggagcacgaaacatgaagaaagccaaggcccaaaaataggaaacaggggagcgcaaaagcacggaacggcaaacacgaagagaatgaaatcacaaaagaaaaaaacggggggaacaagcaacccgaagagtaaaaacgacaaaaaccaagca

SEQ ID NO: 57499 - DNA, 309 bp, Zea mays
  Clone ID: MRT4577_152434C.1
ggctactagaagtttgatagtgcgagatatttatatggggacggttatgatgggttcacttgcagaaacattggaggtagacggacctgcttactttaacaaatctggcaaaaagcgtggaccgacacccgaatgttagcgatcgcttccaaagattgagccatgttccagctggagagaaataccgacgtatgggatacactcaggagtaggacatagacttgtttaaaatagttccattactgggacacctaaaggcaacaatgtgacttcaccaatgaacattagctggaatgacattggaaaggg

SEQ ID NO: 57500 - DNA, 505 bp, Zea mays
  Clone ID: MRT4577_152435C.1
tttttttttttttttttttttttttttttttttttttttttttttttttttttttttttttttttttttttttttttttttttttaacaaaacaagcttttataaaaaatctgggcgagggccgggggggggccaaaaaacaggggggggccagtaaaacaaagggggggaaaacttcccccaagcgtcaaccaagcaaagatagcccagttatagcagggcatccacccggggatcatttgggttaattcaccccaaaaggttccttgttactttccaccaggggggggtagggacaaaattgggttggggtgatgtacaggcaattacagggggcaaaacttggtggtcgggagaaccccccgggagaccccctcaaatcaaatcctgcgctcacaatgcatgaaaaaattcgagggcccgctcaaccccaggggtattcctttttttggaaaacccccttttccggttccttgagccaatgaaaaaaagcctctgactggtt

SEQ ID NO: 57501 - DNA, 3692 bp, Zea mays
  Clone ID: MRT4577_152436C.1
accccccccccccccccccccccccccccccccaaagaggcaactgatccctgccactgacaacctactacatacactacacatgcaccattgatgaatcactttgatgtcgtcacacatgcaacatcgagacgcggagacggagacttgaccatcagcaagtaagacttgaccatcagtctgcagagcggagcgaggtaactgcatatgcatgctaatggcgaaggcgacgagtcagcacacttcacacaagctttcgcgacgcccatcggcactagctagctagctagcaggacggcggcgatgagctccaccaccacaaccacaacacgtcttctcgtcatcccgcttgtctacttgatgctcgttgccagtgccagccatagtgccctcagctccgcttctctcttcttcgatgtcgacttctccaacgcctccacgttcagcctcgcggacttcacgaccgccggcgacgccgcgttccacggccaacgcttcgacctcacggcgaacgcgtacagagcggggatctccgacagcgtcggccgggttgcgtacgcgcacccggtgcctcttcgggacaacgccacgggccaggtggccagtttcaccacatccttcaccttcgccatcaacatcaccgacatgaacaaccaagggggacggcatggccttcttcctcggcaattacccctcgggtctgccgcccaggtcggagggaggcgcactcggcctctgcaccgactactgcggcaaccggaccgctggcagggacaggttcgtggccgtggagttcgacacgttcgacgactcctgggatccccacctgacctacgaccacatggggatcaacgtgaactccgtcgtgtccgtggccaacatctcgctgccgagcttcagcctgaacgggcagatgagcgcgcgggtggactacaacagcagcaccagcgtgatgggcgttgacctgagattcgaccgcagccccaagttcggcagcgctacgcctatcttcaacgtgagcgccaaggtggatctcagctccgcgctgccggagcaggtggccatcggtttctcggcggcgaccggcgcgtccatcgagctccaccagttgctctcttggtccttcagctcggtagctcctgggactgggagcccaaccgatccaggtgctttggcttcatcgaatcccagaacaggactgaaagttgctcttggaatcactagctcgatatccatcttgctctgcgcggcagttgttgctctgctccgtgcactacgaaggaaacacctggcgttggctgagatacagctagaatcggatgctcgaggaaggctctgttagcaacaactgggaagggggatccaagaggaagagctcagaggagaataagacttggagaagggaatagctgggaggaagacgagtttatctgatatttgatagctaaattgttcatgcccctattacacaagtgtttgtcttttatatagtactactcgaacatcaagcgacccatagatagcggacccactacttggcccatattggctcagtaaccttggcgtttggacgatggactctcacgtgccgtggcttgttctcgttgtctgctcattgctcctgtctgagatgctgacattccccaccgcttgaaatacagcttgtccccaagctgtgatatgcataaccaccaggatcccaaactaagactttgaaattgccttggccactagcaacagcacctagactagaagaaacaaggccaacaaccatatcaattcctgaaccagctcgacaaacgattgctgtggaggaatggcttgggttggctttctcaaatggttcaccgaacgtagctgagattggatcactaatggtgatggggaagcggtcgagcttggcttgctttgccacagtaaccgaaagtcttcccagagcttgaagctcccagtcactccgtatccacattgacaccaagttggacaaaaaatccatgaactgcagttaagcttcctccaatggtatgaatggtgtactgaattttttgctcttctatctttggtgacatatttccaagagaaaatgtgctgaacctcagagattttattcccaaaggccggtaattatccatcagtggctcccaatcgtcgtccaacagcagcatgaagttcatcttgttgaacactctgtagagcacaccaaagaatcggacaaacaacttttgcttgtcacgggaagtgactgacgactggacatatggctgacatttctccattcttgagcttcggctggctcccaagccgatggaaatttttgataccgcccaagatgatatgccatggaatgtgccagtctgtaatgcggaatagcagatcgcagccacaccagacctggacatctgacacccctaccactatgtagtcaccagttgaaaggttgagctcggtattgccctctgctccatatgactggatttggattgcctcaaccaggaaatactccacgatctggaagttgcctcctatcttaatagcttgctgtttggtaaggacaacaacaagcatgtgttcgttgttcttaagatcattgcagccgccactaactttcttcaaaagatggtaccacgaaggcccttctccaggagtcgatctcaaaatgtctacaatgaagttgatacgttcccaatcaggcttatatgcatctgtgtaagcttgaacagcagcatatgtcatatcctgtgttatgcctctacagatagcattcgagtcaggtgctttgatacagtcgaacagaactgaaaatcccagcaagctaaacaacatcagataatgatggagattgataacatgagctctcagtagatcaaccacgctttgagggagcttctcgatcaatgatagaagcagccattgaccggtgtcaggaagcggcgtgacagttctcatgtgttttgacccaagcacaccaatgatctcggcaaccagtttgcgcacggggctggcctcctcggtgtggcggtcggtgatgctcacaacacggttggattgcataggtggtggccatggttgtctctgcatcactgcatcccagctgcaactgaccggaggcgagaaacaactctgtgtgaggatgaagcaattcatcaaacacctgttgggcgtagtggcgagaacctcgtcctccttgctcggcggcgtgtacaatcgcatacacggcttcccgtcaacgctggtgcagtcgaagacatgcgtgccggtggggatgccgagcacctggtccggcgacggtagggagaagtggatgaggtggacgtggcgggacagcttcgtcctgtcgacgaaccgacagcagatcttctcgcgcaggttgggtagcgcggcggtcgcggggaccttgtcggcttcgctgtgagacagctcagtgtcgccgctgccgtggacggcgatgacggagaaggcactagaggagatgctgcactggctgtggcacgccgtcgcggacgtcgtgaagcagtgccagcgcatgatcccgctcgtggactcgactggcgcattctacgcagttgtgacggcgctggtgtcccaaatggtcgtgccaccgtcggccaaggacgccacagccactggctcctcgccaaagagcacggcatttaggttctcgtgcgacacgccacgtccatcgtctgagaaac

SEQ ID NO: 57502 - DNA, 356 bp, Zea mays
  Clone ID: MRT4577_152437C.1
actggaaaatgagggggggggggggggggcaaaaacatcccaaaaaacaatcgcacacgacggggatgaacacacaacgacggaggcttcaaaaaaagcactccccaccgcagagtagcatacacacatgcatacactacatacatgaactgggcggggaacaatcgccggggggggagctataaacccttcaaaaacggaacctgcatgcactgtttttcccctgaaacaacccggccgggctccgtcaaaaaaaccgcagcttgatgggagcgcccccggccggggcgaccacgggggccattggccgaacctgcagggctccgggggaaggggcccggccccagggcgagggg

SEQ ID NO: 57503 - DNA, 423 bp, Zea mays
  Clone ID: MRT4577_152438C.1
ggccgggatatactgcaaaatagggtttttcagtacactctatgcccaagatcatctgagtgccctctctcagacgactgctcctcacccatcgatacgacgaacttcttgctacgagctccactaccgccgccgctctcaatgatctcctgggtcacctcgaccagacaacctatgtgtgtgatcactccagtactaatgatgactattattggcctttgcgaagccaaccgcgaggacggccactgatttaccaaatgctcccctctagtacaagactgcttctacgactgcatcatcatgatcacctgctgagctttctgtgaaaaaacagcctccgtcatcatgtccatgccatggatggtcctccgcctcaagagcatgatgaggatgagcttgaacatcttgacgatgctgctgacc

SEQ ID NO: 57504 - DNA, 1468 bp, Zea mays
  Clone ID: MRT4577_152439C.1
ccgcaccgtccccgctcctttgccggcgtcgcgcccaggcgcggcccctcccagcaagtcgcctccctccgcctacccgcgtcgccgtgcagccccccgccgcgccggtcgcgacgcgcatcggctcctttgacaaggtgctggaggcgctgatcggcgggaccgacttctccgaggaggatgcggaggcgacgctgaagctgctgctggacgagaaggacgaggcgcgcatctccgccttcctcgtcctcctcagggccaagggcgagaccttcgaagagatcgtggggcttgcgaaggcgatgttgagctgctgcatccgagtcgatggtctggatgacgccgtcgacattgtcgggacaggcggcgacggcgcagacaccgtcaacatctccaccgggtccaccatcctcgccgccgcggccggcgccaaggtcgctaagcaaggaagcagggctagctcgtcggcgtgcggcagcgccgatgtgctggaggcgcttggggtcaacatcgagcttggacccgagggtattaaacaatgtgtcaatgaggtgggtgttggattcatgatgtctgcaaattatcatcctgcaatgaaaattgtcagacctgtgaggaagaagcttaaaataaagacagttttcaatatccttggtcctctactgaatccagcaagggtgcctcatgctgttattggtgtttaccatgagaatatagttaccaagatggctaaggctgctcagaaatttggaatgaagagagcattggtcgtccattcaaagggtttggatgaaataagcccacttggtcccggatatatccttgatgttactccagagaagattgaaaaaatgttcttcgatccattggattttggcattcctcgctgcacattggaagatctgaaaggaggcgatccagcgtttaatgcaaaagttctccaggatgttcttgctggtcaaaggggggcgattgcagatgcccttgttctaaatgccgcggcgtccctacttgtcagtggtaaagtgaaaaatttacatgacggtgttgctttagcacaggagacacagcggtccgggaaagccattaatacacttgagtcttggataaaaaaatcaaatagttccagagactgagtgaagttgagtggcaatagatggatttctgcaataagacatgaggaatggtagcaaataagggctccgctgagtccatccatcatccgtgtatgattagctttcttctcgtgttttgttcatgatttgtgtcagaaacctaggtggcatgggaagattatacccatttgtaatgggggagaatcaaggcttaaacatttctacaataacgtgcgaagagttgcccccattggtaacgcatgtcctgaaatatgaataaagctgcaggcagttgatattttgcaaaaaaaaaaaaaaaaaaaaaaaaaaaaaaaaaactcggggcccggtac

SEQ ID NO: 57505 - DNA, 312 bp, Zea mays
  Clone ID: MRT4577_15243C.1
aatatctgggccgacctacacttccaggaccatatccttctacgctgattattcacctgtttaaattgtccatatgcagtaaagatgataccggctttttaggatgttcgctggaggtcctcagtagacgggacgccaatggatgctaatttctcttgtgctacagacttatagtatacgctgggatcctagacattctgttttcagacagaatgggtatagagcgatagtacattcaacttcagcatatcgtaccaattatttgataattcgactgcttatataaataaaacattttgtcacttagggctc

SEQ ID NO: 57506 - DNA, 659 bp, Zea mays
  Clone ID: MRT4577_152440C.1
gggtacctcgaggccggccgggcggatatatccttgatgttactccagagaagattgaaaaaatgttcttcgatccattggattttggcattcctcgctgcacattagaagatctgaaaggaggcgatccagcgtttaatgcaaaagttctccaggatgttcttgctggtcaaaggggggcgattgcagatgcccttgttctaaatgccgcggcgtccctacttgtcagtggtaaagtgaaaaatttacatgacggtgttgctttagcacaggagacacagcggtccgggaaagccattaatacacttgagtcttggataaaaaaatcaaatagttccagagactgagtgaagttgagtggcaatagatggatttctgcaataagacatgaggaatggtagcaaataagggctccgctgagtccatccatcatccgttgctgttgtgtagaaaaatctccgtcgagattctaagctttttggttaaaaaggtgcgctcttcattggtccttgacggaactccgggtagatgaacataggccatctggtgggatcttgtgatgctgcattacgtttggcatggatcatatattatgcaatggcatgggaagattatacccatttgtaatgggggaagaaaaaaaaaaaaaaaaagcggcc

SEQ ID NO: 57507 - DNA, 244 bp, Zea mays
  Clone ID: MRT4577_152441C.1
ataaagggggggcaaatgtacatgaggggatgcctacaccaccttttatctttgtatttaatatttaaagggccaaaaaaaataaaattccaaaattaacataattcggaaatcgtgtgcaatctccaacaaacaaaaaattaatgaaacattaacatcatgtaaacccatatattaaaatggttttggattgcttattatttaatttaaacaaatgttcaacgaatcttaaacaaaatttatt

SEQ ID NO: 57508 - DNA, 1947 bp, Zea mays
  Clone ID: MRT4577_152442C.1
attccagctgagctgccgtgtgcccgtgtcacttttactgatccgttgttgcgcataaagctgcccgcgtggacagccccctcctcctgccccgtgacctccactgcgcgcgcgggcaccaatggcggccgcgtcgctcaagttcgcctcccccaaacccttggcctccgcaccgtccgcgctcctttgcgggcgtcgcgcccaggcgcggcccctcccagcaagtcgcctccctccgcctacccgcgtcgccgtgcagccccccgccgcgccggtcgcgacgcgcatcggctcctttgacaaggtgctggaggcgctgatcggcgggaccgacttctccgaggaggatgcggaggcgacgctgaagctgctgctggacgagaaggacgaggcgcgcatctccgccttcctcgtcctcctcagggccaagggcgagaccttcgaagagatcgtggggcttgcgaaggcgatgttgagctgctgcatccgagtcgatggtctggatgacgccgtcgacattgtcgggacaggcggcgacggcgcagacaccgtcaacatctccaccgggtccaccatcctcgccgccgcggccggcgccaaggtcgctaagcaaggaagcagggctagctcgtcggcgtgcggcagcgccgatgtgctggaggcgcttggggtcaacatcgagcttggacccgagggtattaaacaatgtgtcaatgaggtgggtgttggattcatgatgtctgcaaattatcatcctgcaatgaaaattgtcagacctgtgaggaagaagcttaaaataaagacagttttcaatatccttggtcctctactgaatccagcaagggtgcctcatgctgttattggtgtttaccatgagaatatagttaccaagatggctaaggctgctcagaaatttggaatgaagagagcattggtcgtccattcaaagggtttggatgaaataagcccacttggtcccggatatatccttgatgttactccagagaagattgaaaaaatgttcttcgatccattggattttggcattcctcgctgcacattggaagatctgaaaggaggcgatccagcgtttaatgcaaaagttctccaggatgttcttgctggtcaaaggggggcgattgcagatgcccttgttctaaatgccgcggcgtccctacttgtcagtggtaaagtgaaaaatttacatgacggtgttgctttagcacaggagacacagcggtccgggaaagccatcaatacacttgagtcttggataaaaaaatcaaatagttccagagactgagtgaagttgagtagcaatagatggatttctgcaataagacatgaggaatggtagcaaataagggctccgctgagtccatccatcatccgtgtatgattagctttcttctcgtgttttgttcatgatttgtgtcagaaacctaggtggcatctagtctggtttatgtattgccagtgctgttgtgtagaaaaatctccgtcgatattctaagctttttggttagaaaggtgcgctcttcattgtccttgacggaactcggggtagatgaacataggccatctgttgtgatcttgtgatgctgcattacgtttgcaatggatcatatattatgcaatggcatgggaagattatacccatttgtaatgggggagaatcagggcttaaacatttctacaataacgtgcgaagagttgtccccattggtaacgcatgtcctgaaatatgaataaagctgcaggcagttgatattttgcaaaaaaaaaaaaaaagggacgattatacccatttgtaatgggggagaatgaacaacgccgccaacatccccggaaagtgcggagtctccgtcggagtgaccatcatccccaccgtccactgcaacaagatcaactgatcgatgctaccatagcgaaggaatctcgctcgtt

SEQ ID NO: 57509 - DNA, 347 bp, Zea mays
  Clone ID: MRT4577_152443C.1
atgcttgggtggctgattaagctttgcataacacatggaaccctaagaagaatgggtgatgatgctttaacttgttgcccacataattaaccgctgactaaggcttaaccgtatggctcagcggtcgtaccctatgcatcataaaacgagggatgcgatctgcgtgggagttaaccaagctatctatggcaggagttgacgacatccaatcaccaactgtaaaccgcatgcaggcggctaacttgtttacacgactccacggaccatgaaacgccttcataatggcaattgccgtgcatggaatagattggtaagctacgactggggtgccgtcccccgaatatttc

SEQ ID NO: 57510 - DNA, 248 bp, Zea mays
  Clone ID: MRT4577_152444C.1
caaaaggatcaaaacttaattccccttaaaggcaaagtcaaaccccttcaaaagggtcaccaaaattcaattcacgggcgttcttttaaaaacgtccgaactgaaaaaacccggggttaaccaaattaaacccccatcaaaaaaacccccttttctcaagctggcgtaaaacaaaaaaggcccgcaccaattacagttccaaaaatttgcccacccaaattgaaaaatgggcaccaccttatcagggc

SEQ ID NO: 57511 - DNA, 722 bp, Zea mays
  Clone ID: MRT4577_152445C.1
cgccgagcctcgaggccggccgggccgggaacagcactcgcactcgccgagccaagcaatacacagtagtgagcaatcgtaggcagcgcagcaggatacatagcagttagcaccacagcgagcagctgcccgtacgcacgtacgcttgatggcgatggcgatggcgagcttcgtcgctcagctcaaggacatgttcctcggcctcgtcgaccgcgtcaccggctgccgcggctgtggcggagacaagcaggacgtgccggaggcaaccaagatagcaagcctccagcccgttgagatcaggtcgagagaccccgttgtgggcggaggatccgtggctggggccaattgattgctaatactgccagacaagctgcacgagattgcaaccgcttgctgtggtgttccagcaaattccaagttttttttatttgttctttttcgtcaaaggagttgctcgttccaaaaaaaacgcataatgcttgtgcagtgttattgattgatttctcctctgtgattgtaattgaacccggtatttttttactttttttctttttcgtttgtttctttaattttggcgttaccacattgtgattccgagtgtacgtacatgctgtatcttgccatcttcaagtaaataaacagtaatggtttgactaaaaaaaaaaaaaaaaaaggcccctagggcccggctgctgaagctggtgaagctgggcggcctcatc

SEQ ID NO: 57512 - DNA, 598 bp, Zea mays
  Clone ID: MRT4577_152446C.1
ggtaccctcgggtttggccgggcctgggccgcgagattatatgggattcggtagatgagggcggcgctattcggtgcccagcggaacggggctgcggaccccatcggaggcggaaagacgctgttctggccggaggggaaggcgaagacgctgttggagccgtggtccgtgctggactgcacgcggagccccagcaactcaacgtcgacgctgtcgtcgtccctgggcagcggcgctgaggactcgaccggcgtggcggtggtttcggacagaagcgccgccgccgaagccaccaaatggggagcccccggcgagcacggcggcggcggcgggaaggaggactgggccggcggctgtgagctgccgccgattcccaccggcctcgacatgggggtcgtggtcgccgacagctgggacgccatgctcggcaacgccgctgcggcggcgcaggaccagacgttcttgaactggttcattggggccgccggcgacttggatcagtcaggaccgccgcttcccgtgcaccaccagccgctcctcgacaatgtgggcttcgggttcccggcagcggaccctctgggtttcacgctcgatcccc

SEQ ID NO: 57513 - DNA, 329 bp, Zea mays
  Clone ID: MRT4577_152447C.1
aggaaaagcagggaagaaagtgacacccttcagtttgtacatttcttgagatgcaagcgagtgactttcttgcagacagacagacagacagagaaaaaaaaaatccagcagctaacgtgtcagggaagcaagcacacgcccaccgaggacggaacggaagaaggaaggatcatgcatccgacgtcggcggtgcggccgcgtcgccgtggtggtggtggtcgtcgtctgctgccaggggctggagcgcgcggatcttgatgtcgtagcgcgggggcctggcgccgtcctgaccgcggtcgtcgtagccgaagccgaggccgacagcaccg

SEQ ID NO: 57514 - DNA, 390 bp, Zea mays
  Clone ID: MRT4577_152448C.1
cgtccgccgacacgggggcagacgcacgggttcggtgacatcatgaagctgttgatttttgtcgaccagaactccggtgagagcgggggggcctgcttcaagacttttggctgccgcatccgtcatagcgtctcttggtcgcgctaccgatagggttatggggaccaccatgggtgatgttttgacaatcaacatcgcggtgttctctatgactcgtcccttccaccagtaaagctccattgcaacatgttcgccgaggatgcgattaaagctgcttgttaaagactacgaagcccagaagttcaagatgggtcataagggtgaagacagcccttcagtataaagctgcttaagcatgaaaggatctgccgtgaagtctattgtgctgat

SEQ ID NO: 57515 - DNA, 556 bp, Zea mays
  Clone ID: MRT4577_152449C.1
ttaggctatccatgattttggggcttgggagcgatcatatgacaagccgatggtcaagatcattaaagggggccccgctatgtcccattgatggaaagcccatgacctcgaattttgttgattaaggtgatttacgaaatgtttgttggccatgaatgaagtatcataaaagcggaatgcttatcagggccgccaaaaaaatgggcaacttggaagcacggccagctggctgtttcctacgtgtgctacaaggctgcagcaatgacctgtattgctgtagtcagtatattacatgtttggttggttttagcccaacaaggtgaatgtgcaagcgcagcattgatgtaccatcaggtcatgcaaatctcagactggagtggttttcatgtacagaaagcaaacacgtgcttatttattatttgcgatttggagatggagacagattaagcatgtcgatgtaacttccctccctctgactattttattccctgttctgtgaatggaagtggggcaaaggcttgagacaaaaaaaaaaaaaaaaaaaaaaaaactcgag

SEQ ID NO: 57516 - DNA, 2117 bp, Zea mays
  unsure (1)..(2117): unsure at all n locations
  Clone ID: MRT4577_15244C.1
cgccaggggccccactgcgcctgtcgcatgtcgctcgagaccagagggtaagtccggcgggcgatgggagtgcgtggtggtcgacgatgctcagcgcggtgctgattgatttctccttgggggtgctctccgtgcagaggatggtggggcgtctggtgcacgtccggcgacgaaggtgatgtctgtttccgggagcgggaagcgggggcggtacgtgcggcaggtgacggggcggcacaacgacaccgacctccacgtggccgcgcggggcggggacgccgcggcgctgcggcgcgcgctgttggacgccgctgcggccgtggccgccacgggggaggcgccagaggacctcgaggcggcgcggcgtgcggtggccgcggagcccaacgaggccggggagaccccgctcgtcgccgcggcggagaggggccacctcggggtggttgtggagctgctccggcacctcgacgcggagggactggccgccaagaacaggtcgggctacgacgcgctgcacgtcgccgccagagaagggcgtcatgctgttgtgcaggaaatgttacatcatgataggatgcttgccaaaacatttggccctgcaaatactactccacttatatcagcagctatgagaggccatattgaagttgttgaacttttgctggaacaagatgactttggattggtggaaatggccagagataatggaaagaatgccttacattttgctgctcgacagggacatactggaatcgtcaaagcgctacttgagaaggatcctcagttagcaagaagaaatgacaagaaaggtcaaacagctcttcatatggccgtaaagggaacaagctgtgatgttcttagagccctagtggatgctgatccagcaattgtaatgctgccagataaaaatggcaacacggctttgcatgttgcaacaagaaaaaagagagcagagatagttagtgttcttttgcggctaccagatactcatgtcaatgcactaaccagagaccacaagactgcctttgatatagctgaagggttaccagtatgtgaggagtcttgcgaaattaaggatattttatctcaacatggtgcgctcagatccagggagctcaatcagccacgagatgagctacggaagacagtgacagagataaagaaagatgtccacacacagctggaacaaacaagaaaaaccaacaaaaatgttcatggcattgctaaagaactcaggaagttgcacagagaaggcatcaacaacgctacaaactctgtaactgttgttgctgtgctgttcgcaacagttgcttttgcagctatattcaccgtacctggtggaaatgacaataatggacttgcagttgttgtccagactacgtcctttaagatattcttcatcttcaatgctgtggctctatttacatcattggcagtggtcgtagttcaaataacagttgtcaggggagaaaccaagtctgagcgaagggttgttgaggtgatcaacaagcttatgtggatagcatcggtttgtactacaatatctttcattgcctcgtgctatattgtgctaggccgccatttccagtgggcagcaatattggtatctttgataggtggtgtcacaatggccggtgtacttggtactatgacatactatgtggtgaaatcaaagcgccaaaggaagattagaaaaaaggagaagatgtcaagaagaagtggctcaagttcttggtatgacaataccgagctctcagatactgaacttaatccagtatatgccttgtaaagagtgtttgtctcaggaatcgagtatgtactaacagatacaatagcttacattatttgttgattgttcaatttctccagttccagtaacaacaaaaccacacagaactttcccaaaaaaaaaaaaaaaaaagcggcctgaatttgatggnagcccatgtgctcaatctgttgtacatgtgagttacaattttttttttctttctgagagtcacttctgtgctttatcttcaggattgctcgtattgtaaagctcaagccaagggctgattttagatacttaatccttaaagtacttcaagtttatgtgcaaaaaaacccccccccgc

SEQ ID NO: 57517 - DNA, 284 bp, Zea mays
  Clone ID: MRT4577_152450C.1
ggtgtttttcagctttcattctgttagagtgttatttacgttactgtgtatatctcccttgtaatgggccttggcctacaacactcaactatatatatacactcccaagcctggttagggttagggtttcactctccaactcattcagtacatcacaataaacgatataattatcagaaaaaggtttgtgcttaacttaggaaaaaaagaacaaggaaaataggctactaatttatctgaagtaacagaaagggatgtgagtctatagagtttatgtagagata

SEQ ID NO: 57518 - DNA, 723 bp, Zea mays
  Clone ID: MRT4577_152451C.1
atctgcgcagactccgaaaccaaaccccagactcagcgacagagagcagccagcagcctcctccgccgccgcccatgtcaggaggagggatcgcgcggggccgcctcgcggaggagcgcaaggcctggcgcaagaaccacccccatggattcgtcgcgaagccggagacggtggccgacgggtcggtgaatctcatgatctggaactgcaccatccccggaaagcaggggactgattgggaaagtggatactacccacttactctccatttcagtgaggactaccctagcaaacctcccaagtgcaagttcccgcagggttttttccacccaaatgtctatccttcagggacggtctgcctctcgattcttaatgaggatagcggttggagacctgccatcactgttaagcagattctagttggaatacaggatttgcttgatcaacctaatccagctgatcctgcccagactgatggttatcacctctttatccaggatccagcagagtacaagagacgcattcggctgcaggccaagcagtaccctgctctggtttgaggatccatgtagcagtctaaaatcataaattaccgcacctgaaaatatgaagtttgactaaatataaccgaaagcggggtattgtggagagctttccattgtgaccgtggacatttgtgacgtgtggtctggtgttgaccaaacaaaaatcaggtccttctgc

SEQ ID NO: 57519 - DNA, 570 bp, Zea mays
  unsure (1)..(570): unsure at all n locations
  Clone ID: MRT4577_152452C.1
ccgggtgtcgacccacgccgtccgnaaaaaaaaaaaaaaaaaaaaaaaaaaaaaaaaaaaaaaaaaaaaaaaaaaaaaaaagaaaaaaaaaaaaaaaaaacaaaacataaaaaaaaaataaaaaaataaataaagataacataaaaaaaaaggccgtggcgcgtttgatgttccaagtctttacctcgggcttgacctgtggagttccgggggcttttttttttttgggatctaattttactttcttggcggctgggttttttaaaggcctttttttgggagggcccttgcttttccccactttagccccctttttgcaccatccggtttgggccctccgggggtgtttccaaagaggccgcccctggggggccctccctttttgtcccctttcctttttgtgaaattgggcgcccccctgtaccggtctcttaacttgggctgttttggtggtttcgggcactccccctctttctctttcttttagccctagctcgggggggtttccctattgggcttccctttctggcccccactgcaggtttccccggtgatgttttatttaggggg

SEQ ID NO: 57520 - DNA, 581 bp, Zea mays
  Clone ID: MRT4577_152453C.1
aaaaaaaatttcaaaaaagccaagcaagtgttggtgcgcaatattaatttgttagagtgataaattcatattgcgaggggctactgttgggggccttcaacttctgaaggtcctcaaaaacataatttgacaatgttttccaagtgaaatatgtgaacaggtatcttcagattcggatcatgagcatacagagcatggtcaggacgaagcctgagcgagacgaaaggtgattatgacgaaggacaaggtaatcacgaagctgtgcgcaggaaaagcttcgacatggcagcagaaaaggggaaccgacttaaagatgaaaaggcaaattagacctcgaagaattactatagagttattagcaaatgtaaagggcatgggtgtaattttacatgggctgcatcccgtgcctataaataggtgaacagtatcctcgtactgttcacgctgatttggcattcgctttttgcatcacgcttgtacccttgctttccttcaaaccgaaggtacatttataatttgttattgtcgatatgataatgcaaataaaaaataagttgataataaaaacaaaaaaaaagagg

SEQ ID NO: 57521 - DNA, 713 bp, Zea mays
  Clone ID: MRT4577_152454C.1
cgcacctgcacacaaacaccccccacggaccagcggagatgtatcagctctccctgttcgctttggcctccgcttgccccctccctctcgcgtctctatacatcgccgctgctgtgttgcagttcagtttgcatcctgagctctctcctggaccagccgagatttctcgctctgcgcatctctgattcatcttcgtcgagaggagctgttcctcttctttgccgcctcgaatctgggactggtcggttttctggatccctgctgcctgtcgggttctcgagaggtgtaaaatccaatggagggtgtgtcatcgttgaaccagccgttgatcaacgacgaccggcagcccgtgcccagcagtatcgccaagggtgatcaaatccaaggcctgttgtcgggtgaatggacaaatgagcggcacagctcgtacataagctccatggaggcatctttcgtggagcaactccgtagtggttccaaggccatccaggagggcttgtgccagagcatgaggattccgagggatgatgctcgcagccatgacgtccctgagagtccgtgggtggtggtgaggcgtttcaggccacgcggtgtccaccatggcgatggaatggaagtggaacctttggtcgatggttatggatcaggtactgacacggcccgagagaaggtccggacccacgcaagagtagcgaaggcttctgctattattg

SEQ ID NO: 57522 - DNA, 358 bp, Zea mays
  Clone ID: MRT4577_152455C.1
caacctaaacaacaattacaacacccaaactggttatatttaacaatacaaaccatcggaacgtacaatcaacaactgcgcctaccaaaagggaggtgtgctatcacaatacaaaaacctagcatgctactagcaatattaattgaatacattcaacccaattgatctgacaaacaaataagaaaaataaaaacaacaacagctggaacagaagcagacatcgctataccaagctagcacatgagaaccatgccgactaactacaacataaacaaataatttcatatacctcttatagatctagaacaatgaaccaacatacctgcaacaacaatggtaagcaataagaaaataccag

SEQ ID NO: 57523 - DNA, 188 bp, Zea mays
  Clone ID: MRT4577_152456C.1
gttgagaccgataaaccataacttttttttgattgaccgaaaaaactggaagcacagtgaaaattacatgtatgacacagggataaacaaaaaaacatatcagacggtgttcattgttggatgcaatacaccacggagcgtaaagatttatcttaggacaacggattgtaaataaaaaaacctaaggg

SEQ ID NO: 57524 - DNA, 258 bp, Zea mays
  Clone ID: MRT4577_152457C.1
aaaaaattaaaaattccttaaagaccggaaaatcgaggaaagcaacagggccaccggttcggcatggggggttggagggacccaaggaaccaaaacaaaaaaggcccagggcccccgggccacaagggcgcccaggccaaatggccagtccgaccggccaacagggaaccaaggaatttaaagccggccggcacccccacaaccagcaaggggggggggggaatcctacaacctaaggcaggaggaaaccggggcccc

SEQ ID NO: 57525 - DNA, 808 bp, Zea mays
  Clone ID: MRT4577_152458C.1
atcttcaaaaaaactcatccacgccttgcagtcgccacgcccgcgctttgccttgcagttgcgcgcaactacagcgtcgctacgtcgcgcccctagaggcctcgtcgtcctgctgcgaaggtatgacgcctctctctcctcccccgtgttcccctctcctcgcgctgcgcaaccgtagcatcctatccgtgccacgtcgctgcttcaggtcgcgctctgggccgtcaagaagcccgcacggcgtgcacccagccccctcgccgtcgagccttagtgcccccagatgcagccccgtgtgtgtcatggccgttggccagagccacccaaccaatcctgttgctacgttgttcccgggcgaagcatccgtgatatcgtccccgaaggcgttccccatggcaggtgagcccctcggagccccctgctttgcgcgcgccaggcgaagtctccatggacggcgagatctcctgctggccgatctcctctccctccgttctcagcttcgtccgaggaagaagaaagttgttgttcggttgcagaaaaaacaaagagaaaaccatccccactccccggctctcggctctctctctgctcggcgccgctgctcagccatctgcccctgtgcgtcgcgcgcctggtgctagtcgcgctccagcaagcccgcgtgctggtcaccggtgctgtccagccctgcctcaccattgtcatgccgccgccggttgcctgcccgtctttgcgctctggagtcgccagttgcctgcccgtctttgcgctctgcagtcgccgtctgcgttgagagggaaagaagcag

SEQ ID NO: 57526 - DNA, 220 bp, Zea mays
  Clone ID: MRT4577_15245C.1
aattccctcgtctacccactcttccttccactcacattcccacaccttcaatttccattcctcatcatcaccatcctctatcagattggcttcctaacaatactatcctactcatattattacttcattccatccatacaccaatccaatctcatgattctataactctattattaccatatctaatattatataaccatcaaactctaatacactctta

SEQ ID NO: 57527 - DNA, 485 bp, Zea mays
  Clone ID: MRT4577_152460C.1
gccacacctccgatccctcgtactgacacgcatccagccaaagcacaagcccatagagacagacagattatgcgcgcgtaaccgactgacagagacaacgatagtatacgggcgtgaatgcttcctggcgatgacagacggggacggggggcggatactacctggcgatgaagacggctcctgatggcgcggacctgccggagctccaccacgctctgctcaacctggacctccacgcattcgtcctcggcgggcggctgctgttcaaccaccccttcctcatatggctgggcctgctgttcggaacctgattgcttacattgctgcacacccttttctctatgtatgtgtgtgagatactgcatacccgatcctatattgatgcgggtgataaaggctattcattatcccacttgtttattggcaattttgcatatatgattagataatcgtctattgataaactatcattctgtatgggatag

SEQ ID NO: 57528 - DNA, 330 bp, Zea mays
  unsure (1)..(330): unsure at all n locations
  Clone ID: MRT4577_152462C.1
attataataaggaaggccggttttaggatatttatagtatcaaatcatttcatcggggaccaattaatatatggttacagcagatgcaatcggatcaaccaacatgcaggtagacacacgtacgttcatgagcacaaagactgacgccaaacatgcaggaagagattncaaactgaaaaactctgtttctttttttttcacacacaccnaacaatncctatgtntgggagccagcttggccttgtttattattggtcaaccaccaccncaagcttgatagataataatcatttccatgggcgncgatcgaagtgatcagcagttgcaggg

SEQ ID NO: 57529 - DNA, 314 bp, Zea mays
  Clone ID: MRT4577_152463C.1
tagcgtcctgccgcgtcgtgcttgtctaacgcgcggtccgcccccggagcagcggggcggggagaaggcactgggcgcaggcacttcgagcaccggtggacgcgtggccgacgccggggtcgcgcgtccggaccgcgttgtcgcgggtggcaggcacaccgcactcggaggggggccggaccagccacccgcccctgcgaggcccgccccacgcctgtacgacgccgcacatgcgctgacgaacgggtggccgccccgagacatggggcgcgcaatggattttgtgacgatctggttttgttggtgcccggaat

SEQ ID NO: 57530 - DNA, 540 bp, Zea mays
  Clone ID: MRT4577_152464C.1
agtggaccttccaaagtcctttttgagatcaaccaggacaaggtttttggactgacaataaacccagcgatccttcaggcgattagaaagaccagggccaagactctaggttttgatgggcgtcagagcaattacgctgagatggaccatgtgaggcaggagctggtccatgcgaatcaaatctttgctcagaatccatcgtggccagtcattgcggtcactggaaaagctatcgaggaaacagctgctgtcatcttggggatcctccatgacaggaagcagaagtgctccatgccacgcatatcaaaacgatactagtactgtgttctatcccttctctactacaccttgtaatctgtgcatgttttgaataagctttgtgtcaagcaccatagccttcatgtaatttttttttgttggaccaccttctaggtggtgccgtttgtatcataaacataacttgaagtttagtgcaacagaaacacatgtatattgcgtttacgaccttctattggccttaatgcctcacgttatttggtc

SEQ ID NO: 57531 - DNA, 1912 bp, Zea mays
  Clone ID: MRT4577_152465C.1
acatgtgtttctgctgcgctaaacttcaagttatgtttatgatacaaacggcaccacctagaaggtggtccaacaaaaaaaaattacattgggtacctcgaggccggccggggcaacgccccggcccagtctgtcgctttggaaacggttggtgacaccataaccactcctgttcgtcgtgcacccacgcgggcgaacagtgaaaggcatcgtctcgacgtctcgtgaccgctggactcgccgccgccccaggctagctcgatgattgggtgcgccaagccgctcgcggcgccgctgcaggcatgggctcgcccgccgtctcccgccggtcgccgcctccccccctcgttctgcgcccctgacacctccccagctctcacccgcgccgtcgagagcccaggccagtctcagtctgacgacgccccgccaccacgctcgggtgaggccgcctcgtccctggcgccgcgcgcgagctcgcatctcgaccgatggtcccggtcgcgggcgctgcggtcgggccaccggccggcgctgaaccgcgcggctctctcctcggcctcggtctcggcgccgccggtgatcaagtcgccgcggcccgaggacgctgccgtggcggtggaggatggcgaggacgacgacgtgtgcgaggccgagagggacgccgcggccgggaaggccatctacatagtgtcagacgggaccgggtggaccgcggagcactcggtgaacgccgcgctcggacagttcgagaactgcctcgccgaccgcggctgcgctgtcaacacccacctcttctccttgattgacgacatggatcgacttattgaggtaataaagcaagcagcaaaggaaggggcactggttctctacacccttgccgatccttcaatggccgaggcgactaagaaggcctgcgatttctggggtgttccatgcaccgatgttcttcggcctactgtcgaagccattgcctctcacatcggtgttgctccatctggaattccacgaagctctccgagtcgaaatggtcggctatcagaggattacttccaacggatcgatgctatcgatttcaccatcaaacaagacgacggggctctgccacagaacctctaccgcgcagacatcgtgcttgccggcgtttcgcgtacagggaagacgccactgtcgatatacctagctcaaaagggatacaaggtggcaaatgtcccaatcgtgatgggagtggaccttccaaagtccctttttgagatcaaccaggacaaggtttttggactgacaataaacccagcgatccttcaggcgattagaaagaccagggccaagactctaggttttgatgggcgtcagagcaattacgctgagatggaccatgtgaggcaggaactggtccatgcgaatcaaatctttgctcagaatccatcgtggccagtcattgcggtcactggaaaagctatcgaggaaacagctgctgtcatcttggggatcctccatgacaggaagcagaagtgctccatgccacgcatatcaaaacgatactagcactgtgttctatcccttctctactacaccttgtaacgtgtgcatgttttgaataagctttgtgtcaagcaccatagccttcatgtaatttttttttgttggaccaccttctaggtggtgccgtttgtatcataaacataacttgaagtttagcgcagcagaaacacatgtatattgcgtttagaaaaaaaaaaaaaaaaaaaaaaaaaaaaaagcggcctagtgtcaaggaccatagccttcatgtaatttttttttgttggaccaccttctaggtggtgccgtttgtatcataaacataacttgaagtttagcgcagcagaaacacatgtatattgggtttacgaccttctattggccttaatgccgc

SEQ ID NO: 57532 - DNA, 299 bp, Zea mays
  Clone ID: MRT4577_152466C.1
tgtttttttttgacaccgttggtctttctctttcgctctgtttaaaaaaagacattattatgatagccacttactgataacccctggtgacaatcttgtgagattatgcttggtgagcaccaccctaccaagtggcagttgctggataaactacagcctataagcggccccttgaacaacatggccttcttaactgggacaataacatcgcggaaccaacgtcagacgggtattcacatgctaacttactggtcacctaacattacaggcgaaacttttatctttacaatggctgggcg

SEQ ID NO: 57533 - DNA, 192 bp, Zea mays
  Clone ID: MRT4577_152467C.1
ctttcctgtgttggctccatcctatcctgcgcctgctgctgacctttggcgcctttgcatacttggcggccctcaaactggtccacaacatccgtagaggtggacaccagacgaaatcacagccgccactgcgaaggatgaatgcctttcatgaaacacagtctgaaatgaaggagtgtatacactgacgtc

SEQ ID NO: 57534 - DNA, 430 bp, Zea mays
  Clone ID: MRT4577_152468C.1
aaaaacccgggtcgacgagcagaccatccggcggccgccctccttttttttttttggggggtattttaaaagtttattccggcttttcaaccccttttaaaagtgttattgtgcttgacaaacagatggcccatgttggggccaaggaaagggaggggcccaaaaaaaaaaccaggggggaaaaaacccccaaaaaaaaagggtaaaaaaaaagagaacccaaaataaaaaaaaacccaaaaagaaaaaagcggggggaaaaaacccaaaagtaaagggttaaccaaaaagggaaaagggaaaaaatgtaaaaaaacaatggaacaaacgtgaggaaaaagggaaggggcctggggaccacaaacaaggggggaaaaaaatttcccccaagggggggggggagccgccccacccaaaaagggagggcggg

SEQ ID NO: 57535 - DNA, 830 bp, Zea mays
  Clone ID: MRT4577_152469C.1
ggccggccgggccggggaaaggatcaatagtctcgtaggagtgacggggtctgtcgtgtctcgacccgacctccctccctccttccgttccgatctaaacccgccgaaaccctaatcctcatgcccgccgccatgggcacccccatcctgaccctccccgcaccggatggcaacggcaccggtggcggcgacgccaaccagcagctgctgcaggcgccgccaaagcctccccctcccggcgcgaagacggaccccccggcgacggtggccacccacacgcgcaccatcggcatcatccaccctccgcccgacatccgcgtcattatcgagaagacggctaccttcgtcgccaagaacggacccgagttcgagcgccgcatcatctccctcaaccagggcaacgccaaattcaacttcctccagccctcggatccctaccacgcctactaccagcaccgcgtttccgagatagccgctacgccgcccagcgcggacggcctctcgggcgcggagactgacacggctcccgccgaagcgccagcgtcgaccccggccgacggcgccgccgccgtacccgcagatggcgccgctgtggacacaaaggccgaccactccgcgcccttccgcgtggtgccgccgcccaaggtgctggtgccacccaaggcggagctgtacacggtgcggctgcccgagggtatcacaggggaggagctagacatcatcaagctgaccgcccaatttgtggcgcggaacggggaagaacttcctgacgagcctggcacagcgcgagagcaacaacatgcagttccacttcatccggcccacgcaca

SEQ ID NO: 57536 - DNA, 860 bp, Zea mays
  Clone ID: MRT4577_15246C.1
aacgctctccgccctctctcgcccgcattccccaatccaatccgcggcggcatcggcggcgacgccaccaccaccgggaagctccgccccttctccgtctccgctcccgtcccctcccctcccctccacacgcgcccgaatcgcgccgcagatttcgccgccccccgcgcctcccccgatttcggcggaacagccgctagggtttcgattcgcctcgggatcgggttcgggccctgatcggaggccgccttcgtcgtccgggggtacaatccgccgccccccctgcttcctggcacggcaggaaccatttccagggaaggatacggcgatggaggggcacgtgttcggaggcggcaactggggctcgtcgccctaccctggccccaacgccaacatcaacgccagcgtcaacgagaaccagttcatgttcgatgccaaggccgcgccgcagcagcttcagctcttcgggagcaacgcggttggcaccagtggatattataactacaatggaaatgacaacccatatgttacgaaccaaccaagaaagacaagcaattgtgcagcggatgaaaagaagctcaagcttcagatgtccttgaacaacttacatgcaggagatgccgaccggttggcatgtactggtaattcaagtgttgtgtctactgggctgaaactgtcctacgaggataatgagcataattcttccttcacgtctggtactggaagcatgtcttctttgacttccacgacgccttttggtcatgatattatgactgaaatggagaaagggaaacaagagattgactattatttgagaagccagttggaaacactcagtaggcgtgtgaaagagatgaagc

SEQ ID NO: 57537 - DNA, 669 bp, Zea mays
  Clone ID: MRT4577_152470C.1
aacaattcggctcgcggcaaaaataccaatccgccttccatgttctcgtcgctgcctccgtctgacggctcgaagctccctccagttccgatctaaacccgccgaaaccctaatccccatggctgccgccatgggcaaccccatcctgaccctccccgcaccggagggcaacggcaccgggggcggcgacgccgaccagcagctgcagcaggcgccgcctaagccgcctcctcccggcgcgaagacggaccccccggcgacggtggccacccacacgcgcaccatcggcatcatccaccctccgcccgacatccgcgtcatcatcgagaagacggctaccttcgtcgccaagaacgggcccgagttcgagcgccgcatcatctccctcaaccagggcaacgccaaattcaacttcctgcagccctcggatccctaccacgcctactaccagcaccgcgtttccgagatagccgctgcgccgcccggcgcggacggcccctcgggcgccgatactggcgcggctcccgacgaatcgccagcgtcggccccggccgacggcgccgccgccgcacccgtagatggcgctgctgcggacgcaaaggccgatcactccgcgcccttccgcgtggggcccgcgcccaaggtgctggtgccacccaaggctgagct

SEQ ID NO: 57538 - DNA, 681 bp, Zea mays
  unsure (1)..(681): unsure at all n locations
  Clone ID: MRT4577_152471C.1
gggaacggcggcctaaggggaagcttggcgtcgaggttgcccccgagctgcagctcaaccgcatccgcatcacactctcatccaagaacgtcaagaacttggagaaagtttgtgcggatttggtaaagggagccaaggacaagcatttgagggttaagggacctgttaggatccctactaaggttctccacatcaccactcgcaagtccccttgcggtgaaggaacaaacacatgggattggtttgagttccgcattcacaagagggtgattgacctaatcagctcccctgatgtggtgaagcagatcacctccatcacaattgagcccggtgttgaggttgaggtgaccattgccgacgtgtaaggacgtgaagttcagcaatgtcatcgacaatctttttctttgtgctccctgtgtgctcgcaagagagattttgagttattattagcatacaagacttcttcccccctataattctatgttagatgtttgtctgatctatggcctgttcaacttgaaattttgattcagtaatctttatgtggtgctaattgaacttggatcgcaccaaanaaaaaaaaaaaaaaaatacgttaggcccatgctgaactggatatgggctggactgggctggactgggactgtaaactcaatacatggcaagattgcttgatttggc

SEQ ID NO: 57539 - DNA, 573 bp, Zea mays
  unsure (1)..(573): unsure at all n locations
  Clone ID: MRT4577_152472C.1
acgatttcaacttcgctcttcgccgaatcgagactttgtcctcttctatacagtggcgtcgtctagccgtcatccactctcgctgctcctcaaacgcaagcacgcggcgctccgacccatcttgtctaccagcgtgcccgtctcgacggtagcngcggcgccagaatggcctcgctctcatgtataaccgagacatatagacagtgaaagtgaaggagctgtactatacgcgaatgagggacataatgtaaatggctggtgcgttgagtggtgatcaaactgtctacctataccgccctgaatatgccggtgttgaatgaggctatatcgggttaaatgtgacccataaggaagatgatgggatgagtgtgactgctggagtcgcatcagatgtgatagcatctgctggcattgcttctggcgcaaaggagaaaggcttttctggatttatgatcgactttatgatgggtgtagtttctgctgctgtctccaagagagctgcaagttcgagtgagtgtgcccagtattggaggcaaaacgagcatgaggcgctcaagagcggctagctgtctg

SEQ ID NO: 57540 - DNA, 1666 bp, Zea mays
  Clone ID: MRT4577_152473C.1
ttcggggtaaccctagattgcagcgccgcctggcatcgagcagccgagcgactaagcgaagactcccttgttccccgagataaataacctcgaacccatactccggcgaaaacctatagcttgcagcgccacctacaccgagcagcaagcgaggaagcgaaacccatttccccgagcgcaagagtaccatggcggcggcggcagtttatggcggcctcaaggggaagcttggcgtcgaggatgcccccgagctgcagctgaatcgcatccgcatcaccctctcatccaagaacgtcaagaacctggagaaagtttgtgcggatttggtaaagggagccaaggataagcatctgagggttaaggggcctgtcaggatccctactaaggttctccacatcaccacccgcaaatccccttgcggtgaaggaacaaacacatgggaccggtttgagttccgcatccataagagggtgatcgacctgatcagctccccagacgtggtgaagcagatcacctctatcaccattgagccgggtgttgaggtcgaggtgaccattgcagacgtgtaatgacgatctatatattcgtgttgcttttcgtttttaaaagccccatgtaatgtacggttgtcgacatatttgcctattattaaaaattgtaagacatcacattttttaattgaggttgcatcaataaacaagttgatgtagaccaatatggtttgtgtgtggtttacatgttttaaatataaatatatgtgggcagctaacacatctaaatgtcaaacaaatcccttttgatctttgagcttacaagtttcttcgataaaaaagtaatttgattaccaagcaactactaactttatgtatgccagacctctaaactgaatgttgtttaagtcttttgtgtgcattgagatattaagtttatacaatttgtatgcctatattctattataccagattgcatgttcatgtcatacatcttaggacctggcaatctattttgacctgtattgctcttcttgtttataggcacatgttgtttcagcgattttgaattttagtgagaattgtacaccagaatttttgacgccttaactggatgaaatgaatggcaagcaaatggtgcacgggagagcattgacagctctagtgtcagtagcagattcatcacaggctgttgcgctcttgggagagcagcccgtctaccacgccgtacaacgtaccattggctgtggggccgcattcccccagtggcgctgcccggtaaggaggctgggtatttgggggagtatcggcgaagcatcatggctcccgacgaagcaggggctgtgactagcgcgctggacgttgctgggcccgcctgatgctggcgacggctgctgcctggggcagcgacagagctcatgatcgtcgagacctttgatactagattggtaggacccgcgttccctaatactgacgatatgtttccgttggaacgcacgggccccccacctatagtagagatgatgaatgaccagaatagggggtgcatatttgcaagagaacaagagcctcctctgtcatacctcctctgtcctctgtgtcaaattaaaattcgctctaaagttttaatgaattcatataaaacttgaaaaaaagttttaggcgccgttagagat

SEQ ID NO: 57541 - DNA, 525 bp, Zea mays
  Clone ID: MRT4577_152474C.1
ccggccgggagcgaacacagatcgccatctgcacccgaattacactgcatccatacagtgatcattgacaatatcattcgatatctcgctggaaatggtgcggctggatttcgcacatgctcccctgacctacatacgtgtactccataccgcgccacgaggggttgcacactcagcttgtcgacttgggtctgctgcctcatgatgagggtgtgtctgttctacacttctatgaatgatgtggatacactcctactgctgcctcatcatagtcatagatgtgatgaacactctcatggtcatgcacacgaactatgagggatctatgtcgatatcttcccaacaacacacttactggatgaggacgatgccacggatgctacagacgctatcctttacagagtatcgattctatcgcccttgctgggactactgttggtacgtgaccgctgagcacgaactgccactgactgtatagcgcctatgtgcccgatactgagtacgggtattcagacaatcaatcgc

SEQ ID NO: 57542 - DNA, 635 bp, Zea mays
  Clone ID: MRT4577_152475C.1
acctcgggccggcggggagttgagcgccacctacaccgagcagccaagaggaagcgaagacccatttccccgagcgcaagagtaccatggcggcggcggcagtttatggcggcctcaaggggaagcttggcgtcgaggatgcccccgagctgcagctgaatcgcatccgcatcaccctctcatccaagaacgtcaagaacctggagaaaggaacaaacacatgggaccggtttgagttccgcatccataagagggtgatcgacctgatcagctccccagacgtggtgaagcagatcacctctatcaccattgagccgggtgttgaggtcgaggtgaccgttgcagacgtgtaatgacgatctatatattcgtgttgcttttgtttttgtgctccccttgtgtgcctgtaagagagacatcgagttattgttagcttataatccttttgtagctgtatgtcttatctgtgggctgcgcaacttaaaattttggttcagtaatctagtttgtcagggcgactagttcgcttcagtcttctgtcaactattgtgatgaacctcgcttcgttcaattttttatgataaaccttgtatttagcgaaaaaaaaaaacaaaaaaaaaaaaaaaaaagcggcc

SEQ ID NO: 57543 - DNA, 737 bp, Zea mays
  unsure (1)..(737): unsure at all n locations
  Clone ID: MRT4577_152476C.1
atcacatttcttaattgaggttgcattaataaacaggttgatgtagaccaatatggtttgtgtgtggtttacatgttttaaatataaatatatgtgggcagctaacacatctaaatgtcaaacaaatcccttttgatctttgagcttacaagtttcttcgataaaaaagtaatttgattaccaagcaactactaactttatgtatgccagacctctaaactgaatgttgtttaagtcttttgtgtgcattgagatattaagtttatacaatttgtatgcctatattctattataccagattacatgttcatgtcatacatcttaggacctggcaatctattttgacctgtattgctcttcttgtttataggcacatgttgtttcagcgattttgaattttagtgagaattgtacaccagaatttttgacgccttaactggatgaaatggtgaataaattacttgttcttctttagttacgcaattacttgtgttgaattaggtttcaggttgcttcaaatatatttgttatcatggttagtaaacaatgctaactgctcatgttcatattctagaatggcaagcaaatggtgcacgggagagcattgacagctctagtgtcagtagcagattcatcacaggctgttgcgctcttgngagagcagcccgtctaccacgccgtacaacgtaccattggctgtggggccgcattcccccagtggcgctgcccggtaagga

SEQ ID NO: 57544 - DNA, 970 bp, Zea mays
  Clone ID: MRT4577_152477C.1
ccaagcaagcttgccatgtattgagttttacagtccagtccagtccagcccatatccagttcagcatgggcctaacgaattctcgagtatgtcaacctttccacaagatatgtcagccaatacaaatatgtaccgttaggggccttttttttttttttttttactttagcaggctaaaatgtattattaaccaaccaagcagccaccacataaagttcgacaaccagtttgtacacaatgatccacaagacgattggtgcgatccaagttcaattagcaccacataaagattactgaatcaaaatttcaagttgaacaggccatagatcagacaaacagctagcatagaattatagggggggaagaagtcttgtatgctaataataattcaaaatctctcttgcgagcacacagggagcacaaagaaaaagattgtcgatgacattgctgaacttcacgtccttacacgtcggcaatggtcacctcaacctcaacaccgggctcaattgtgatggaggtgatctgcttcaccacatcaggggagctgattaggtcaatcaccctcttgtgaatgcggaactcaaaccgatcccatgtgtttgttccttcaccgcaaggggacttgcgagtggtgatgtggagaaccttagtagggatccggacaggtcccttaaccctcaaatgcttgtccttggctccctttaccaaatccgcacaaactttctccaagttcttgacgttcttggatgagagtgtgatgcggatgcggttgagctgcagctcgggggcatcctcgacgccaagcttccctttgaagccgccgtaaactgccgccgccgccatggttctcttgtgctcggggaaaagggagtcttcgcttagtcgctcggctgctcgatccaggcggcgctgcaagctaggccggccggccccgccggcgccaaaggcaatttatagtgcaagttaaccc

SEQ ID NO: 57545 - DNA, 237 bp, Zea mays
  Clone ID: MRT4577_152478C.1
aggtatatgaatggagctaattgcttgtatggcaaccaaacatggagtaggatcaaactgcctactaataataatcaatccaaacagaaaaaaaaagatggaaaaatgacgcaacacctcctcgctctatacaccgaagaagcggggcccatcgtactacgcctcacatgagaaaccgactgaccgtgtaggcgcgactgatgagttactaatgatggtttcatatatgggagcggg

SEQ ID NO: 57546 - DNA, 399 bp, Zea mays
  Clone ID: MRT4577_152479C.1
tacctcgaggccggccttccgagcgctgtatgagcctcaccaccgacgctcgtgcctcctcgacttcctgcgctgtcattggcatctgtccgtcgcccgctcattccctcgtctctgtacggtgagagtggtacgcggacaacggtaccacccacctgagacttcgtcatgcacgagatcacggcgggcgccggcccgagcgcggtgtaggtgacttaggtggccgggggggggtcgcacgcctgaggcgccggcgatgggcatgaggatcggcgacaccagggtgatccgagacccgctgacaggaggagcgtgtaccgcgtgcgccgcggtgggccgcatgaatggcttctacatgctggcgtcccagatcggggcggcgcttatggtgtgcgccaa

SEQ ID NO: 57547 - DNA, 335 bp, Zea mays
  unsure (1)..(335): unsure at all n locations
  Clone ID: MRT4577_15247C.1
cccacgcgtncgcggncgcgtgggcgtggggggtgtggtggctcggatatgatgctgcgtggtctggctgtgagatcggaggctcagcagttcgagctcgctgctcgtagggaaagttccgcgtaaagttgcagatgatgctgggggctacggagcgagaacaagttactgtagtgaggggggggcgggggtggtggaggcgcctgttaatgtgggttgctgtcagatgtgatggattattttaaatattgctagggttctgccttacctgttgggcgtcccctggaaggatcgggtgccatcgagccttacgacgggctactgtggtacaagga

SEQ ID NO: 57548 - DNA, 1151 bp, Zea mays
  Clone ID: MRT4577_152480C.1
ggatctttgcattactgagagcagcagcccccacgggtccagccacgccgcgatcgtgcagcgcagcgactaagcgaagactcgatcttccacgagaacaagaccaccatcgcggcggcggcaggatatagcttgcagcgccacctacaccgagcagccaagcgaggaagcgaagacccatttccccgagcgcaagagtaccatggcggcggcggcagtttatggcggcctcaaggggaagcttggcgtcgaggatgcccccgagctgcagctgaatcgcatccgcatcaccctctcatccaagaacgtcaagaacctggagaaagtttgtgcggatttggtaaagggagccaaggataagcatctgagggttaaggggcctgtcaggatccctactaaggttctccacatcaccacccgcaaatccccttgcggtgaaggaacaaacacatgggaccggtttgagttccgcatccataagagggtgatcgacctgatcagctccccagacgtggtgaagcagatcacctctatcaccattgagccgggtgttgaggtcgaggtgaccattgcagacgtgtaatgacgatctatatattcgtgttgcttttgtttttgtgctccccttgtgtgcctgtaagagagacatcgagttattgttagcttataatccttttgtagctgtatgtcttatctgtgggctgcgcaacttaaaattttggttcagtaatctagtttgtcagggcaactagttcgcttcagtcttctgtcaactattgtgatgaacctcgcttcgttcaatttttttttatgataaaccttgtatttagcacgtgaccgaattctattagcataaagtaaactgggtgtcgaccaaaaaaaaaaaaaaacaaccttcttgcggcagcggcgtgctcgtggggcagcgacaaagctcatgattgtcgagaccttttatactagattggtaggagccgcgttccctaaaactgacgatatgtttccgttggaacgcccgggccccccccctatagtaaagattatgaatggcccgaatagggggggcctattttccaaagaaccagagccccccctgtcaaaccccccctgtcccctggggccaattaaaattcccttctaaagtttttatt

SEQ ID NO: 57549 - DNA, 393 bp, Zea mays
  unsure (1)..(393): unsure at all n locations
  Clone ID: MRT4577_152481C.1
nnnnnntttttttttttttttttttttttttttttttttttttattttttttgttgtatttgttttgtttatttacaatttttacaatataaaaggtcgggagccacacaaaaaaataaggtttggggcacgggggaacatttcaaaagcaacgggagggaaaattccccaccccgggaaactactgttaaaagggggcgccaagaggaagggtctataaaagggggtacccttgtcggggaacccacacacccaatggggaaaaaagggccccaagggggggggcccccccccacgggggccccactgacccggccaaaaaacgcttctacagggcctttttgaaacaggagggcacaaaggcctcgcgtggggcacggggagcccaaccag

SEQ ID NO: 57550 - DNA, 1646 bp, Zea mays
  Clone ID: MRT4577_152482C.1
gttacttgcaaataaattggctggaacccagcccgggccgggaaaccctagcttgcagcgccgcctggatcgagcagccgagcgactaagcgaagactcccttttccccgagcacaagagaaccatggcggcggcggcagtatacggcggcttcaaggggaagcttggcgtcgaggatgcccccgagctgcagctcaaccgcatccgcatcacactctcatccaagaacgtcaagaacttggagaaagtttgtgcggatttggtaaagggagccaaggacaagcatttgagggttaagggacctgttaggatccctactaaggttctccacatcaccactcgcaagtccccttgcggtgaaggaacaaacacatgggatcggtttgagttccgcattcacaagagggtgattgacctaatcagctcccctgatgtggtgaagcagatcacctccatcacaattgagcccggtgttgaggttgaggtgaccattgccgacgtgtaaggacgtgaagttcagcaatgtcatcgacaatctttttctttgtgctccctgtgacctgtgtgctcgcaagagagattttgagttattattagcatacaacacttcttcccccctataattctatgttagctgtttgtctgatttatggcctgttcaacttgaaattttgattcagtaatctttatgtggtgctaattgaacttggatcgcaccaatcgtcttgtggatcattgtgtacaaactggttgtcgaactttatgtggtggctgcttggttggttaataatacgttttagcctgataaagaaaaaaaaaaaaaaaaaagttgcgttatagggagccaaggataagcatctgagggttgaggggcctgtcaggatccctactaaggttctccacatcaccacccgcaaatccccttgcggtgaaggaacaaacacatgggaccggtttgagttccgcatccataagagggtgatcgacctgatcagctccccagacgtggtgaagcagatcacctctatcaccattgagccgggtgttgaggtcgaggtgaccattgcagacgtgtaatgacgatctatatattcgtgttgcttttgtttttgtgctccccttgtgtgcctgtaagagagacatcgagttattgttagcttataatccttttgtagctgtatgtcttatctgtgggctgcgcaacttaaaattttggttcagtaatctagtttgtcagggcaactagttcgcttcaaaaaaaaaaaaaaaaaagcggcccaggctgggtatttgggggagtatcggcgaagcatcatggctcccgacgaagcaggggctgtgactagcgcgctggacgttgctggggccgcctgatgctggcgacggctgctgcctggggcagcgacagagctcatgatcgtcgagacctttgatactagattggtaggagccgcgttccctaatactgacgatatgtttccgttggaacgcacgggccccccacctatagtagagatgatgaatgaacagaatagggggtgcatatttgcaagagaacaagagcctcctctgtcatacctcctctgtcctctgtgtcaaattaaaattcgctctaaagttttaatgaattcatataatacttgatt

SEQ ID NO: 57551 - DNA, 123 bp, Zea mays
  Clone ID: MRT4577_152483C.1
cgcagacgcagtgggcaggacgctgtgggcgtggcccttacatgcgcctttcatctccctttatgtctcacgcgtgggtcaccttccgcggtacagcgcagttccaccccgacaataggcggc

SEQ ID NO: 57552 - DNA, 299 bp, Zea mays
  Clone ID: MRT4577_152484C.1
aaaaaaaaaatggcccctggaaaaattaaattggggtttaaaaaagttttttcaaaaaccaatggggaagactctttttagggtggggaaacaagttttttggggcccaatgccattttgccgaagaaaaagcaaaaaaacggggcagggggggggatttttaggcccccctttggcctaggcttttgaaaattttggggttggcccctgttaaacgatggccccccctctttcgcccaagcccccttttagtttttttagaggggcggggtgttcccccccgggaccaaggggctttt

SEQ ID NO: 57553 - DNA, 391 bp, Zea mays
  Clone ID: MRT4577_152485C.1
tcgcccacgcgttcgccgactcgttggagcgatcaaacgctcatcatggctgggaatgtgagacacgatgtaggcgtcaatgcgatctcaggctagaacggctgtaactctcgggagatcggcgagcaggcaatgatgcaggcctacctaagggcctgccagatcgaacatctcggctatctattgcaaggactgtctgtacgatcaatcgacacggtatgacatatcgactggtgtggctccctacaatcacactcggggctgcttgtacactgacgtgtacacgaccaccttcaatagcatgggcacatgctgcatcttaccaaccttcgaggattgtcagtgttgtaggtgccgcttatagatcatgtgccatcagcctgtaaagtgc

SEQ ID NO: 57554 - DNA, 374 bp, Zea mays
  Clone ID: MRT4577_152486C.1
ggcagccccaaaaaaccccattttttccttaaaattaacttaaaaaaaagcctggcgggggtaaaaaaatccattgatccccaatccatgctgtttgaagcatgggtttgctaaaacccgggatgaacccagcattaacaactgacccaaagggacctttcaattaaaaacccaaatgggcaacaacaaaccccacccgaacgaaaataacccctttggactagggaaaacatcccgccccggggggggggttacaaaccggccaaacagaatttatcctttttttaaaaaatttggaagggttgcccggaaaaatgacattggggttccttataaaattggcccgtttggggttctccgtattcccacttaaa

SEQ ID NO: 57555 - DNA, 456 bp, Zea mays
  Clone ID: MRT4577_152487C.1
aaacaaaatcaacggtttgggggaacattacccaaaccgcccccccccgagagggagggcaaccccgggggcttttgggggaagctgggccccccccctccctttgggggggggcaacgggggggggccgacgacatacctcccctacaatacaatccgaggaccctaggggggccgggggtccctccccccaacaacaaatccaggggaacaggggcccccaaacaagcaggaaagggttcgtcaccccatcgggtactttggggcccaggggggggccggcaacttgtacttgggccgggccgttttggacatgggggcaatccccgggacaaaagggccccccgggtgggggccggcccccgggggcccaagggggagccggcccttaaaaatgggcaaagcggggccccactgttttttgaaaatggcaggggatatccctccctggggggg

SEQ ID NO: 57556 - DNA, 411 bp, Zea mays
  Clone ID: MRT4577_152488C.1
gatgggttttgctagaggttcttgacaaaatttctccagggtcagttaactggaagcatgcatccaaaccaccaatcattatgccgtttagaaaggttgaaaactgcaaccaggttatcaaaatcggcaaggagctaaacttttctctggtaaatgtagcaggaaatgatattgtgcaaggaaacaagaaactgattctagctttcctgtggcaactcatgaggactagtatcctacaattgctgaggaacttgagatcccactctaaagagaaagagatgacagatgctgacattctcatttgggctaatagcaaggtcaaggaatcaggcaaaaattcacatattgaaagcttcaaggacaaaacgatagcagatggggtgttcttccttgagctcctaagtgctgtgc

SEQ ID NO: 57557 - DNA, 607 bp, Zea mays
  Clone ID: MRT4577_152489C.1
ggcgctcgaggcggcggttccatgactcgtgtcatatacacgaaaaataaaaaaaaaaaaaaaaaaaaaaaaaaaaaaaaaaaaaaaaaaaaaaaaaaaaaaaaaaaaaaaaaccccccagtaccacaccactccgcgttagttgaggacggaacaggggcacaaagggacaacgacaacacaggcgccacacatggaatcccagttctccgccgccgggccccggttccacggcctccggggttacgccgcgcccaggtccgcggggggggcgttgccgtccgtgagggggggcagaaaaaggtcgtcgtcgcagggaatccgttgcaactacatcggttccgccaccaacctgatcatggggacgacaacaacgctgatgctgttcgcggaacggttcgggttggcgccgtcggcaaaccgcaaggcgacggcgggcttgaacttgaaggcgcgcaactccggcctgcagacgggggaccccgccgggttcaccctcgccgacacgttggcctgcggcgccgtaggccaaatcctcggggtcggaatcgagctcgggctcaaaaacaccggcgccctcaacaaaatcatcggctagatccctacg

SEQ ID NO: 57558 - DNA, 437 bp, Zea mays
  Clone ID: MRT4577_15248C.1
cggaatcgaccgcacgcgacccagcaggccagctctgatgtcccctcccaaacgggagagttagctagcgaccctgcaacgtgagcgatgccctggagatcctcgtggggggtgctggatccaggcgcgctgatgagggtgtggctcatgcggcgtgggtccgatggatgtcccttgtattaccacagcgttgggcgggctgggagcttcctccccgatgggggagacggtgtggcgggaggtgctcaaagcaacgctgactcctcctgcttacccgagagcagcccgaataaggtcaccacgtgaaagcgtgcctctcggtacgtcaggtattcttcgtgtgttttcaacctttggtttccgtccttgctatggctcttctctatttttcttgcctcggtcagtttgcacgtgccgcataagtcggtaaaggacgt

SEQ ID NO: 57559 - DNA, 278 bp, Zea mays
  Clone ID: MRT4577_152490C.1
catacaaaactatttggttcagctgacttggttacttgcacttgattttttataattcgagacaacaataacaacatccaactaatatctttaaactaacataatccaatttattattatatctggaatctaaaatattgttgatacaaagaaactaagggcaactgaacaatttagaacccaaaacctaaaccaccacacattgcaaatgggtatgaaagatataataggtcttactcagccacattggctataacaacaacggctttataagtgat

SEQ ID NO: 57560 - DNA, 272 bp, Zea mays
  Clone ID: MRT4577_152491C.1
tcttctcgctggtgtcccctctctctcacccatggcttcttcggcggcggggactgaggtagttacttacttcctgcggaactactacaaccttctgcaacaaaccccctatttcgtccaccatttctacagctaatccagcaccattgtccgcttctaccacctcactttcacgaccgtagcttccaacaacatgatttacatacactcactcatcatgtttttgaactttacccaaattgagatctttactgccaattccttttactcat

SEQ ID NO: 57561 - DNA, 450 bp, Zea mays
  unsure (1)..(450): unsure at all n locations
  Clone ID: MRT4577_152492C.1
ngccggccgggcttgcatgaatgtctatactcatcaatccccgtcttttctggttccccattgaaggaaaccctagagcagcagagagcgggcgccggggctacgcgagcggggaggccgcgggagaaggcccctcgcgtgtgtttcaggcaggaggccgatttggtgcagatttggctggcggacgggcgaccagcttggcttccggacgcgtgacggcgtgagcgcttcttgttttctttcttcgaatgcataacagtagtgccatgtgtcgttaggattggattgaaatgtgtatatgtgagtaaactctatatggttcatatgtagaaatgacattgagaccagtttcaatctaaaaatcagtataattactccaaaaaaaaaaaaaaaaaaggcccctaatgcaagttgttggttcagacataaattttaaagacattcttgatg

SEQ ID NO: 57562 - DNA, 796 bp, Zea mays
  Clone ID: MRT4577_152493C.1
gatgcctccccgttctctcttcctctgctcttctctgcctgcctgagctcaccgcacctcgcctcctcaccgcgtttcctccgttaatccggtaaccgtctctcaccatctctgcagtcaccctagagtccctctctgcctgcccctgccagcgcgggggcgcggtgtggctctcccagatccgcctggcattgctcgctcggccgatccgatctcgcgcgcttatttgaaatgcagcagatccgcgtgcttgcgcgcgtgatctggcgtcgtcgcgggcctttcgttaacgaaatggcccgatctgtggtttggtggtcaatgccatgcttttttattactgtcttatgctgggagaaaaatggaaacagagaatagcttcaattgatgccttttagaacggattctgtagagcaactcatggatactttctgcttgtttttaacaaatgtggcatcgtgcgagctctgctgtaggtagaaaatggccgatgccgaggatatccagcccctcgtctgcgacaacggaactggcatggtcaaggctgggttcgctggcgacgacgccccgagggccgtcttccccagcatcgtggggcgcccgcgccacactggtgtcatggtcgggatggggcagaaggacgcctacgtcggtgacgaggcgcagtccaagaggggtatcctgaccctcaagtaccccatcgagcacgggatcgtcagcaactgggacgacatggagaagatctggcatcacaccttctacaacgagctccgcgtggctcccgaggagcaccccg

SEQ ID NO: 57563 - DNA, 510 bp, Zea mays
  Clone ID: MRT4577_152494C.1
tcaccgaaacataggccgtacgatcactgatctcctccctcgctatgacctacccgtcagtgctcatggcgccatgcggtacaccagtggaaaccggcagatgacgagccctgaactagtgggtgtgagttcgctcatgaagatgcccacggtttacactctatcgctacggcctcgcacgtcgagggcgaattgtgtcgcggataaccattccccacagcatccagataggacgctgcatactcaacgcgagcaataaacccgtcaataaaggtgacaacagccgaaggttggacccatatgcaccgcggtggctctacatactagggcatctccccgcgtgtgcatggaatctacatatctcctcttacttgataccagcctcacctcacatgtgcgagcacgataccctctctacgatcgctatagatgatatcaggatctaggccggattcacctgctctagctgcatactatgacaggagtggagaaaacctgggtcataccact

SEQ ID NO: 57564 - DNA, 1839 bp, Zea mays
  Clone ID: MRT4577_152495C.1
ggcacgagtgacaccccaccatcaccgccgcgccacgcgcgacaactccatcccccgtccgcacccctaccccgagcatcgcagcgcctcccgcacgaggtcgttgcgcttgtcgatctgatggcggcccatggcaaaggagcaggcggtgatggcagccacagcagaaagccgacgctcggcgtgattcccacccgtcgcgagccaagaggttcgaggtcatttttgagccaagaggttcgcggccacgggagcaaccctacagaaccatcaccaccaccgctctctcttcctctgctcttctctgcctgcctgagctcaccgcacctcgcctcctcaccgcggatcctccgttaatccggtagaaaatggccgatgccgaggatatccagcccctcgtctgcgacaacggaactggcatggtcaaggctgggttcgctggcgacgacgccccgagggccgtcttccccagcatcgttgggcgcccgcgccacaccggtgtgatggtggggatggggcagaaggatgcctacgtcggcgacgaggcgcagtccaagaggggtatcctgaccctcaagtaccccatcgagcacggaatcgtcagcaactgggacgacatggagaagatctggcatcacaccttctacaacgagctccgtgtggctcccgaggaacaccccgtcctcctcactgaggcgcccctgaacccaaaggctaacagggagaagatgacccagatcatgttcgagaccttcaacacccccgctatgtacgtcgccatccaggccgtcctgtctctgtatgccagtggtcgtaccacaggtatcgtgctcgactcgggagatggtgtgagccacaccgtccccatctacgagggatacgccctcccccacgccatccttcgtctcgacctggctggccgcgacctcaccgactacctcatgaagatcctgactgaacgcggctactccttcaccaccactgctgagcgggaaattgtcagggacatgaaggagaagctcgcctacattgccctggactacgaccaggagatggagactgccaagaccagctcttctgttgagaagagctacgagctgcctgacggacaggtcatcaccattggtgctgagcgcttccgctgccctgaggtcctcttccagccatccttcattgggatggaagctgctggtatccacgagaccacctacaactccatcatgaagtgcgacgtggatattaggaaggatctgtatggcaacatcgtcctctccggtggtaccactatgttccctggcattgctgacaggatgagcaaggaaatcaccgccctggctcctagcagcatgaagatcaaggtggttgctcctccagaaaggaagtacagtgtctggattggaggatccatcctggcatcgctcagcaccttccagcagatgtggattgccaaggctgagtacgacgagtctggcccgtccatcgtgcacaggaaatgcttctaattctttgggcccaagagatgcaaagccgagaggagccattatcgccagcctcccgccccgtttctttctccttttgttgctgtttcttcattagcatgaacaaagttttttgccggtctatcggcggccgctttctcctattcatcaagactgtaatgtctattgctacctaatgtttctcactttgtcattttggacacatgttcgacctattcaattttaatgagatgcctgatgaggctacttgcaaaaaaaaaaaaaaaaaaaaaaaaaaaaaaaaaaaaaaaaaaaaaaaaaaaactcgagactagttctctctctctctctctcctcgtgc

SEQ ID NO: 57565 - DNA, 864 bp, Zea mays
  Clone ID: MRT4577_152496C.1
aggcatgttgtctgttctaatgcctgttctctgcgaactatctttgtctgtttcggtggaggctgccggcgtgaagcactggccaccgggtgctgcacgtcaacggccaacagggggcaccgtgcaggtgggcagaagcagccagcgacaacagtagggcacagggatgtatatggaccttccaaatacactagacttttgcaagcaaccaaagatactctcagataagaagttcaatgaatcaaaaggaaaactggtgtctgatgagatcatcataaatctgctgtcaagacgcctggaagagggagaagaaaagggtgaattggggttcatccttgatggctttcctcgagccatgagacaagcggtaagctaattatttgacctgaccataagtatgcaaaaacaaatacttgcctttgatcaggaagcatttttcacttgctttcgttaacgaaatggcccgatctgtggtttgttggtcaatgccatgtttttttattactgtcttatgctgggagcaaaatagaaacagagaatagcttcaattgatgccttttagaacggattctgtagagcaactcatggatactttctgcttgttttaacaaacgcggcagtgagcgagctctggtgtaggtagaagatgacccagatcatgttcgagaccttcaataccccagctatgtacgtcgccatccaggccgtgctctctctgtatgccagtggtcgtaccacaggtatcgtgctcgactcgggagatggtgtgagccacaccgtccccatctacgagggatacgccctcccccgcgccatccttcgtcttgacctggccggtcgcgcctcccgactgctcatctgcgc

SEQ ID NO: 57566 - DNA, 1838 bp, Zea mays
  Clone ID: MRT4577_152497C.1
ccggccgggatcctggggaagacgcgaacccggctccgcggcacgagttgtccgcacgtacggcacgtcggggctggctcgtccgcccgcgagtgggaggccactgtttcctctgcctcaccgggtcgtgtggcggaggggcgtggggccatggttcgcagcgcggggcgacgagcgcgctcctcctctcgcgcagcgccagcgccaccccgcaccgtggctttatatacacccctcctcccaaccctaccgaatcatcactaccaccgctctctcttcctctcctccatctctcaacgcctgaagctcaccgcacctcccctcctcgccgcggatcccccactactccggtagaaaatggctgacgctgaggatatccagcccctcgtctgcgacaacggaactggcatggtcaaggctgggttcgccggcgacgacgccccgagggccgtcttccccagcatcgttgggcgcccgcgccacaccggtgtgatggtggggatggggcagaaggatgcctacgtcggcgacgaggcgcagtccaagaggggtatcctgaccctcaagtaccccatcgagcacggaatcgtcagcaactgggacgacatggagaagatctggcatcacaccttctacaacgagctccgtgtggctcccgaggaacaccccgtcctcctcactgaggcgcccctgaacccaaaggctaaccgtgagaagatgacccagatcatgttcgagaccttcaacacccccgctatgtacgtcgccatccaggccgtcctgtctctgtatgccagtggtcgtaccacaggtatcgtgctcgactcgggagatggtgtcagccacactgtccccatctacgagggatacgccctcccccacgccatccttcgtctcgacctggctggccgcgacctcaccgactacctcatgaagatcctgactgaacgcggctactccttcaccaccactgctgagcgggaaattgtcagggacatgaaggagaagctcgcctacattgccctggactacgaccaggagatggagactgccaagaccagctcttctgttgagaagagctacgagctgcctgacggacaggtcatcaccattggtgctgagcgcttccgctgccctgaggtcctcttccagccatccttcattgggatggaagctgctggtatccacgagaccacctacaactccatcatgaagtgcgacgtggatattaggaaggatctgtatggcaacatcgtcctctccggtggtaccactatgttccctggcattgctgacaggatgagcaaggaaatcaccgccctggctcctagcagcatgaagatcaaggtggttgctcctccagaaaggaagtacagtgtctggattggaggatccatcctggcatcgctcagcaccttccagcagatgtggattgccaaggctgagtacgacgagtctggcccgtccatcgtgcacaggaaatgcttctaattctttgggcccaagagatgcaaagccgagaggagccattatcgccagcctcccgccccgtttctttctccttttgttgctgtttcttcattagcatgaacaaagttttctgccggtctgtcggcagccgctttctcctattcatcaagactgtaatgtctattgttgctacctaatgcttctcacttgtcattttggacacatgttcgacctattcaattttaatgagatgcctgatgaggctacttgcaaaaatacatgtggtgttctcaatgaataatatcaaatgttgagctctcaaaaaaaaaaaaaaaaaaaaaaaaaaaaaaaaaaaaaaaaaaaaaaaa

SEQ ID NO: 57567 - DNA, 407 bp, Zea mays
  Clone ID: MRT4577_152498C.1
cccaaaaaaaaaaaaattggtaaaaaaaaaaacccgcccagggttaaaaggtaaaagggggggcccccccaaaaaagaaaggaaaaaaaggggggaaaaaacccccaaaaaaaagggaaaaattggaaaaaaaaaaggccccgggcataaaaggaccccgaaaaaggggaaaaaccccccccctacgggaaaaaccagaaacatcgggggcacccccccctgggggccccaaacccccccaaagcccaaaggcctggaacggggccaaaccaaaattccccaaatttttcccacccaaagtacccatgggaaaggtcccagggggcaggaacaaaacccgggggtttggcaaagttaattggggggggggccaaacccctaggggggggcccaccccccccaaagct

SEQ ID NO: 57568 - DNA, 2065 bp, Zea mays
  Clone ID: MRT4577_152499C.1
tttcctccccgctctctcttcctctgctcttctctgcctgcctgagctcaccgcacctcgcctcctcaccgcgtttcctccgttaatccggtaaccgtctctcaccatctctgcagtcaccctagagtccctctctgcctgcccctgccagcgcggggccgcggtgtggctctcccagatccgcctggcattgctcgctcggccgatccgatctcgcgcttgcgcgctcctgccgcggatccggctggatctcgctggaattggggcgcgcgcttatttgaaatgcagcagatccgcgtgcttgcgcgcgtgatctggcgtcgtcgcgggcctttcgttaacgaaatggcccgatctgtggtttggtggtcaatgccatgcttttttattactgtcttatgctgggagaaaaatggaaacagagaatagcttcaattgatgccttttagaacggattctgtagagcaactcatggatactttctgcttgtttttaacaaatgtggcatcgtgcgagctctgctgtaggtagaaaatggccgatgccgaggatatccagcccctcgtctgcgacaacggaactggcatggtcaaggctgggttcgctggcgacgacgccccgagggccgtcttccccagcatcgtggggcgcccgcgccacactggtgtcatggtcgggatggggcagaaggacgcctacgtcggtgacgaggcgcagtccaagaggggtatcctgaccctcaagtaccccatcgagcacgggatcgtcagcaactgggacgacatggagaagatctggcatcacaccttctacaacgagctccgcgtggctcccgaggagcaccccgtcctcctcaccgaggcgcccctgaaccccaaggctaacagggagaagatgacccagatcatgttcgagaccttcaacacccccgctatgtacgtcgccatccaggccgtgctctctctgtatgccagtggccgtaccacaggtatcgtgctcgactcgggagatggtgtgagccacaccgtccccatctacgagggatacgccctcccccacgccatccttcgtcttgacctggccggtcgcgacctcaccgactacctgatgaagatcctgactgagcgcggatactccttcaccaccaccgctgagcgggaaatcgtgagggacatgaaggagaagctcgcctacatcgccctggactacgaccaggagatggagaccgccaagaccagctcttccgtggagaagagctacgagctccccgacggacaggtcatcaccatcggcgccgagcgcttccgctgccccgaggtcctcttccagccatccttcatcgggatggaagctgccggcatccacgagaccacctacaactccatcatgaagtgcgacgtggatattaggaaggatctgtacggcaacatcgtcctctccggtggcaccaccatgttccctggcatcgctgacaggatgagcaaggagatcactgccttggctcccagcagcatgaagatcaaggtggtcgctcctccagagaggaagtacagtgtctggatcggaggatccatcctggcatccctcagcaccttccagcaggtaaacaaacaaacaaacaaacaaatttcgcattcgcatttcctcaacctcaatcaaggtctgctcacgattttgcttgcgactgcagatgtggatcgccaaggccgagtacgacgagtccggcccatccatcgtccacaggaaatgcttctaattctttgggcccgagaaatgcaagccgtgggggagccgttaccgccgccagcctctcctgcccccgttttcgttgccgtttcttcattagcgcgaacaaagttttgtgccggtctatcggccgccgctttcctcccctattcatcaagaccgcaataactgtcgctacctatgcttctcacttgtgatttttggacacaatatgttaaggtccattcaattctaatgagacgcctgatgaggctacttcggattgtcattggttattgatgtcttatgaatgaataatataattttttttgtcactttg

SEQ ID NO: 57569 - DNA, 349 bp, Zea mays
  Clone ID: MRT4577_15249C.1
gctggtggagatctctgtgcgctcgcacgcccgcgcagctctttgctgtcaagcactcgtaccgtgaccgtttaaagcgatcgcttgaggcggacgttcgagggcatgtcacccccgacttgcgaaagttttaagtgcctcttgctagagcgtacccctatcgatggtgcagaggtgagcacatactttgcctcattatgagggctaaatattttatgaggaagatccataaggaagggttacagtgatgatgagagcattacaattctcaccacccggagcagggtgagatactggccacatgctaagctaccaggatcagattactcatgcagtcaacaaggctctg

SEQ ID NO: 57570 - DNA, 289 bp, Zea mays
  Clone ID: MRT4577_1524C.1
tttttctgtggtccaaatgttttctttggtgacttgtaatttaactagcaccaaccatcacgtgtcatttgttaaaataacagcttaataccattgatttcaaaatgaagggcacagttcacgatgcgagaagtttgagcagttattaagctcggcatattagctattctaagttctagcatacatatatatagctgagccttgcacataatatcatatgtcacatacttggcagaatcatgtcagcctaactagtcagacatgcagcgcagcatccatggggggatga

SEQ ID NO: 57571 - DNA, 267 bp, Zea mays
  Clone ID: MRT4577_152500C.1
cccacgcgtcgaatgaggctactgccggtcccacacgaactactgatatatggtggctggcagttggaatgctaccttatggagagaacaagaggcagcattgactggaacgcgcggatgaaaacggctgtcgtgggctgcatattgaacatgctgccggatcgcatagggcataagcgaacatcgtgatgactgagcctggtctcattgccccgggtgttgtagacggctgcacgtccaccgcgcgggcaccttgatcctacacga

SEQ ID NO: 57572 - DNA, 636 bp, Zea mays
  Clone ID: MRT4577_152501C.1
gaggccggccggggaagtgagcgtcagcgagcgaccgcaccggcacggcgcccatccatccatcgccatcctctagcccagtccaaaggaaccctagccatgagcgccgcctccaagaagctcttccaggccgccaggtccctcgtcctctccgcttctcaccgctcaccaactttggcaggaagaccctccccaccgcctacttatcctaccacaagcagggatcccaccatgccgcgtcggggtggggagccatcgccgccgcagtcccagctgcagcttacatgctccaggaccaggaggctcatgctgcagagatggagcgcaccttcattgccatcaagcctgatggcgtccaaagaggcctgatttctgagattatgagccgatttgagagaaaaggctataagcttgttgccatcaagctgattgttccatccaaagaatttgctgagaagcactaccatgatctcaaggaaaggcctttcttcagtgggttgtgtgattttctcagctctggccctgtgcttgcaatggtttgggaaggagagggtgtcatcaagtatgggagaaactaattggtgccacagacccacagaaatctgaaccaggaaccatcaggggcgatcttgccat

SEQ ID NO: 57573 - DNA, 1909 bp, Zea mays
  Clone ID: MRT4577_152502C.1
tgtgatcggcctcggcgacggccgcttctggagcgaccacctcattagctttctgatgctcaacgtcggccgccgcagccggctcctccaccaccaccttctcagctacctgttcatcagccgcaacctcaacggagattggagtggcctcgggcgcaaccttgggtgtggagacggcggcctcagctggggcctgcccctcaagcgtcttgggcttggttgcgcaggcgcccatggctgatgtggcggttgcggcggctgagttgttggccggcgggggaggaggaggtgcttgaatgtgtggaggtggcccggccggccgggatcgcctccaccgttctctcttcctctgctcttctctgcctgcctgagctcaccgcacctcgcctcctcaccgcgtttcctccgttaatccggtagaaaatggccgatgccgaggatatccagcccctcgtctgcgacaacggaactggcatggtcaaggctgggttcgctggcgacgacgccccgagggccgtcttccccagcatcgtggggcgcccgcgccacactggtgtcatggtcgggatggggcagaaggacgcctacgtcggtgacgaggcgcagtccaagaggggtatcctgaccctcaagtaccccatcgagcacgggatcgtcagcaactgggacgacatggagaagatctggcatcacaccttctacaacgagctccgcgtggctcccgaggagcaccccgtcctcctcaccgaggcgcccctgaaccccaaggctaacagggagaagatgacccagatcatgttcgagaccttcaacacccccgctatgtacgtcgccatccaggccgtgctctctctgtatgccagtggccgtaccacaggtatcgtgctcgactcgggagatggtgtgagccacaccgtccccatctacgagggatacgccctcccccacgccatccttcgtcttgacctggccggtcgcgacctcaccgactacctgatgaagatcctgactgagcgcggatactccttcaccaccaccgctgagcgggaaatcgtgagggacatgaaggagaagctcgcctacatcgccctggactacgaccaggagatggagaccgccaagaccagctcttccgtggagaagagctacgagctccccgacggacaggtcatcaccatcggcgccgagcgcttccgctgccccgaggtcctcttccagccatccttcatcgggatggaagctgccggcatccacgagaccacctacaactccatcatgaagtgcgacgtggatattaggaaggacctgtacggcaacatcgtcctctccggtggcaccaccatgttccctggcatcgctgacaggatgagcaaggagatcactgccttggctcccagcagcatgaagatcaaggtggtcgctcctccagagaggaagtacagtgtctggatcggaggatccatcctggcatccctcagcaccttccagcagatgtggatcgccaaggccgagtacgacgagtccggcccatccatcgtccacaggaaatgcttctaattctttgggcccgagaaatgcaagccgtgggggagccgttaccgccgccagcctctcctgcccccgttttcgttgccgtttcttcattagcgcgaacaaagttttgtgccggtctatcggccgccgctttcctcccctattcatcaagaccgcaataactgtcgctacctatgcttctcacttgtgattttttggacacaatatgttaaggtccattcaattctaatgagacgcctgatgaggctacttcggattgtcattggttattgatgtcttatgaatgaataatataatttttttttgtcaaaaaaaaaaaaaaaaaaagaaaaaaaaaaaaaaaaaatttgcggcc

SEQ ID NO: 57574 - DNA, 598 bp, Zea mays
  unsure (1)..(598): unsure at all n locations
  Clone ID: MRT4577_152503C.1
ccctttcattcctgctcggnaccgacccccaaacccaaccctaanagtttggctattcgtattcggntctgttgtaattacaanataattaatacatgatgtgcatgaggcacgcctactaacttcgattctcttcctgcatgaacgacgacaggttcgcccctgctctctggaaccatggggacctctcctcaggattcgcctctttggaagcaaatcgacgacaccgagtactatctagtcagtggatcgttcgagccagcgttgttgactgatttatctgtcgctgatcaaatacgcacggcttctctggagagcgcatgcttgaatcagctgggatggtacttgtacaggcactaaaagaactcaggaggacccctgagatgtttgttcagcttaggacgatgtttggttcagtggcatcagtacctgctagagttttccttacatgagctaccattcaagtggcagaaggatctgtatctgacctcagaccaatctttgaggaataccttgctaattggagaatattagaagatgaggcttatgttttggatggaggagggcatgacagcgcctcaaaggttttgttgttgca

SEQ ID NO: 57575 - DNA, 2171 bp, Zea mays
  Clone ID: MRT4577_152505C.1
cctcgaggccggccgggccgggatcactaccaccgctctctcttcctctcctctcctctcctccatctctcaacgcctgaagctcaccgcaccttccctcctcgccgcggatcccccactactccggtaaccgtctctccattcaccctgtctgctgtctccctagaatcgcctgcctctgtcagcgcgtgacacgggggcgcggtatggctctcccagatccgcctggcattgctcgctcgggtcgtgccaggccgatctgatctcgcatttgctgcgcgctcctcctgctgcggatcccaccggatctcgctggaatcggagcgcgcgtttctttgaaatgccgcagatctgcgtgcttgcgcgcgtgatctaagtccgggcctttcgttaacgaaatggtccgatctgtggtttggtggaggcaatgccatgtttttttccccgttatttttttttgctgattttaggagcttttttctactgtcttatgttagtaggacaaaaaaataaaaaagaaacatagattagcttcaataggcgccttttagaacagattctgtacagcaactcgtggaaacaaatctgcttccttaatgatgttgcttgttttaacaaatgtgcatcgggcgagcttttctgtaggtagaaaatggctgacgctgaggatatccagcccctcgtctgcgacaacggaactggcatggtcaaggctgggttcgccggcgacgacgctccgagggccgtcttccccagcatcgttgggcgcccgcgccacaccggtgtgatggtggggatggggcagaaggatgcctacgtcggcgacgaggcgcagtccaagaggggtatcctgaccctcaagtaccccatcgagcacggaatcgtcagcaactgggacgacatggagaagatctggcatcacaccttctacaacgagctccgtgtggctcccgaggaacaccccgtcctcctcactgaggcgcccctgaacccaaaggctaaccgtgagaagatgacccagatcatgttcgagaccttcaacacccccgctatgtacgtcgccatccaggccgtcctgtctctgtatgccagtggtcgtaccacaggtatcgtgctcgactcgggagatggtgtcagccacactgtccccatctacgagggatacgccctcccccacgccatccttcgtctcgacctggctggccgcgacctcaccgactacctcatgaagatcctgactgaacgcggctactccttcaccaccactgctgagcgggaaattgtcagggacatgaaggagaagctcgcctacattgccctggactacgaccaggagatggagactgccaagaccagctcttctgttgagaagagctactagctgcctgacggacaggtcatcaccattggtgctgagcgcttccgctgccctgaggtcctcttccagccatccttcattgggatggaagctgctggtatccacgagaccacctacaactccatcatgaagtgcgacgtggatattaggaaggatctgtatggcaacatcgtcctctccggtggtaccactatgttccctggcattgctgacaggatgagcaaggaaatcaccgccctggctcctagcagcatgaagatcaaggtggttgctcctccagaaaggaagtacagtgtctggattggaggatccatcctggcatcgctcagcaccttccagcagatgtggattgccaaggctgagtacgacgagtctggcccgtccatcgtgcacaggaaatgcttctaattctttgggcccaagagatgcaagccgagaggagccattatcgccagcctcccgccccgtttctttctccttttgttgctgtttcttcattagcatgaacaaagttttctgccggtctgtcggcagccgctttctcctattcatcaagactgtaatgtctattgttgctacctaatgcttctcacttgtcattttggacacatgttcgacctattcaattttaatgagatgcctgatgaggctacttgcaaaaatacatgtggtgttctcaatgaataatatcaaatgttgagctctcaaaaaaaaaaaaaaaaaaaaaaaaaaaaaaaaaaacaaaggggggaagcactaaaagatccaaacttaacatattgctgcatgcgac

SEQ ID NO: 57576 - DNA, 2066 bp, Zea mays
  Clone ID: MRT4577_152507C.1
cattgggtacctcgaggccggccgggatcgcctccccgttctctcttcctctgctcttctctgcctgcctgagctcaccgcacctcgcctcctcaccgcgtttcctccgttaatccggtaaccgtctctcaccatctctgcagtcaccctagagtccctctctgcctgcccctgccagcgcgggggcgcggtgtggctctcccagatccgcctggcattgctcgctcggggtcgtgccaagccgatccgatctcgcgcttgcgcgctcctgccgcggatccggctggatctcgttggaattggggcgcgcgtttatttgaaatgcagcagatccgcgtgcttgcgcgcgtgatcttgagtcgtcgcgggcctttcgttaacgaaatggcccgatctgtggtttggtggtcaatgccatgtttttttaattactgtcttatgcttggagaaaaatagaaacagagaatagcttcaattgatgccttttagaacggattctgtagagcaactcatgcatactttctggttgtttttaacaaatgtggcatcgggcgagctctggtgtaggtagaaaatggccgatgccgaggatatccagcccctcgtctgcgacaacggaactggcatggtcaaggctgggttcgccggcgacgacgccccgagggccgtcttccccagcatcgtggggcgcccgcgccacactggtgtcatggtcgggatggggcagaaggacgcctacgtcggtgacgaggcgcagtccaagaggggtatcctgaccctcaagtaccccatcgagcacgggatcgtcagcaactgggacgacatggagaagatctggcatcacaccttctacaacgagctccgcgtggctcccgaggagcaccccgtcctcctcaccgaggcgcccctgaaccccaaggctaacagggagaagatgacccagatcatgttcgagaccttcaacacccccgctatgtacgtcgccatccaggccgtgctctctctgtatgccagtggccgtaccacaggtatcgtgctcgactcgggagatggtgtgagccacaccgtccccatctacgagggatacgccctcccccacgccatccttcgtcttgacctggccggtcgcgacctcaccgactacctgatgaagatcctgactgagcgcggctactccttcaccaccaccgctgagcgggaaatcgtgagggacatgaaggagaagctcgcctacatcgccctggactacgaccaggagatggagaccgccaagaccagctcttccgtggagaagagctacgagctccccgacggacaggtcatcaccatcggcgccgagcgcttccgctgccccgaggtcctcttccagccatccttcatcgggatggaagctgccggcatccacgagaccacctacaactccatcatgaagtgcgacgtggatattaggaaggatctgtacggcaacatcgtcctctccggtggcaccaccatgttccctgggatcgctgacaggatgagcaaggagatcactgccctggctcccagcagcatgaagatcaaggtggtcgctcctccagagaggaagtacagtgtctggatcggaggatccatcctggcatccctcagcaccttccagcagatgtggatcgccaaggccgagtacgacgagtccggcccatccatcgtccacaggaaatgcttctaattctttgggcccgagaaatgcaagccgtgggggagccgttaccgccgccagcctctcctgcccccgttttcgttgccgtttcttcattagcgcgaacaaagttttgtgccggtctatcggccgccgctttcctcccctattcatcaagactgcaataactgtcgctacctatgcttctcacctgtgatttttggacacaatatgttaaggtccattcaattctaatgagacgcctgatgaggctactagcaaacaacaccatgctgtgttcggattgtcattggttattgatgtcttgtgaatgaataatataaattttttttggtcaaaaaaaaaaaaaaaaaaggcccctagggcc

SEQ ID NO: 57577 - DNA, 211 bp, Zea mays
  Clone ID: MRT4577_152509C.1
ggacccaaggcgccgtcatcggcgacatgagctaccgacttgtcgtcggcctatcgctgatcgcatcagagaccggcgtgcccgatgtcataacacacggtcccggactaccctaccgcgggctcctcaggcgcgggagacgccggggacgcactcttatgctacagctggaggctgtcggacgagacgagtcaacaccggcccctggagc

SEQ ID NO: 57578 - DNA, 732 bp, Zea mays
  Clone ID: MRT4577_15250C.1
ccggccgggatcacctccatcctcgaactcgacccgaatcaaatcccatctcaagctacaataccgcagccatggccaacgacgagtatgatttcctcttcaaagttgtcttgatcggagactctggtgtcggaaagaccaaccttctcagtcgattcacccgtaacgagttcaacctcgactccaagtcgaccatcggcgtcgagttcgccactagatcaatccaggtcgactccaagacgatcaaggcccagatctgggataccgctggacaagagcgataccgcgccattacttccgcttactatcgaggtgccgtcggcgctctcctcgtctacgatatcagcaagcaccagacctacgagaacgtcacacgatggctcaaggagctgcgagatcacgctgatgccaatattgtcatcatgctggtcggaaacaagagcgatttgcgacacctgagagctgttcccaccgaggaggccaagtcttttgctagcgagaaccacctgtccttcatcgagacgtccgccctcgatgccagcaacgtcgaacttgcattccagaacattttgactgaaatttatcgcattgtttctagcaaggccctcgacagcggcgatagcgcccaggccaccataggcgcgggcactaacatttcgctcagcaagcccgccgatgacgatgctgcaaagggtggaaagtgctgttaaattctttttgcggaccgtttgc

SEQ ID NO: 57579 - DNA, 574 bp, Zea mays
  Clone ID: MRT4577_152510C.1
atatttaggtgtggaacaagtaaatgaaaaacaaaacagaaaaagaaaaggagtcaggggaaacctgaccagcaggaaagcacaacgtggtgagcttcactgattccttttcttcatcaattaattgtaaaattgcttgttttttttctatcttggtgtgctaagagtgtgcatgattatatttctagttttctacatgcatggatttgtgtctccctacaaaacatggtcattgtcgtgttcaactaccagtgttcttaggctaaccttaagcctttacagagtgctatgatgtcttctgtataaattgaccccacaaatacacaatgtgcacatgacgggaacaatgtttgtcttgttctattgtttgcaaaatggatgagtgggcctcatacggtatttgaaattttggaatatatcaagctgttactttctataatttctgtttctttcctgagctatcatctagaaactggaattatctaacgtaaacatgtaattactgtcatcaacttaatttttgcatctatacatatgttttataattatctgtttgtgaacatttacaccatta

SEQ ID NO: 57580 - DNA, 497 bp, Zea mays
  Clone ID: MRT4577_152511C.1
gctgctgctgttgcggggacgggatttctgggttggatgagatgaggaggcgctgcagctggctctcgtctttgttccgccctcgccgggctgaccgctcgctcccgcaaccagatccacagggtcccgattccgagcccaaggcaatagataagcacagtgcttctgaagaagttgtaatggataacattctgccaaacagtgatttttctgaaggtttacatttgtggcaatcaaatagatgtcatgcatttgtagccgttgaaggatcaggttaccattatggtgtaaggccacattcagggtcaacctatgctgttcttactcatcgcacacagagttggcaggggcttgagcaggacataacagaaaaggtcacccttggtaccgagtactttgttgctgcatatgttagagttcatggggaagttcatgaacccattggagttcaggtcactctcaaacttgaggaggacggttcttctaccaactatctt

SEQ ID NO: 57581 - DNA, 465 bp, Zea mays
  unsure (1)..(465): unsure at all n locations
  Clone ID: MRT4577_152512C.1
ctagcgtccggacgaganncgagcgccngaccgcagactacaaccgagccagggaagaaagacgtacgccgaatagcaaatctgggggaagacctggcggtgcaaagctcagcctaactgtgcagagcaatgcccccagtgcctacgctaatgcccatgtccacctcaagtgaagggtttctgatcatcacgccctctgatgttctattggcacatacgtgcaatgatggacgctctctgtgctgactacaacattcaatttgagtcacccattcattggtaactgaggctaccttgtgaaaccgtcatcaaggagataactctcactgtgcaataggacatgaatactatattgaaactacaggctgtattgacaagatcaatgacttgcttgtaacataaatactgcatctctcccgtgcagtataagctcgactatgctgttcattcacatcgcttatgact

SEQ ID NO: 57582 - DNA, 374 bp, Zea mays
  Clone ID: MRT4577_152513C.1
catattcactttcatgtttcaaatgtttattatgtttttttttggggcctatcattacacagtactcatatcatgacaaatttctttcatgttaaaaaaaatacccgctttgttttcctggtctgccgcattctctaaccacccacttggcacacttaaataacaatagcatttatcgaaatccggaatgcttggccaccaacgtcagctcaaccaaactacctttatcgttttgccacaaaacacctgcttgtctgtctccaaaaccaccaaacagttctttgtagcaagcacattagaaacagcttgctggcggatcaaaaatttatccttttttttttccaatgacagtggattggtatacttctgatcac

SEQ ID NO: 57583 - DNA, 891 bp, Zea mays
  unsure (1)..(891): unsure at all n locations
  Clone ID: MRT4577_152514C.1
ctcgaggccggccgggaacagcccgggaagcagtaagcacgcatcgccgccccccatctcccccgcaccgcgcacctctatggccgccggcgaaggcggaggtggggacatcggcgccgactcggagcggcgcctgcaaaaggctatggataagctctaccacttccccaagcccaagtcgagtagcaccggtggctccaagccctcttcgtcgacctcggctccaagctccgggagagcggtggggaaggcagcggcggaggcagcgaggaggttcggggtggtgcgcgggtcgcgactcccgcatcagatgttggccatggcagcgatctcgccgccaccgccgtgccgcccctgggaccgcgccgacctcatgcgtcgtctcgggtcattcaaagccatgacctggttcgccaagcccaaggttattagtcccgttaactgtgcaagaagaggatggactaacattgagccggatgttataacatgtgaagcttgtggggcacgactcctgttctccactccttcctcatggacaacacagcaagttgaaaaggctgctgctgttttcagcctgaagctggactctggacataaactactttgcccgtggattgataacatatgtgatgaatcacttgctttatttccaccaacacctcctcctgttttagttgggaactactatgagcttttgtcctctctgctgcgacttttagcactcccaagaatttcctgctcttctcttgagaccatgaaaaagaggaatccacagctagagcagttcctatcagaaccattctcttcatcagttgttctcaaagggggacttatgcttactgaggactctancattaaggatntggatgatgctttttcagatgctgacac

SEQ ID NO: 57584 - DNA, 159 bp, Zea mays
  Clone ID: MRT4577_152515C.1
cgacccacgcgtacgtcaaccttaacgcgcccaccgacttttgttatacaacaacaacgtccacctaaggaggtagggcaacatcatcatcacggactaaaacatcgagaccaccgacgacactatctatcattgtctcccatccaacctcactcttcg

SEQ ID NO: 57585 - DNA, 852 bp, Zea mays
  unsure (1)..(852): unsure at all n locations
  Clone ID: MRT4577_152516C.1
gggtacctcgaggccggccggtggattcttggctcgggtctggtgggatcttggtggttgctggttcagcacacgagccgcaggctgccgaggaagccggggaaggctggggatagccgggaagctgctgctgcggggaatggaactgagccgtcgaattcctacagtgttgcgaggagcatggacccaggtaacaaaagggctggaaatggagattacccagttccatctggtgtgattccgaatccagtgatgaatggggctgtggtgtatcactccaatgaacccttaccagcattcaaggacgtgcccatgtcagagaagcagaatttgtttgtcaagaaggtgaacctatgttgcgctgtgtatgactttgtggatccaactaagaacctcaaggagaaggaggtgaagcgccagacacttatggagcttgttgattacgtcacttccgctaatggcaagttctctgaggttgtcatgctggagatcacaaagatggtgtcaattaatttgttccggagctccagccccacacctcgtgagaacaaggccattgaaggggtcgatctggaggaggatgagcctctcatggatcctgcatggtctcacctacagatcgtgtacgaggttntcttgagatttgtagcttcacaggagacagatgcaaagttggccaagagatatatagaccattcctttattcttaggctgctagacctttttgactctgaggaccccagggaaagggactatctaaagacgatacttcatcgaatatatggtaaattcatggtccatcgaccattcatcaggaaagcaataacacatattctacaggtttatattcga

SEQ ID NO: 57586 - DNA, 458 bp, Zea mays
  Clone ID: MRT4577_152517C.1
ccggtaactgtcctgggtcggacccacgcgatcgcgtccaggcagtgacgctgtatacaaatgtgcagtcagactccgaccatttataagggccggcgttacgccagaaagcctcctgtgctcgcagctctgcacgatacggatgagatggatagcccattgcaaagagttaatcgagtgatcctgacactaagagcataaggcctctaacagtagatacacaggactgaggctaaaccgcattacgtccgtcagatgacctgtactatcaagcacgagagatggacttggtcaggggtgcaccctaaacgcaactagactccgagctgctgacatttgtcctgaaaagctgcaagcggttaacgctccggcattctcaataaacatcgaccacttttgtgcttgaaaaggccacaaatgctttttagcttggttggagttgtaggccttttgttgct

SEQ ID NO: 57587 - DNA, 2554 bp, Zea mays
  Clone ID: MRT4577_152518C.1
gccggccggtcggggaccatcacattccggctgccccggcctcccttgcatctggctctccttgcagtcgcagcctcgtacaccgcttgtgcgagcttttactcctaccccaatctccctttgctacttttggggacctccagacctctcaaatcgagagaaccaaaaacgatagagaaagagagcctgtcagcccaagaaaaggttcctcccctccttccccacctcgccctcagccctcatcatcctctaacatccgattgtgccctgtgctctgcggttctcggatccaagatttcgccggccggccgccggcggtggctccggcctccgggagcgggagaaagactggatttttcgggccatggagatgtggcctgatccgttcaggcccgggcggtggggtggcttcctgagcaggtctgattcgtatcggttcaaatgatctcggcggcttgattggtcggttccgcttccgccgggggatcggagctagggcggtggtttcttggccggccggtggattcatcggctcgggtctggtgggatcttggtggttgctggttcagcacacgagccgcaggtctgcgtagatcccctcttcgcttccgtggcggatttgtactgctagggttttggttgggtctggtggaagatgattaagcagatccttggcaggctgccgaggaagccggggaaggctggggatagccgggaagctgctgctgcggggaatggaactgagccgtcgaattcctacagtgttgcgaggagcatggacccaggtaacaaaagggctggaaatggagattacccagttccatctggtgtaattccgaatccagtgatgaatggggctgtggtgtatcactccaatgaacccttaccggcattcaaggacgtgcccatgtcagagaagcagaatttgtttgtcaagaaggtgagcctatgttgcgctgtgtatgactttgtggatccaactaagaacctcaaggagaaggaggtgaagcgccagacacttatggagcttgttgattacgtcacttccgctaatggcaagttctctgaggttgtcatgctggagatcacaaagatggtgtcaattaatttgttccggagctccagccccacacctcgtgagaacaaagccattgaaggggtcgatctggaggaggatgagcctctcatggatcctgcatggtctcacctacagatcgtgtacgaggttttcttgagatttgtagcttcacaggagacagatgcaaagttggccaagagatatatagaccattcctttatccttaggctgctagacctttttgactctgaggaccccagggaaagggactatctaaagacgatacttcatcgaatatatggtaaattcatggtccatcgaccattcatcaggaaagcaattaacaacatattctacaggtttatattcgaaacagagaaacataatggtgttgcagagttgttggagatcctgggcagtattatcaatgggtttgcccttccacttaaggaagagcacaaattgttccttgttcgtgcactgatccctcttcacaagccgaaatgtgtatctatgtaccatcagcagctatcgtattgcatcacacagtttgttgagaaggactgcaaacttgctgacacagttattaggggtttacttaaatattggcctgtgacgaacagttcaaaggaggtgatgttcttgggtgagttagaggaggttttagaggcaacacagcttgcagagttccaaagatgcatggttccactcttccgtcagattagccgtagcatgaacagctttcatttccaggtggcagagcgggctctgtttctctggaacaatgaccatattgaaaccctaattaagcaaaactacaaggtgctgttaccgatcatctatccagcactcgagagaaactccagagatcactggaaccaagctgtccgtagcctgacactgaacgtacgcaagatcttctcagaccatgattccacattcttcggggagtgcgtccagaggttcagtgacgaggagctcaagcaggcggaatctgattcaaaacgagacgccatgtggaagcgcctggaggaaatgggtgcctcaaaacctggcgggaaccatcccttaggtgcacccaatggcaaacccagtcacgctgctggctagaatacaatagcccaccgtaccagccgcatccgtgtaactcttcggctctcgtgccaagatctcctggaacctgggttgtgattttagctttgggattctttttgcgttggtttgcccctgttgtaggtgggtccgatgtgtttggttttgtaagaactgtatgttcaaaatgtacacacggaggaatttgacagatttggcatgtgtagcaacattaatcagaattactatcatatagtccaataaacaacgtcgattttgattgcagacacagtttaggtggcttatatatttaccgtgtgtagcaacattaatcagaattactatcatatagtccaatctacaacgtcgattttgcttgcaaaa

SEQ ID NO: 57588 - DNA, 606 bp, Zea mays
  unsure (1)..(606): unsure at all n locations
  Clone ID: MRT4577_152519C.1
tttttttttttttttttttnnnnnnnnnnnnnnnnnnnnnnnnnnnnnnnnnnntacatcacaagtcccacaaaagcagggtactgaaattccgccttgaacactgaacttcctcacatcacgacccaccaccaccaccaaaaaaacacacacaccatggcgttggcgataggtgccacgtctcgagaaaatttcaattccaccctgagaacacagtggacgcaagacctgagcgaaatattctcgcaaacgcaacgcatgatgggctgcatactgaccaaggctccatatccacatcaattactccagaaagatgtttcctcgcgaatgccaagtttgcaccaatcgcacacgcccgtcgccaccaacccacgcgcacgattacacggggccaaatcacggatccagcgacgaaaccaagggctccggaacgcgccggtcgtgagacaaatatatataaaaaaagaagggccgacgtattgagcgttgaccgaacatgaccgccaactccatcaggtggatcaggagttgagacttgagagcgaaacagacgcctgcggcctgcctgagagaggagaaagccggctcagtgcgctcacctagctg

SEQ ID NO: 57589 - DNA, 553 bp, Zea mays
  Clone ID: MRT4577_15251C.1
cctcgaggccggccgggccgggccgacaccgacgcgacagccgacaaggcagggggagaggggaaatggcatcgttgtcccgcaccgctgctgccgctgtcgtggccctgaggtcggcggtccgctccgcgccccttaccggccgcgtcctcggagcgccactaccttcctttgcctcgccttccgctacccgctccgcccggatcctccgcaggtcggcggccgcggcgtcggcggggctggaaacgctaatgccgctgcacagtgcggtggctgccgcgcggcttaggtcctgcatcgccgtcgactcctcctgctggtgctcgctctcacaaggatatgctttgcctttatgacagcgaggcgagctgcacatgaagaaacaaaagaatcttaggaattacaaacaagggctgtactgtaataatgtggttcttgtaaaccaattttgccttagaattctgtaacttgaatcatccacagatgtgcgactgtcttttgtttatgtggatctatgaattacctgcaaaaaaaaaaaaaaaaaaggccccta

SEQ ID NO: 57590 - DNA, 2281 bp, Zea mays
  Clone ID: MRT4577_152520C.1
gccggccgggtcgggctccccttgaagtcgcagcctcgcagcaggcttgcgcaagcttttactcctcagtcctgctccatctgcctttgctacttttgggggacctccacgcccctcaaatccagagaacaaaaaggagagagagagagaaagagagagagagagagagagagagggaggcagagagcttgccatcccaagcaaaggttccctccttccccacctcgcgctcaacccccctcatcctcccacatccgattgtgccctgcgctctgccgttctcttatccaagatttcgctggcggcggctcagggagcggacaaagattgttttttttttcgggctatggagacgaggcctgattcattcaggcccgggcggtggagtggcttcctgaccgggtctgattcgtattggttcaaatgatctgggcggcttaattggttgcatccgcttccgccggggaatcggagctagggctgtggtttgttggccggctggtggatttgtcggcttgggtctggtgagatctggagggtttctggttcagcgcacgggccgcaggtctgcgtagatcccctcttcgattccgtggcggatttgtttagggttttggtttgagtctggtggaacatgattaagcagatccttggcaggctgccgaggaagccggggaaggctggggatagccgggaagctgctgctgcggggaatggaactgagccgtcgaattcctacagtgttgtgaggggcatggacccagggaacaagagggctggaaatggagactatccagttccatctggtctaacttctaacccagtgatgaatggggctgtggtgtatcactccagtgagccgttaccggcattcaaggatgtgccggcatcagagaagcagaatttgtttgtcaagaaggtgaacctatgctgtgctgtgtatgacttcgcggatccaactaagaacctcaaggagaaggaggtgaagcgtcagacacttatggagcttgttgattacatcacttctgcgaatggcaagttctcagaggttgtcatgctggagatcacaaagatggtgtcgattaatttgttccggagctccagccccacccctcgtgagaacaaggccattgaaggggttgatctggaggaggacgagcctctcatggatcctgcatggtcgcacctgcagatcgtgtatgaggttttcttgagatttgtagcatcacaggagacagatgcaaagctggccaagaggtttatattcgaaacagagaaacataatggtgttgcagagttgttggagatcctgggcagtattatcaatgggtttgcccttccgcttaaggaagagcacaaattattccttgttcgtgcattgatccctcttcacaagccaaaatgtgtatctatgtaccatcagcagctatcatattgcatcacacagtttgttgagaaggattgcaaacttgctgacacagttattagaggcttacttaaatattggcctgtgacaaacagctcaaaggaggtgatgttcttgggtgagttagaagaggttttagaggcaacacagcttgcagagttccaaagatgcatggttccactcttccgtcagattgcccgtagcatgaacagctctcatttccaggtggcagagcgggccttgtttctctggaacaatgaccatatcgaaaacctaatcaagcaaaactacaaggtgctattacctatcatctatccagcactcgagagaaactccagagatcactggaaccaagctgtccgtagcctgacgctgaatgtccgcaagatcttctctgatcacgattctgcattttttggggagtgcgatcagaggttcagtgacgaggagctcaagcaggaggaatctgattcgaagcgagaagccctatggatgcgcttggaggaaatggccgcctcaaaacctcgcgaaaacagtcccttaggcgcaccgaatggcaaacccagccaagctgctggctagaatagcccaccatatcagccgcagccgtgtaactctgactctgggttgtgattttagctttgggacttttttttgtcgttggtttgcctctggccctgttgtaggtgggtaggatgtgtttggttttgtcaggactgtatgttcaaagtgtacacatacagaggaatttgagagatttggcatgtgtagtaacattactcaggattaccatatagcccaataaacaacgtcgattttgattgcaaatacctagtttgggtggtttatataccg

SEQ ID NO: 57591 - DNA, 651 bp, Zea mays
  Clone ID: MRT4577_152521C.1
cacctcatgcccagaaatttccggaattcttccacgtactcaatttctggaacctcccgtacgtcctcatcacctgcacaagccgacgcttgttctcatcctctagctgccgcccttgctttccatggcggcgcttcctgctgctggcaacagcaccgaccgccctccctgctcgccgttcctattctctggcgctcgcccctgccccagccatggacgccgtcgacctcgacttcctctggccgcggcatccgtcctgctccccgctccatccatttctccctcctatggcgcactccttcccctagtcgcccatggccgcgccctctgctcctccccctggcgtctccttctctggttacagctgtggaacagcagctgcccttgtccctccctggctctagctctccaagccgatgctgctcgctacccctctccaagctgacgccccaaccatggcactctctgctcctccaagccggcgacccctcctctctggttcagcgcaggggactccctccatggctggcgcccctgatggccggacctccacctcgccattgccggttgctcctgcactagattatcttcaagcccggtcgcggtatagcagcaacaaccatgaaaccccatcgcgtcgcgcccttcgac

SEQ ID NO: 57592 - DNA, 196 bp, Zea mays
  Clone ID: MRT4577_152522C.1
ccacaccaaatgccactctgacgccatagacatattcaatgcgaaaaagcttgaagatattcctccttcatcacacaacgtgagacattccgcatcgtgaaccgtcactgagcatcacgctgatcgatatttcgtgaggttttttttcgcgggggggggtcacttcacacggcaacactaaggacgaactcacacc

SEQ ID NO: 57593 - DNA, 116 bp, Zea mays
  Clone ID: MRT4577_152523C.1
gtcgacccagcgttcgctagcatattgcggtcatagctcaactttactagtaatgttgttttcttagaaaagagctttgtaagtaaagatgagctgttttgataaagttgtttgac

SEQ ID NO: 57594 - DNA, 471 bp, Zea mays
  Clone ID: MRT4577_152524C.1
tggcttggaacctttgggctgatttatgtgcttgggtaagaattggaagtgcggaaagaatgaggtcgatgatgataagtgtgagtctgcgcggaaggaagatgggtaggagcacgtgtaggcgatttggacgtctggtaatgggtggcgtgaggttattcgtgcggatggtatgtgttgttctcgttacacttggggtaagacgtataagaaggcgcggactgtggttggggatactgcttctgctggttcttgtgatcattaggatgataaggttgatgctacttctaagcatacgaatgatgaggtgtgttcgtctaaggttcatggggagtcctttgagatgtctaggtctaatgagggtgctgatgctgacgggtttgaggagggtgaggagaatggtgatcataatcatacctagcctgaggatgaggatactgataagactcaagaacctcgctctcttccctc

SEQ ID NO: 57595 - DNA, 413 bp, Zea mays
  Clone ID: MRT4577_152525C.1
acattattaagcataaaacttagacaacacgcggatgcgaaaataaacgccttattttatatcgggttacactacttctaaggcagaagctccagctccataactcgcatgcactaaaaatatggttaaacagaggtggggcgatagcctacttgccggatcatgattaacaatattaaaatgggacaaaaacttcattaaactccagcttacaaaccgatccaacatataacactattgacgggatgcaccctgacctacccgaattctaaaactgtctataagcaacacttatttaactggcatttgccacagaggtgacatggacaacaccagaaaaagacgctggtaggatgatgccccaccggggaccagatccgggttcattgatgggaactgtgaggctatttaca

SEQ ID NO: 57596 - DNA, 229 bp, Zea mays
  Clone ID: MRT4577_152526C.1
ttttatttttcataccggttgtttttgtctgtatagccacatgtcatgtgggtgttcgaactggcctgtaatggtctaccgttcgtgacttgtgttttcccactccatttctgatacttaagcacatatgaaaaagttgtttccggatcaaattcaatggtggtgtatcatggttaaaaaaaaagcaatatttagatttaaaaataaaaaaaacaaagaaagttaaact

SEQ ID NO: 57597 - DNA, 246 bp, Zea mays
  Clone ID: MRT4577_152527C.1
aaatctgcataatacgtgctgatacagcagctagaagcagattcgttccaacacagggagcggtacactatgcaatcgtcatagattggatacgggatggcaattatcagaaagcagcttgctatttgcgaaatgctgcatcgaagcgatccgcatatatcaatacagacgatataagcggataccaaaagcatgttaatacattcactgatccagctagctatgattaacatcatctaccactta

SEQ ID NO: 57598 - DNA, 590 bp, Zea mays
  unsure (1)..(590): unsure at all n locations
  Clone ID: MRT4577_152528C.1
cccgggcgaaagcactctcataaggaaaaaccaaccttgcagtgcataattctttcggctagtctcaaatatcgctactagagcgctatcaaaccactctactttctttccaagagatttcagaaaaatctttataaaaaagggtactgtactactctgattctgctgtacaagtagaaggcactaaacatgacccaacagtcaagctggtcgcgttgttttccggcttcaatgaatatgtggcgttaatcatggtctaatccaaaaaaaaccacgtgcaaaatgactgacagcctcgtcacgccaccagttttgctcacgagcctagcacaaagctgcccaccgcctagtccatgctacagtccagagctgctagtccagagctggtagaacggatatgcctcgtaattatcggcgtcaccatcgctgtcccactgctgctagtgctagctactcctacgtacagcagaaagagagggcggggacagccgcgggccccacctagcaacaaagccgggccccacgccctgccgctggtgcttgagaatccaggcccagggctaggcggngcccaggcgccgtggagccgt

SEQ ID NO: 57599 - DNA, 731 bp, Zea mays
  Clone ID: MRT4577_152529C.1
aattcggcacgaggcttcggcagacggggaggagtgtttgcttctctgtcttgatcggggaggcggcatggcggacacccgcaaattcgtgctgcccggccagcccccagacatctcgcagatactgcaggaggctcagaaccggtggctgcggcccaccgagatctgcgagatactgtccaactacaagctcttctccatcgccgccgagccgcccaacatgccgaggagtggctctctttttctatttgatcgcaaagtactgaggtacttcagaaaggatggacacaactggagaaagaaaaaagatggcaagactgtcaaagaagctcatgagaaactgaaagctggcagcattgatgtactccattgctactatgcccatggagaggagaacgaaaactttcaaaggcgaacatattggctgttggaagaggatttcactcatattgttcttgtacattacctagaagtcaagggatgcaagcaaagtttcaatcgtgtgaaagaagaacttatgcagctatctaatgtcgatagtccttcatgttcaaattccatcactagtcagaaccagatgggcccacaaaacatggaggctgctgaaagcccaataagcggacatatttcagaatatgaagacacctgatcagcagataattgccgagcaagctccagataccaccctctcgctgagatgcaacagcttggggatggagtcataatggaaa

SEQ ID NO: 57600 - DNA, 678 bp, Zea mays
  Clone ID: MRT4577_15252C.1
ggccgctttttttttttttttttttctttttttttttttttttttttttttttttttttttttttgggttttttttttttttttttttttttttttttttttttttttttttttttaaacccccccccaaaaaattagggccgggggaccccccccggggggaaaattttttttagccccctcaaaaaaaaaaggaaaagcaagggctaaaacaaacccaaaaccccttcctaacaagattccaaaaaacccccccccaatacccgcccggggacaagattttaccccatggctggccccggggttaaaccccccctttgcccgggggaccagggccaaaaaaaaacgggccggggcggaaccaaccttttttttcatgggggggagcccccgggggggaaacctttaaaccagggggcttgaaaaaaaatttggggagcccccccaccccatggaaaaccccccttaaaaaattaagggaaaaccggggggggcaaagggcccagggtccctttgcttttggggaggctgggccccaacaacacccaggggggcaggggcccccgggaaaccccccccggcctggggggaaccctttccgaatggcccgaggaaaacccgggggggggccccaacaaaaccggttcccgggccggccctgggggcccccaatccccc

SEQ ID NO: 57601 - DNA, 677 bp, Zea mays
  Clone ID: MRT4577_152530C.1
ggccgcttcttttttttttttttattttttttttttttttttttttttttttttttttttttaagaaaaggtcttggggttcgcaaacgttttttggtacaggtttttattgttgagctgggcttttttatggcccaaaaagacggatggccggaaacatacggggggcaggaaaaatggggggggaaacaaaagtgcgaggcccgtcaaggggcccaagccgggcagggagcctagagaccgggggcaaacgtggacccctggtcgacggaagagttgtccagccccttgaggtctaacacccccttcttacccaacccaatgagttcctccagaccaagcacttccagccaaacattgttggcgagcaaagccttggaggcaaaaaagggcagctctgacaaggacgatagcacgacagagccctcatccatgcccggaaaacaatccagaccctaaaaagctgcatctgcgaaaacgggcccagtataagccatggtcaacgccggtgagcccttccccgctgttgcttcaaccagcgttgtcccaccaagtggcgtaatgttggagagggccaaagagacgcctggggacaaggaattgcataaaagaggggcctgcgagaaaagcggatgaacacagacacccggatggcttaccccaacaggagcctcacc

SEQ ID NO: 57602 - DNA, 393 bp, Zea mays
  Clone ID: MRT4577_152532C.1
cggccgggcggaattgtgggccaccgcacgcgtgcggttccgtcacctggcccagcgcgccgtcgccggagtcaccatgggtcgcgttcgcagcaagacacgtaagaaaacctccaggcatgtgatctaaaagtacttcttccgcatgaaccttgaatttcaaaacaaccaagaagggcttcgagagggcttgatttttgccttcgaacggcttcggcaccaggggggttggtttaagtcccaacttgttgcgccgaatcaaggggggccaattcgggggattttgcgtcaagctgcaggaggaggagcgcgagcgcctcatggacttcgtgccggagaagtccgcgctcgaggtcgaagagatccgcgtcgacaaggagaccatggagatgc

SEQ ID NO: 57603 - DNA, 333 bp, Zea mays
  Clone ID: MRT4577_152533C.1
aaacggggccaactatcacaggaacgcgaatcacaaatttattctgtgactcatttctatccatcacgcataagggttcaacaactggccttggctttgcttccaaactaatcgcctagcaaaccactcatacaacttgccatcagtttaaaaccaactgacgctatgtggcccaatactgactcttaaaatggccgactcctaatgaaccaccaggctcactatcaggtgcctatacataggactctttccccttgtgcactatcagcgcatggcccgcaatttccagcacagcacctgtgaaaccctcacaggcgcctcctatgagtgctg

SEQ ID NO: 57604 - DNA, 614 bp, Zea mays
  Clone ID: MRT4577_152534C.1
aattcggcacgagggttcccatcctcctttcccgaacaaccggagcgcggcgcgagacaggcctctactccccgtctcccccgctccagctgacctcgcccactgtaagccccgcccgctcgttgcgccctccgtgccggattccgtcacgcggttttctgtcgtgatccgatcggttgtttgctgcggaatcagcttagtgattgttcttaattctctagggttgtggggagagatcgcgttcatcagtgccctgtacggagtgaccgatctcggatgaggaccgatatgccagttttgctgtgattattgatctgtgcggtgcgtaatcgatcgagatttagtttgatttgggaagcccagaagcaagggggacgtgcgatcgatcacgtgcgcggcgactgatggcaggctagattccggcaatccacagtcagacacatacattttgcgatcgatttttggtgaagcgaccttgatctgaaaatggggctgttccgggcggcgtccggtctggctcgtttggcgctgcggcggaacctctcgcgcgccgcagcgagccccttcgccggcagcggtggcgccgtcccgggtgcaatgccggcgcggtactt

SEQ ID NO: 57605 - DNA, 572 bp, Zea mays
  unsure (1)..(572): unsure at all n locations
  Clone ID: MRT4577_152535C.1
gtaaatcatattttgatacttanccagaagtatctatcaaggtatggatatcaaggaaggcaatgcatcaaagggttccaagcaactcctataaacctggaataaacactatgttagtgtttgttagatgacgtctgcttgacgagtatccctcgaccgaacattcgcttgatttaaccatcttcaggttggtccatcagcttcaccatgcggagtagtccacgcttggggtcgacttgactcaagttctccgcatctcgtggttaatcaacgtaccgtttcaacagctgccacgaatccacgagatcggtagcgattttctgatccaggcaatttgtcgagcgcttagggaatatcgcgctgctagcttcgccttcacctgattcttgggatttcttgctgacgcgcggaatgatgacgactttcagctgaagtcgggagcgagctggtgaggtggnggtttgagcagaggataacatgtttgacgactcgacggcaaacgacgcgacgacgagctgatcaaataaaaactccacgacgccgaccggcacatgggttagagaacggcggtc

SEQ ID NO: 57606 - DNA, 266 bp, Zea mays
  Clone ID: MRT4577_152536C.1
cccacgcgtccgagtttcttgataggaattcacttttgtgatgacatctctgcctcaaagatgggatcctctacttttactgcttctccaaagcgtttaatcaagagtgaatcatttcaaggtggtggcacaacagagctttgcttctcagatgatgcttttgatatggtacctgattgcagccggaaatctttgattagactgggcgcacacatgccaggccgggcagagcaagcatccagaaggagcgggttcgtattcccaaa

SEQ ID NO: 57607 - DNA, 395 bp, Zea mays
  Clone ID: MRT4577_152537C.1
gcgcagaggattcagcacgccgcccgttggtaagggagcttcgaggcggcccgcgggggcgcgtcatccgggcggactgagccaatggcacgggcccttggcgcgcgaacgctctaacagttgtcgtcgcgggcggctagcaaactcgccgtatgctagcttgtattctgacttataggcattcagtcataatccggcacactgtagcttcgcgccactggcttttcaaccaagctcgatgaccaattgcgtgaatcaacgattcctctcgtactatgttgaattactatctcggagcagtcattactaccttaaaactaacctgtctgacgacagtatagacccatgtcacgttccctattggagggcgaacaatccaacactggacgaattct

SEQ ID NO: 57608 - DNA, 476 bp, Zea mays
  Clone ID: MRT4577_152538C.1
gggacaattaatttcattaaaacgccttgatcattattaaaagtctatataatgcctaagtgaaatcgtcatcaatgggcaaaccacgacgagggtcacccgagttacatgctcgctagataacccatgataatgccataacgcgccagcaattatcacagtgatgaaacccaaacatccaatcatgatgcctttgcgtaaagtaggagacatctcgccctctcgattgagggaaccggtaccccatgcaaccgcttcttcccacatgttgagaagttgttcgtaaccgatcgaatatagaacaagacccataagggcaacggcgtatcccagtgtttgtgtaagggagatgtgagtaccccaaagcacaacagaagcagccacgagaaggatgctcttaagaataccactcagagtcatgacaagtcctgatgttttaccgatctgaaaaggagtcagcaatgaaagtgaaatgc

SEQ ID NO: 57609 - DNA, 523 bp, Zea mays
  unsure (1)..(523): unsure at all n locations
  Clone ID: MRT4577_152539C.1
cccacgcgatccggcctccctagccttccctagctagcgcctcccccaggcttgcgcctccattctcctccctcacganagctcgcggctgcggccctccattctccatgctcgcttcctccccatgttccctccatagagccagcgcatcctatggcatccagctcagccagnagagatgctcccgcgcagcagccccccatttttccataggcagctcaggccagcacatgatgtcttcattcggccatagagcgcctcatcagncgctagctcccatgccctatgtatgatcgcctcccctccagccttcagcacgagcgcatcctcctcatagggcgcaccctctccctgcctcggcatcatacgtcgaccagagccttgccaacgggagctcacccacgtaggccatgcctcccaactccgntctaggatcggctcagctcctaagcaccacctcgctgccgntctagatgtagagcttggcccctctgacgttcacccagtgagcagcaacagcgcc

SEQ ID NO: 57610 - DNA, 794 bp, Zea mays
  Clone ID: MRT4577_15253C.1
gttaggcgctgagagtatcgcggtgttgtgaaggccgggatcagtgggtgaatcacaggaggttctgtgccttttggtgctgtgatcttggaacgaatgttggagaacgcacaatgttcagtgataacggggacacttctgggatgacagaagtgcacctagatgaaacctgtgctggatgatttgaaatctgctgctgctgctagcctgctaccatcttcactgaaaccttaaaccaatattagttgaatccagcaggctcaatctggtgttgggagcctcaggtttcactgttgtttaagcttcaagcgttactgcaaattaggcatggtctgaacgtttgggaggaaagtgtgaactgaaggaaatgcacattgcagattggtgcaaagacaacttcaagctggattgattagtttatttcatcatattctgcaaaaggtgtgttgagccatgacatgtggaagctcataccaattcctagcttcatgcaccatgatgagtgtaaatttctttccagatgagtcaaggataaaattgcaattgttttttgaagtgtataatgggagaaaaagagctggtgagtttaacaagcaggagcggtaacttgggtaattggaatctaattgtgcttcccattctgtccaagatccatcataatgtaggcagtcatgccagatccgcaagtgacagcaatgggtttgtctagggaaattcctgaagaaacatcaaacacaccatattgttattgcttggcaaacttttcagaatttatgtacatgtataatatatct

SEQ ID NO: 57611 - DNA, 178 bp, Zea mays
  Clone ID: MRT4577_152540C.1
aaagcagggaactatatttggttaccagatttccaattttttttatttgtgggaaaagccgtaggtaacccactgggtggcccccacctgaaaaaaaagaggggagggcttttattggggttggggtttcccaaacacaagcaaatatggagagagatttaggtttaacgggggaggg

SEQ ID NO: 57612 - DNA, 788 bp, Zea mays
  unsure (1)..(788): unsure at all n locations
  Clone ID: MRT4577_152541C.1
tggtacgcctgcagttaccggtccggaattcccgggtcgacccacgcgtccgggcagtgggatctggagcgacggaaaagataaaagcgagggggcacaggcacacacgtggaatgtcgaggttttgattgatgttcttaaagagctgaacccgagtttgaatttcaaggaagtaacttatgaactggaccatcctggatttcagattcgtgacagcaaaggacttcacaatgtggtttatggcattcaaaggggtctgggcatggaagtgtttccagtagattttatatataggccttggaaacatgcagaaggccagctctccttcatccagcattccctgataaacccagaggtcttctgttttgctgactacccctgtcacactgttgccactgatattttgaaagcaccaccagaggatgacaatcgagaaattgccacatggaaaagcttggatttgattgaatctctgctgaggcttgcagaggttgggcagtatgagcaagtgaaacaactcttcagcttccctatcaaacactgtccagacatgttggtattggccttacttcaaatcaacacttcctggcacaccctacgccatgaactcatctctactttgatgccaattttccttggaaaccatcctaactctgccattattttgcactatgcatggcatgggcaggggcagtctccatcaattcgccaacttataatgcatgcaatggcagaatggtacatgagaggggagcagtatgatcaggccanattgtctcgaatacttg

SEQ ID NO: 57613 - DNA, 263 bp, Zea mays
  Clone ID: MRT4577_152542C.1
tcgttgttcaaagataacgcatgtgacctaagatgagctcaacgagaacagaaatctggggtggaacatacaggttaaagctcgctggattatgatttacagctcgaatactaaccgggtacgcgtggcctatcgatcctttagacctcaagagttcgaagcttgaggagtacagaacagataccacactggataactgtgcttgtgtgcagccaatctgatcatagtcgacttaagcataactgatcctccagatgattagc

SEQ ID NO: 57614 - DNA, 268 bp, Zea mays
  Clone ID: MRT4577_152543C.1
cgtgcatccttttcctaccgtgccgcccatctgtcggctggcgggcgcggcaagctaatccatggatctgtactacagtgcaaggctcggagaggccatgtgcgcaggcgaggcaaggtacattggcaccgcgggctccggcataagaggacgactcttaaccggggtagaagcggcgactcgcgagtcgacaacacaagcacataggacggtgagacagcacacattccacaagacatgggagaacaagcgcgccaccagacacgca

SEQ ID NO: 57615 - DNA, 454 bp, Zea mays
  Clone ID: MRT4577_152544C.1
gcatgatccctaccgccatgggcgcgggatacgggagagggctgttcccctctcccccagtgcctcgggaggctgagactgggttgtgcgtcttgctctgcctaggtcccacagcaagaggagggctccgtgcaggggtgatccttatcacttgaagtcctctctggccagagtccctcaccttcccacagcccttgctaatgattaccataaaagctgcctccggcctggccttctagcctcagcccagtcaaaagtcccacctttaccatttgatttggtgtgtgcccttagagggaattcagagctccgttaggctcatagaggggcccagaccaaagatatggagggaggggtcccatatcagcaaacacctcaagtttcctgcactgtgactgcatttaagaagcaaagctttgtcaggtctaccagagcagctgataagcctgcagaa

SEQ ID NO: 57616 - DNA, 246 bp, Zea mays
  Clone ID: MRT4577_152545C.1
tcccggggcgacgagcgttctagtcggcgggcgcccttttttttttttttttcatacaggggtgcacacgaaatgaaacgcgccgtggccagagggctttgacacatccaaaaatgcacacaggatatactctttttttattcgtaaacgggccaattaaaaagacctgctggaagtaaaagaggcaaaaggtggaaaacaaaaaagcggctggtcccgtatgcataaggcttatgggcgcccaac

SEQ ID NO: 57617 - DNA, 915 bp, Zea mays
  Clone ID: MRT4577_152546C.1
ctcgaggccggccggaaccaaaccccacccaagcgcaaagcgctagcggtcgaactcgagcccaatccagcggaaacccccaaccctagctcccgactcgagccgatcgaccccgatccgatctaatgttccccaccgtcgacgagccctccgccgccggcgccatggtctcgtcctccttccctgacgccgacgcctacggcaacggcgactccgacggcctcgacttccccgtcgaccccaaccccaacaccgtcttctcctccccggccgctgccgcggcccccgggtccgctggcgcggctggggagcggcgccagctgttccagcgcctgtggacggacgaggacgagatcgtgatcctgcgcgccttcgcggagttcacggcgcagcgtggcacctccttcgcgtcgcaccagtacgacaccacccccttctacgaggacatgcgccgccgcctcaacaccggcttcaccaagaaccagctcgccgagaagatccgccgcctcaagcgcaagtaccgtaactgcgtcgagcgcctccgcgtcgccggctccggcttcaccttccgctccccgcacgagcaggccatctttgagatcgcccgcaccatctggcgccccgcctccgacaagcacggccgcgactccgacgacgagggcggcggcggcaacgtccacgacgccaccttcgcccccttcgccatcgacgccgccgccaacggtgagtccgccaagtcttccaggccacgccgtggccggcgccgccgcacgggcgacttccccgccgacgcggtcgcgctgccgccggcgcccatgccgatgcaggtgatgaccgaagacgcgctcccgtcgtttccgcaggggactgcgggggcggtcatgaacgggggctgcggcctcatcgtggacccag

SEQ ID NO: 57618 - DNA, 1566 bp, Zea mays
  Clone ID: MRT4577_152547C.1
cattgggtacctcgaggccggccgggaccccggtcccacaaaaactgaccgctactcggcgtaggctaaccaaaccaaaccccacccgggccgccgggcgcaagcggtcgagctcgagctcgagcccaatccatcggaaacccccaaccctagcctccgactcgagccgatcgaccccgatccgatctaatgttccccaccgtcgacgacccctccgccgccggcgccatggtgtcggcctccttccctgacgccgacgcctacggcaacggcgactccgacgacctcgacttccccgtggacccaaaccctaaccccgtgttctcctctcccgccgcccccgcgtccgccggcgcggccggggagcggcgcccactgttccagcgcctgtggacggacgaggacgagatcgtgatcctgcgcgccttcgccgagttcacggcgcagcggggcaccgccttcgcgtcgcaccagtacgacaccacccccttctacgaggacatgcgccgccgcctcaacaccggcttcaccaagaaccagctcgtggagaagatccgccgcctcaagcgcaagtaccgcaactgcgtcgagcgcctccgcgtcgccggcgccggcttcaacttccgctccccgcacgagcaggccatcttcgagatcgcccgcaccatctggcgccccgcctccgacaaacacggccgcgactccgacgacgagggcggcggcggcggcaacaacgcccacgacgccaccttcgccatggacgccgccaccttcgccatcgacgccgccctcgccgccgccaacggggggtccgccaggtccccgacctcgaggccacgacgtggccgccgccgccgcacgggcgacttccccgccgacgctgtcccggagacgacgctcgcgctgccgccggcgcccatgctggtgatgaccgaggacgtgctcccctcgttcccgcaggtgactgcggcagcggtcatggacggcggctgcggcgtcagcgtggacccagcctctgggctgcctgccgcgctgtcaacagctgcggcggcagcggccgtctccggcagcagcaccgcggagaaccccatcctggcggcgctgttcaaggagatggtgcacgcgatgctgagcgtcggcgtcggcggcagcacggcgcttctggggctggagccgccgccccccatcgcgggggtgccgatggaaggggagaagtggcggcagcagcggatccaggagttggaggtgtacctgcgtcggatcgacctgctgcaagaccaggcgagggcggcgctggacgaactcaggtccgccccgcacgccggaggaatgaacacctgatgatcagcagctccagagtcgcgtcgtcttgcagatagcgcatcgtccataaccatgagaaaagatcatttttaccggtagatttctctaggctcgagcagcagcagcagaaggggagcttcgtctgtaattctcattttctgtctgcgctgcagactaagccgcctggtcttctcttattttatatataataacttatataaagattgtcctatcgtgcgtgcc

SEQ ID NO: 57619 - DNA, 391 bp, Zea mays
  Clone ID: MRT4577_152548C.1
tttgcttctcccgaagccgacggctggtctgcggggcttacctaaacagccttgggcgacatcaagagcggaatgaacggtttgggaaggatcggcaggctcgtggccagggtgcgccctgcagagcgaggatgttgagctcgctggcttcaacatcccgttcatcaccacggattacatgacctacatgttcaagtacgacaccgtgcacggtacaatggaagcacagggacatcgacctcaaggactgcaagacgcttttcttaggctagacgccgggcaccgtctttggaatcaggaacccctgggagatcccgtcgggtgaggctggtgctgattatgtcgctgggtgcaccggtgacctgactgacaaggacaaggctgctggaca

SEQ ID NO: 57620 - DNA, 563 bp, Zea mays
  unsure (1)..(563): unsure at all n locations
  Clone ID: MRT4577_152549C.1
ttgggaccctcgaggccggcccggggtagcagacccgccgtctcagctcgcgcgtgctcaccatatgacctaccccgctncaaaacagaaaaactggaaaaaaagattctccgtccacccgcgnccaagctagccccgtcgactcgatggccaccggcccgcgatctctgcacgccctcttcggcggcggcgcagcacgccgcacttgctgctgtgtaggcggaggacacgccccggcggcggccgtggtgggcgcaccgcggattggctcgtcccccagcgcgcgggacacagtttcccttncgccctgcacaacgacctggtactcctcgtcgccaccntatatttctgggccaagcatgctttgcctgcataacaggcctctaccacctcttgctgaccctgaggctccagatgcagttgctgtaaaggctgcagactatgttcttgaatggacaacaggatgctggctgtcggncatgacatcgcgcatcaagagaaataggacagttctataaaggtgatgttgcacttgtgggtggttncatttgttggaatgcctg

SEQ ID NO: 57621 - DNA, 343 bp, Zea mays
  Clone ID: MRT4577_15254C.1
cgtacgcgaggagccagctgccccggcggataccgatccattttccgccgctgagccctaggcggccgccggggcggttgatgaagagacgccaacggacgaagagacggcaaaggaagcggagccggagccgtctgtggctgaagaggtgaaggaggaagcggcagcgcccgctgccgagacagaagcagaaccggcagccgcggagcccgaagctgttactgccgaggagcccgcggcggctgagcccgaggctgctgctgccgaagagcccgagaaggcctagccggccgctgaggtggcccaaaaagccagcgagtgaagtcgtgccccgtacgcgcac

SEQ ID NO: 57622 - DNA, 475 bp, Zea mays
  Clone ID: MRT4577_152550C.1
agctacgaagcagatactctttattggactatctctctctctctctcctatcatcgtgatgcagagcactgcaccatgttcattcaaatggaggccgtatggaccttgatggcgatccatcgatttatatataccgggctgatcgggcaagcagctgactcgctgtacctgctggaaccacaccaaccaccctttcatcaagaggtagcgctcctaacctagaaccgacacagaaggttgttattcctcgacgccgcattgtacacgcccagcaccagctcaccaggatccgtggcctagaagctgcccttaatgatgggctcctcgagggcggtgaccttccgcgtcttctgcacgatgacggagtagacgccctccgcctcggtgatgaactcgacgccgtagctcacctgacaggccagcacgcggagctcccacaccacagaggagttctctgtggctgggatctccacag

SEQ ID NO: 57623 - DNA, 381 bp, Zea mays
  Clone ID: MRT4577_152551C.1
cggtcccgggttcgaggcacgcgtcacgccaaccttgacacagagctccttatagccgtctgactgcatggccgcctcgaccaagaccgtcgccgggctactcaccgcggggctcctcagcgctggtcgcgtgcgaggcatgccagcgtgaagctggaggaggacacacttctgggaagcctggccccagcccccgcgccggccgtcggcggtgccgcggggctgcccgtcggcaagccaggggcgtgcgccgacgacgatctggtcgatatgagcgacttaatcgggatgtgatggcctcgggatcgagctgcgcatggcgggagatggagaggcgacaagctgcgatctggcatccatgagagagaggagagggggata

SEQ ID NO: 57624 - DNA, 565 bp, Zea mays
  unsure (1)..(565): unsure at all n locations
  Clone ID: MRT4577_152552C.1
cgcccttagatatctccagaatctagcccttatctgtctgatgttcgaggcttcccaaaaataaaaaagtacatttctaaaaaaaaaaaaaaaaaaaaaaaaaaaataaaataaatacctttatcactcatagatacctacaacaataataaaaacctattacaaaaaaaaaccttgtgctgcatttaattgtcacaaaacaatcacggcacaacaactacaccaacttgtgctagcaaaccttggtgcctactctcatcaacagcaaattcttccattcaaccaactagctgcattgaactctgattgttatttgcntcaacaacaactaccattcaaacagctacctgttgcctacccccagcggtttcttccattccacccactggcagcattggactctcctgcttatttgccgccaggncaacctctatcattttgccacctagctagggtgagccctgctaccttcttgacacaaccacagttgttgccggtctacctttcccttcgcctaacccttgcaccctcttacccttgaacaattgctttctttttaccaact

SEQ ID NO: 57625 - DNA, 459 bp, Zea mays
  Clone ID: MRT4577_152553C.1
catgaagctacttattaactgtacaaaacttgttccgttgttgtgaaatatatggatggaaccgggatgattgatattgcagatggtgtttggcaagctatgatacataaagaaactgcaccccgcttctgtagttttgtgatatgactacattgcttattatgtccccacttatctacaggatctcgtacttattttagagacaatgaggataattgcaatcacactatctcctatcactccaagcctttctctgaggatttacacacagcttggtttcacagaagaccagtttagggtgttgagatgggtatgttcttgtatcatagacatgctgtatgattccgttcttatttatatatgttcatcctcaaaaatacaatcaggcatcatcaggaaatgcagtcttcaatcttatatggatcagcctcagtattttccagagcatgtaatcatttt

SEQ ID NO: 57626 - DNA, 347 bp, Zea mays
  Clone ID: MRT4577_152554C.1
atcgtcttaaatagtttaatgcgccgggcctagttctacatctataactccctccgtggaggtacggcaagcaagtctagttcgctctgcgctcacaatatctgctcaactgcatgtacaagcagtgggaagatcgacggtagccccaacatgaatcggaccgtactcagggacatcatccaatgtgatcacgaggccgcagatccagtggctacactaggacagggcgggtaggtcgattactcaccgctcatgcacgattatagtcgcactaaactcgagatcttacaagtgaaccgtattcaccactcggtcttatattctcatgaaacacatctagaaatcga

SEQ ID NO: 57627 - DNA, 212 bp, Zea mays
  Clone ID: MRT4577_152555C.1
tcttctcggactagttttttctgaagattcagctgtggcttcgacgatccagtgggttaaagctcgccagatctttgacagccgcggcaaccctacagtcgaggtcgacgtgttttgctcagatggaacctttgcaagggcagctgttcccagtggagcatcaactggtgtatttgaagctctggagttgtgggatggtggatctgactatt

SEQ ID NO: 57628 - DNA, 379 bp, Zea mays
  Clone ID: MRT4577_152556C.1
gggggtggtgtttttttttggtgggggtgggtacacaaacaaacatttgagcggggtaattaatacatgggctaagggtaacatgtttacccgggtggggcccatacaaccacaagaagatgatccatgtttggggggaacaggagccatacaaaacagttaaatgcatggcctaattaccaacctggcacccaggagggggagactgactaattaacatgcttaccgtgccataaactttttaactgaaaacaatgggaatgcgaatgcaaatgtttgttcctaaatgagatacacgggcccggatggggttcaaggttttccggcgttgcggtttcaggggcactttaccgttgagggggcgattgtttcatttgtt

SEQ ID NO: 57629 - DNA, 228 bp, Zea mays
  Clone ID: MRT4577_152557C.1
cggacgcgtgggcggacgcgtgggcggacgtttgtgcttgagcgccgttcatcggaatcggtcctactagccagtcgactctatctgatcggccaatgccatgcaccaggctctatatgtgcagtataataactcaagttatactgctcttgcaattcgtacgatgcattccaccaattctaaaccatactttaacgctgttattgtcacatcgcctacagttccctt

SEQ ID NO: 57630 - DNA, 491 bp, Zea mays
  Clone ID: MRT4577_152558C.1
ttttttttttttttttttttttttttttttttttttttttttttttttttttttttttttttttttttttggaagaacccaaaacgggggccccaaattttctttcccccaccccgggattcaacaaactggcagggtatcctttacccattgggggaaagaaaaactttggaaactttggtcttcgaccaaaaatatagcaaaaaaccccccccggggggggggattttttaaccggccccacccaaactttaaaaaaaaaaaaaaatcaaaggggaggggcttttactgggttcctgttaccaacaccggaatttttcattttatacaggggcaaaaacccccccggccggcgttggggggttcccggattccaaacgggggaacattttccacttgtccccccaaatttttggacccaaaattaaaaaccaggggtttttttccaaaaaaggaacaaataattttttggggggcatgtttcccaacag

SEQ ID NO: 57631 - DNA, 270 bp, Zea mays
  Clone ID: MRT4577_152559C.1
aggtgcctatagagacttgcgtcgctgccgcgtcgtagcttgatctctagagcgcgtcgcgatctaactgtttaagggggcacacttttccccgaagcccaatgagtgctccaaacatctggaaatgtgttataagaaacgatcttcaataattctacacgaatctgtgctgttcccgcccctaaagcgatcgatctattcacagaataatttgactaccaactgctcatacttatgactggacatctgggaggacccaaataattatcc

SEQ ID NO: 57632 - DNA, 987 bp, Zea mays
  Clone ID: MRT4577_15255C.1
gcgagaaggcagggggagagacatgcgcgtacttgtcccgcacagccgccgccgccagaggaaccgtgatcggcccaaacctagtagcgtctagcgttttccccgccctgagaccgcgaggtcctccccccacctcgccgcgaccgccgccaaggcacgggaagaggggaaatggcatcgttgtcccgcaccgctgctgccgctgtcgtggccctgaggtcggcggtccgctccgcgccccttaccggccgcgtcctcggagcgccactaccttcctttgcctcgccttccgctacccgctccgcccggatcctccgcaggtcggcggccgcggcgtcggcggggctggaaacgctaatgccgctgcacagcgcggtggctgccgcgcggcttaggtcctgcatcgccgtcgactcctcctgctggtgctcgctctcacaaggtttaaacaagcgcatctgaccatggctaggagctgagcagaagagaagtgaggacactgagttaaaacgaagtcatttttttgttgcagatatttgtaacatgtactactttgatcgttgctctatgcatttgcccatggcttcataacggagcatgccaatttgttccttgtaacttgcattggttcttattttcagtttgatcatgatcatgacaatgaaaacaaaacttgatttacattaaaacacacttttttttctatcagctgtgcaaaattactccatttgaaataatgccagcatatggcattacttgtctccatggcctgacttgctcttgtatttggtgatataggatatgctttgcctttatgacagcgaggagaggtgcacctgaagaaaccaatgaacattaggaattacaaacaagggctgtaataatgtgattgttgtaaactaattttacctttgatgttcattgaatcatccacagatgtacaactggcatttgttgatgttgggattttatttacgtggatccatg

SEQ ID NO: 57633 - DNA, 767 bp, Zea mays
  Clone ID: MRT4577_152560C.1
ccggccgggatgttccactccaaggaatctcttcgtccagctccacgtaccacctagtccagacccagaacaacccggaggccagaggtagacgactagcataagtaatcatgactttgcccgtcatttcgcaactaatccctatcattatctcctccctcctacacccaagtggactcgtaacaaccaatagtccctcactgcccatgggaacgcacacggccgaccgcccgatagagagaggggacctcgagatacagagactacaagagcgtgcgcgacgaagcagaaaagtatggccacagctgccactgccgccgaaaagcagcaagagcgagggcgacattgcggatgctggcataagggaaatatagggaggtccccgcatggcggaggaggtggaggcgttcctcgccgcaggcatggcgcggcgcttcacggccaagtgagtatgacagtgtgcgtcggaccctccgcctcccccctcttactagtaagaggcaatggaaaacactcggcgaactctttagcaagtactttttgttggacactcagtaaaggctttgccgagtgtctcttagcttcgcctctcttttactgtttatagagtgtagtttgaaataaggagtgagatagagagttagataaggagtctgctggagattgcttaaccatgtaacgcctccctcagctgtaattacgctcacgagatagctaatcatgtgaaggctgcttaatccgaaaaaaaaaaaaaaaaacggccctcc

SEQ ID NO: 57634 - DNA, 801 bp, Zea mays
  unsure (1)..(801): unsure at all n locations
  Clone ID: MRT4577_152561C.1
gccggcctggttccggactgtcctctatacgactcaagcgattcacattccacaacccgctaccgacatcacatcaccccagcctcattttctatggaagcctctccacaaacctcgaatctatgagacaaagaaggaccacgatgtgatgccgttcgcgaaccacgtacgctgctgtgagcacagactgcagccaccaatcgtacgattacttacggccactctgcctgagactgctgcccattctgctaaccatgcaactactgttatgctgcttaccgctgatctggtacctgtggctccaccacaagcactctggcttctaccagtgtctatggcaactcgaagcacctggacatcacccacgtctcgttcccgatgatcgacacgtctgttgatgacgacatggctgcacgaaacctcgacggactcatcggtctctactactatcgcctcaagatgatagcacctacaaagaatctgaaatcgttcttgttgatgaggctgacactaccatcaccaatgactcaaggatctactggttatgccatcctgggtacacgcacccggagttcccttctctcacctcctcagggaagaagttgcctgacctgtcgtgcgaagggtcactctcaccacaagaataggatcgacgagaagggccacctgaaagcgcaaccataccctttccctcgtcgctaccgttgagcacttacatcttgatgttctgctactgcgngacctgcctcatgcatgctctgatagatttttgnaatttttgttgcatcgttgaattttgct

SEQ ID NO: 57635 - DNA, 228 bp, Zea mays
  Clone ID: MRT4577_152562C.1
tttttagaagaaagaagataatatgtaatgacgatcgatctgcagcaggatcaatcaacagaagtactccagacgattagtcaggggaacgaccttactatccgtccacacacacaaaacttgccggccgaagaaagagcagataaccttagctaagcaagcagcccagaaatcgattctactatattgaggcaggacggaaggtacaaggcgacgactggaatctga

SEQ ID NO: 57636 - DNA, 578 bp, Zea mays
  Clone ID: MRT4577_152563C.1
ggggggaagaacccctttttccttcccttcccaatcaaaacaaaaaaaaagggacctgaaaaatccttttccaaccccccaaaggtggttttaaaaaccggggaaacaaaaccttgggagaaaaaactttggaaaaaagggttctttttatgccacccaaaagggggttttggggcccaacccaaattttttaaaagggccccaaactttttaaaagaaaaaaaacccggtttaaaagggtttggccccaaaaggggggggcaaccaacccaaaaaggggggtttttttttttttttgaagaagggggggttaaaacccctttgggtaaaacgggggttattttttaaaccgggaaaaccttgggggtaaaaaaccggggggtttggggggaccagcccaaatgccccttccccctttcaagagttttggggcccaaccccaaaaaggccctccccaaaaaaacgtaaactggcggcctttggggggggggaaccgggggctattccccacaaaattttggccccggatttttgaaaaaacgggggcttcccccacccccaaaaaaaaaataaccctt

SEQ ID NO: 57637 - DNA, 621 bp, Zea mays
  Clone ID: MRT4577_152564C.1
cgggattataagtttattatcactcgccgcgtcccagcttctgtggcacgagacttgctccgcctccggtccggtcacaaccgcgacaccggaccagcccatcccggatccatacatggaccaaacacagcggcggctcgatgaccacggccacgcgccggtggtcagtgcccacgcccagcaggccggtccagacaagagccggcagcaggagcagccgccgccgccgccgccttcttcgttgaaccagacggcggcgaggctcctgcgcgaggccaccgtctcccgcccggacggcgagaagccggcgtcctcggacatcctggccttcgcgcgctccgtcgaccgcgtagactcgcctctcgagtagctttttttggcttgcccactctcagtcagctactagctcactggctttgtttcttttcttctccatcttgtgttagcaccgtaataaaaaagggtcaacagtagtcaacactttcctccgtatttcgatcgtcagtttgtttgtcattcctgttaaggtcgagggattactgcaggcttgtcattccattttcgcgatttcgaaaaaaaaaaaactcaacaaaaaaaaaaaaaaaaaaagcggcccttgtg

SEQ ID NO: 57638 - DNA, 288 bp, Zea mays
  unsure (1)..(288): unsure at all n locations
  Clone ID: MRT4577_152565C.1
atgccgcttgggcggggtctgcgcttgcggacgagcgacctcttcccgcgcccctcgcggaagaagggctacatctcgttcaccacctaccgtgctacatacaagacctaccattacacctatgccaaggtgaggggggggggacacaangcgatgccgcacaagttctaccacggactcacatgatcgcgtttggaacgtgaccaagcgcgccataggtcgtgcagaggaacaagcaggtgactgggcgcatcatcgggaagcctcataatgtgcgtgtggagcatg

SEQ ID NO: 57639 - DNA, 489 bp, Zea mays
  Clone ID: MRT4577_152566C.1
gccgcgcgtaatgtctctcctcttgcggtcctctgctgtctccaggtctccacggtgtctgacccgtacaactgaaccggcgatggtgcgccgcctcctcgtcgccctcctcgccgcgtacgcgtgctgtgttacgctggcaggcaggacgctgctattcaggcaactgttgcgaaagcgagagctcacaggtacaccaacctcatcgtcgacgtggccgaggtcaacaggcccatagcgctgattgacgctgtagacagaacatattgtgaagagagcgtaatattatcaagaaatcgggataatagctcgagactacgagaagtacttctggatccggagaatgcgccacaggaacaggatgaataactgcttgattagcagcatgaaggtctgttgttttaaaagatacagtggcaatagatactcaatatggtgaccaagaccaccaaataaactttggttacctctgccttgcctggtaagcta

SEQ ID NO: 57640 - DNA, 293 bp, Zea mays
  Clone ID: MRT4577_152567C.1
gggcattaaggccaacccatggggaaaaaaaggtaggggaaaaaaggggggggctttgccaacgaggaaacagccctagctctgaaactgggcaggttgaaagctcttgggcggctccttcgtatgttcaaaaacccctctgaccattatcaaaggggccatatcggaatttaaaaaccccccgaatccggggaaaataaaacactccaaacctaaggggggggcccccccagaattttttggaatcccggaaaccccctatttcaatccccgcccccggaggaagcaccccc

SEQ ID NO: 57641 - DNA, 421 bp, Zea mays
  Clone ID: MRT4577_152568C.1
tcgcgatcctgatctaggtttttttttttttttttttttgaaaggttaacaagtgctaagacgataacttataattcctggcgacaacaatggatgatgcggtgatgattgctgtggcggaggcctgaatttcccaaaatggttaggaaggaagaacgtccctaggtcccacatcttacgggcatccaaccaatcaggcaaccaagcatccaaaggtgaggagagagatgaatccagccgccgccgccccagttggatcgcgatggggaggaatcaatcagtcaatcgatcgatcgatcatgacggcgggccggcggtcagtggcggctgggccacgaacgggtgctgtagcataccgattgcgggcgggcggttcgctgggtttttctggaggcagaggctgatgaagttcttgaagtcc

SEQ ID NO: 57642 - DNA, 111 bp, Zea mays
  Clone ID: MRT4577_152569C.1
gacgccccgaggaagcagcacggctgtgagtccagcacagccagcactgggaccccgtcctgagctgagcggttaccaccagccgcaggcctgcggaggcgctagtccacc

SEQ ID NO: 57643 - DNA, 308 bp, Zea mays
  Clone ID: MRT4577_15256C.1
gagctcacttgtcggcggccgcccttgggttttttttttggagcactttcacggattgtccgcagaggtcttcacaagaaagacagggctgggacgacacagtcgtggcagagccaatctggatgagggtacatataaacaccttagacgagtcggtcgaatccaatagctacaccgggtggacacccatcgtgttagggaccaacacaacgggactggacatggtgtcaggcgaagggaacgcgtacgatcctcggtgctatgactaggacccagaccaaaggtggttcgataggcactgggacgcc

SEQ ID NO: 57644 - DNA, 190 bp, Zea mays
  Clone ID: MRT4577_152570C.1
ctataaccatttctatatttacatttgaaaatctcctttggagacttagaacctctaaattaattgacttattttttatataaggtcactccgatgaaaggtgattacaaaatcttccacattgtcgtctacaaaacagataatatggatgtttgatcgcatctcattgttaactctttactgatatgtt

SEQ ID NO: 57645 - DNA, 361 bp, Zea mays
  Clone ID: MRT4577_152571C.1
gcagtaccaatgggggggatttttttcttaagattaactttataataatcctgtcttgtgttacaggggacaacgatccgcacatattctcattaatgcatgggtccaatgataccgaggatgaacacagggcttaaaaaagaaacatagcggcctagcaatcaaaaacgcacatagtccacagcaaacgggacagggacaaaaatatttcctttggactacgggaaacataacaactgcgagcttgataacggggccgtgcgggcccaaccgataaaagcctacagaacccgtttgaggggccaccggcgccattacggttcccaaatgaataggggaattcaccacgactgaaggggta

SEQ ID NO: 57646 - DNA, 515 bp, Zea mays
  Clone ID: MRT4577_152572C.1
cctcgaggccggccgggcacttcctcgacaaaggttgcacatcagcagccataccttcaagatgaaatcctacccaacctcaacatatctactacagatctcccacgccatgacggttcaatcggaagcaacggctgcacacaacaagcacggctcgtcgcgccacgtagaacgtacatacaacatgctcccactgcgacaagagatatacaaatgataaagctatcaagaggctcttggcgaggaacatcgatgagtatgctgctgtgagggacatgcaaagaggctgtgtgcatgaagcatatagtcttcacaaatagtactgaaaggcacatcacagtgtatcatgagaaatccatgaacacagttgttcccgtaccctctcatgataacaaaaggaaactacgacccccgcaaggattctggcgacggcatgatggaacaaagccctggcatgacccaccacaaccatgtgaagatgacacaggaggtccccctgaatgcgctcctcgtgg

SEQ ID NO: 57647 - DNA, 346 bp, Zea mays
  Clone ID: MRT4577_152573C.1
gggaaaacttaacaaaacatttttttcattccaaaaacgggggggttttccaaaggaaaggggccctttataccaggccccgatatccccaaggggcaaaccttataacaaaagcgggaggggaaaacccttccaaggcccaaccccaagcctaaaaaacccccccccaaaacgggaaacgccctccatccgggggaccccttgggggccccctaataacctccaacaccgggggttcaaaaaccctggggccggggggccctttcccagggcttccccgacaaaaaaaaaaggcctttcagggaaagccggggaaaatgggaattagggaaaaggctttggcaaa

SEQ ID NO: 57648 - DNA, 279 bp, Zea mays
  Clone ID: MRT4577_152574C.1
cggaatggcagaatcgacccaagcgtcccgccacgcgtgcgaaatacaaccttgaaatgcttgatttgatgactgtttcccaatacgtatgcacggatatatacttaagccttgatactgctattcggtgagcaattgaactctctaagcatgtactatatctcaaaagaaagtatggcaggccgcatctatgaagtaaccaagacttatcgtacgctctgcatgctatcgtcataggctcttctattctgacatctcaattgaattaactgtccaacc

SEQ ID NO: 57649 - DNA, 175 bp, Zea mays
  Clone ID: MRT4577_152575C.1
gcgatgctatgcatgtgtgtcgctgatcctgatggggcattagcaacttgtttggtggtgcttgcacaccattaccggaacgatataatcctagaatttgatttttttgggccccttaaaatataaaacacaaatatagaaggtggtgtccgcaacaaaaccacacttaatataa

SEQ ID NO: 57650 - DNA, 364 bp, Zea mays
  Clone ID: MRT4577_152576C.1
catccggtccaacactttgacgctcatgcgctgaactctagcaatggatgcctacaccatggagatctcctccacggagatggccggtacccccatcaaggagggctccttgggcgagggccgcatcaccatgcgcaagaccgtaggcaagcccaaggtggcggcgtccggctatccctggtacagtcccgaccgcgttaagaacctaggccccttctccggtgagcccccgagctatctcaccggagagttgcccagcgactacaggtgggacaccgtcaggctgtacggcgacccctagaacttctccatgaacctcgagctggaagtgatccactcctcctgggccatgctcggggcgctc

SEQ ID NO: 57651 - DNA, 179 bp, Zea mays
  unsure (1)..(179): unsure at all n locations
  Clone ID: MRT4577_152577C.1
gcataacatgattcttccatagaaagattaaaatggttgggctaccggcctgaatccaatgacaaggtgcctttcggaananaacacgagaaacgttacaatggtttctcaccaaagactgtctacaccaagttgatttcaacatctagcctgccttactgaccccggagatttttgaa

SEQ ID NO: 57652 - DNA, 281 bp, Zea mays
  unsure (1)..(281): unsure at all n locations
  Clone ID: MRT4577_152578C.1
acagtccacgaacttagagacatgatgtaaaaaactttaagagccacgagcaagggcggcctgagcttgctgggcgaaaatctcaaggtgaaccggaccagcgagcgaataaaaccacgttgcttcaaaccaacttagcttatggggcaacaagggcagcttgccagctagctgcctactgtacaagttctttgtacgacccctcttaacaagaccctctaacaatgngaagctagacggggccggtcgcttccagctcaagcttaagcttttcttttttg

SEQ ID NO: 57653 - DNA, 987 bp, Zea mays
  Clone ID: MRT4577_152579C.1
cattgggtacctcgaggccggccgggtccctcttcctcctcctcctccgcctcctcttcctctcttttgcttttgtgttgctattgggttcttggatagtgtgcatcggcatagcagcagcagtagtaattcatactagtgggcggtgtgatagcagcagtgagatcgaggagaggatggaggtgttcatccacgaggactacgtgaacaagcgcaacgagctgaggagggagcagaggcgccgggaactgcagaggctgcaggtggagagcaaccccgacgcgtcccgggaggcgctggcaagccgggagagcccgaggacgccggctcagtgcctgacgcccaccggcgcgtcgccgtccagcttcagatccccgacttcgaggagcacgctgcggtcgccggccgcagcggcggggcaggctgctggttggccgtcggagcatcgccgcctctacgactgcctcaagccgtactagtaggtaggcgacgtggagtggcctcaatcctgctgcgtacacggccagacgtggcatgtcgtccaacagaataagcgcggagacactcctgtggtcaaagcagtccttctgttgctctgctcgtaccgcggttcagatctgtgccatggcatggtcaagtgaatgaggctgttctgctctgttccactgtcatggtcacagcaatctttgattcagtttcaaggatgacgtccagaactgcccagtactgtttggcctattgtggtgcatcagaaattcagaagagtgaaagagttccaataatgcaatagccatttttagttagccccatagaaaacctacctgcttcgatgctgctgctcgttagatagatagatagggggtcttacttgtatttttctctttataagcggttttgaactcctgtatttgtatatgtatttgggctagttgcctaataaataataagtcctattcataacaaaaaaaaaaaaaaaaaaggccccta

SEQ ID NO: 57654 - DNA, 380 bp, Zea mays
  Clone ID: MRT4577_15257C.1
atggtgacgttggagctgatcctagtggtgtacggtctcctagagcaaagaactgcctttgtgaatcctcaaattggcggggattctttatctggccggccggaatgcatattctatctatcaacattcaaccctaccagctaggtaaaaacttctagttttttttccagttctgagtttcagccatgcttctagttacggatgaagttcctgggttttcttgtttcgtctaaggggttgagttttcataggcaaccagtttgtgttgatactattcctgtaatcctgtttactgttgatgttttttaatgtgaaaccatgctgcttgttgattttggttaaaaaaaaaaaaaaaaaaaaaaaaaaaaaaacccgcggcc

SEQ ID NO: 57655 - DNA, 804 bp, Zea mays
  Clone ID: MRT4577_152580C.1
cctcgagggcggccgggcgctcttcctcctcttcctctcttttgcttttgtgttcaccagcagcagcagtagtaattcattcattcatagtgggcggtgtgatagcagcagtgagatcgagaagaggatggaggtgttcatccacgaggactacgtgaacaagcgcaacgagctgaggagggagcagaggcgccgggaactgcagaggctgcaggtggagggcaaccccgacgcgtcccgggaggcgctggcaagccgggagagcccgaggacgccggctcagtgcctgacgccgaccgacgcgtcgccgtccagcttcagatccccgacttcgaggagcacgctgcagtcgccggccgcagcggcggggcaggctgccggttggccgtcggagcatcgccgcctctacgactgcctcaagccgtactagtaggtaggcgacgacgacgtggagtggcctcaatcctgctgcatacacggccagacgtggcatggcatgtcgtccaaccgaataagagcggagacactcctgtggtgaaagcagtgcttctgttgctgctcgtactgtgcggttcagatctgtgccatggcatggtcaagtgaactgaggctgatctgctctgttccactgtcatatggtcacagcaatctttgattcggtttgaaggacgacgtccagaactgcccagtactgtttggcctattgtgcatcagaaattcagaagagtcaaagagttcccaataatgcaatagccatttttagctagccccatagaaaaactacctgcttcgatgctgctgctc

SEQ ID NO: 57656 - DNA, 1066 bp, Zea mays
  Clone ID: MRT4577_152581C.1
cctcgaggccggccgggatattctggtgtcctaggcgtagaggaaccacaccaatccatcccgaatttggtggttaaactctactgcggtgacgatactgtaggggaggtcctgcggcaaaatagctcgatgccagaatctcttcctcctcctcttctcttttgcttttgtgttgctgttaggttcttgggtagtttgatgaatgatactgagcagcagcagcagcagtaattcatagtgggcggtgtgatagcagcagtgagatcgaggagaggatggaggtgttcatccacgaggactacgtgaacaagcgcaacgagctgaggagggagcagaggcgccgggaactgcagaggctgcaggtggagagcaaccccgacgcgtcccgggaggcgctggcaagccgggagagcccgaggacgccggctcagtgcctgacgccgaccggcgcgtcgccgtccagcttcagatccccgacttcgaggagcacgctgcagtcgccggccgcagcggcggggcaggctgctggttggccgtcggagcatcgccgcctctacgactgcctcaagccgtactagtaggtaggcgacgtggagtggcctcaatcctgctgcaatcacggccagacgtggcatgtcgtccaaccgaataagcgcggagacactcctgtggtcaaagcagtgcttctgttgctctgctcgtatcgcggttcagatctgtgccatggccgcatggtcaagtgaactgaggctgatctgctctgttccactgtcatatggtcacagcaatctttgattcagtttcaaggacgacgtccagaactgcccagtactgtttggcctattgtgcatcagaaattcagtaatgcaatagccatttttagttagccccatagaaaacctacctgcttcgatgctgctgctcgttagatagataggggtcttacttgtatttttctctttataaggggttttgaactcctgtatttgtatatgtatttgggctagttgcctaataaataataagtcctatttataacatggtacccgagctagataatactgtt

SEQ ID NO: 57657 - DNA, 832 bp, Zea mays
  unsure (1)..(832): unsure at all n locations
  Clone ID: MRT4577_152582C.1
ccggccgggaacttcacaacccacaactctacaacctgaacactctcatcctctccacgaactccaaacgatacccttgaattccccaacacacatccatccactacagtcacaatgtcttctcaccgcggagaaactgccggcagcggactgaggggcgccgctagctccgtccatgacaaccccaccacctccactcatggcaacacctacgacactaccggaaccactggcggtgcaggctacggtactcagcagcccactagtggcgcctacgacacttctggtaccacgagcagtgcaggctatggtacccagcaacacactggtgccaaccacggacatccgggctctaccaatgccggtccccactcttcaaatctagccaacaagggtgatcctcgcgttgactccgacgtcgacaaccgtgctaggaccggaaacaccactggcgctgctgctggcccgcacagctcgaacattgcaaacaaggctgaccctcgtgttgactctgacctcgacaaccgtgccaacactggtgccactgatactcgccgcaagagcgctgctactgctggtcttcagcccagcggaggcttgagcggccagaccagtcgccagatggagggcattgaccccactgagattcagggcggctacaccaccgctgagactaccactggccacagcggccatggaggcaataccggcctttctggtgttcacgagactcacgttggcaacaaccctggctccaccagccacggtcctaacgaaaacccgaagtcttcgaaccacggncctcatggcagcaacatcttgaacaagggtg

SEQ ID NO: 57658 - DNA, 925 bp, Zea mays
  Clone ID: MRT4577_152583C.1
gctaccagcaccacagcctagcaccccaccgcgtctagggttttctgctccaatggccgccgcgggggcagacggggagcgcaggatcggggtggccatcgactactcggagagcgccaagaaggcgctggactgggccatcgacaacctgctccaccacggggacaccctcgtcgtcgtccacgtcctgcaccacggcgcggaggagaccaagcacacgctttgggccaagtccggatcccgtaagctcccccactcaagctctcgccgcatccatccctacccttacccaaatgctcacccgctgcccgctggtgtctgtttcggttttgtgacggtcttggctcgtcggctccatctgattcgctcgatcggtgggtctcgcttgcttcgatccccgcagcgctgatcccactctccgagttccgggagcccgaggtgatgcagggctacggcgtgcgccccgacgccgaggtgctcgacgcgatcgacacggcagcgcgccagaagcagctgaaggtggtggcgaagctctactggggcgacgccagggagaagctctgcgacgccgtcgaggacctcaagatcgattccctcgtcatgggtagtcgcggcctcggcccgatccagaggattctcctgggaagcgtgacaaactacgtgctgtcaaacgcatcgtgcccggtgacagtcgtcaaggggaagtagcggcctggacagcgtgccagtgatatgaatgaagatgctagcgtgcagtttgtgtgggttatagctaaacactatgttccgtcttgttgctgcatttcaataaagcatgtgtcttctagatttcacaaatctctctgaggctctgacctctgtcttattagctgtgaaactgtccgtacttcattcctgtttagatcgaattcgaggattggttcat

SEQ ID NO: 57659 - DNA, 302 bp, Zea mays
  Clone ID: MRT4577_152584C.1
ggcacgcgtgcggtcaccggatccatgttcgcattcacctgcccggccgtacgcggagccctacgatgagcaagatgatgctcgatttgtcacacagcctgtcagcatgcatgttgttgttaaccccgtctaaagggcctgataatgtgcatgtgaccatttttatgatgaataacgtcataattaatgctaggtcaacgactatgatcacgttgatgatcatatcatcgtatcgatgatggatccaatccaatgtgcagtcaaatgcagagtcgttgcaagataaaaagggcggacgatct

SEQ ID NO: 57660 - DNA, 1291 bp, Zea mays
  unsure (1)..(1291): unsure at all n locations
  Clone ID: MRT4577_152585C.1
cattggtacctcgagccggccggaccgactctcggcaacggatatctcggctctcgcatcgatgaagaacgtagcaaaatgcgatacctggtgtgaattgcagaatcccgcgaaccatcgagtttttgaacgcaagttgcgcccgaagccttctggcggagggcacgtctgcctgggcgtcacgcctcgccgcaacgctttgcgatagagtttctgtctgctaccagcaccacagcctagcaccccaccgcgtctagggttttctgctccaatggccgccgcgagggcagacggggagcgcaggatcggggtggccatcgactactcggagagcgccaagaaggcgctggactgggccatcgacaacctgctccaccacggggacaccctcgtcgtcgtccacgtcctgcaccacggcgcggaggagaccaagcacacgctctgggccaagtccggatccccgctgatcccactctccgagttccgggagcccgaggtgatgcagggctacggcgtgcgccccgacgccgaggtgctcgacgcgatcgacacggcagcgcgccagaagcagctgaaggtggtggcgaagctctactggggcgacgccagggagaagctctgcgacgccgtcgaggacctcaagatcgattccctcgtcatgggtagtcgcggcctcggcccgatccagaggattctcctgggaagcgtgacaaactacgtgctgtcaaacgcatcgtgcccggtgacagtcgtcaaggggaagtagcggcctggacagcgtgccagtgatatgaatgaagatgctagcgtgcagtttgtgtgggttatagctaaacactatgttccgtcttgttgctgcatttcaataaagcatgtgtcttctagatttcacaaatctctctgaggctctgacctctgtcttattagctgtgaaactgtccgtacttcattcctgtttagatcgaattcgaggattggttcataccccttttactgtagtgtcgtgttgatctgctggttagtctgctcaatttgtatttctgattgtcttgcaccacgtgtggaaaaaaaaaacccaaaaaaaaaaaaaaaaaggggggggggggggcgggccccacatcccccaaagggggggcactaaaaacgnnnggtgggggggccccccaccaataccccgccgaagctctcccccacgcaaccccattatgacccgcctcgcatatcccgcatgagcgccacacgatatattaaatccggaccgccacaancaaaccaccacacaccaaaaaag

SEQ ID NO: 57661 - DNA, 286 bp, Zea mays
  Clone ID: MRT4577_152586C.1
attcggctcgagctcctcgccacgacatatgttcaaatctgctgtaaccttggttgtcgaaccggaatcaacaagataattccgcgcgcgtgcgaacgagtgaggagcacatccagaacacggcacgagtgcaggacatcgctgcagtgttgttagggcatcgggttatagctggctcctaactattgtacatattgggaagaaccgctgacgaaagctgttcgctattatatcttcatatcggggcaagactgctagggaacgaattgggaaatcgacaggggcc

SEQ ID NO: 57662 - DNA, 260 bp, Zea mays
  Clone ID: MRT4577_152587C.1
ccagccggggaatacattcccaatccgcaggccgcagacgagagtggtatcgtcgctccgacaggaagagaagccaatggcgctgtccctctcactcgcgcgccccgcgcccctcgccgtttccgccggcgcaggagtgcaggaagctacccgcatccaccctcgcattctcggcgacatccttcttcggagcgccgctggtcgctaccgcggactccgtcgcgacgacgttccagcgacaagccggctacgtccaccac

SEQ ID NO: 57663 - DNA, 432 bp, Zea mays
  Clone ID: MRT4577_152588C.1
agctgctcctgcaggaagcaccggccaagaaaaaggcgggggccaaccacccctttttttttgtgggctagagggaccacgagcgcggggaattatgaccatggaggcccggaggcacccaaacccaaaggagccgagggggcccggcttctacctagggacgctctgaaagggagccaaaggacaagccagacatgtacataagtacggatgaccaccaaaaggcacaagcattgtgctgtacagaaatcattagaacagaaagcaacaacatggtgcagcaaccgaatggaccggtgggctttactataatctaaccgctgttggcagcactagacgcggaaatcgagcggaagcttggaccgctaagataccactggaactgaaaagatacaagggcaggacacgccgaatcacggatggctcgaagaa

SEQ ID NO: 57664 - DNA, 391 bp, Zea mays
  Clone ID: MRT4577_152589C.1
tcagttctcgatccgaagctgtgcctcgtaccattgggatccaatggcgcggacggggaatctgacgactgacattaagcgcgcttcgcggtctgacgcgtaccatactcatttgctctgaatacatcaaggccaataacatctgtacttcttcccacatacgctctaattaacgaccgtatgagtatgtgtaaacacattcctttaaccgtacaggctccatcatgcattctgaacaagcattcttacctttattacccttgttctttcaacaatcggcagccgtaggtgtggggcattcattggatcaaaccattatggctcaacagttgtttattcttgtgctaccagtgatctttcaagaagctttaacaaacctttctgtctactt

SEQ ID NO: 57665 - DNA, 538 bp, Zea mays
  unsure (1)..(538): unsure at all n locations
  Clone ID: MRT4577_15258C.1
ccacccccagggggcgcggccagccaagcncanancancanagagcgacggacnaggccacgcgccccaagacncagaacnagncncgagaaaagcanggcgncgncnacnccgncccgccgaggcagcggcggcaaggcggacgnggaccggancaagggccccgggagcgcggaggaggacgaggcccngcagcgccggggggcccgccacggcgcccgcaacgggncccncaacagccggnccaacccgggccgcnccggcaaggcgngccgccaccggaggagcaaccagcngacgccgcaggnggagcaccggcccnncacggccgaggaggacgacaccanccnccgcgcgcacgccaggnncggcaacaagggggccaccancgcgcgccnccncnccggccgcaccgacaacgccancaagaaccacnggaacnccacgcnaaagcgcaagaaccacgccgccagcgacgcngnngnngcngacgcngacgacgagcgcccgcngaagcgcacaagcagcgacggccacc

SEQ ID NO: 57666 - DNA, 168 bp, Zea mays
  Clone ID: MRT4577_152590C.1
gaaagggaggctgctgcgcaaaattgacatttctgctgccaccaactctctcactctcgccttggcttttttcttcttcttctttacacacggaaaaccaacataatcatcgcttattttattctttcactttgcctaacatatatgatgaatcgcttatacatgagt

SEQ ID NO: 57667 - DNA, 839 bp, Zea mays
  unsure (1)..(839): unsure at all n locations
  Clone ID: MRT4577_152591C.1
cattgggtacctcgaggccggccgggaacttctagcccgatgcctccatgggtggcctcagtgccgcgactgaccatctttcgcaagacagggtcgattgatcggattccgcttgcgctccgctgtcgcaatgtcccaaggtcgccatatacgagtctccgcgcccgctccgcatcgacgcatgtctcgccgactgcgataaatctgcgccccaatgtcccgccacgcaaccaggagctatacgacgccctatccgctctcagtggagctgcagagacacacgtcaacattagcagattacagnctggcgttgcggggcctggccgcccaagatgcagtcacaagagtcgctgtccttggtttgaatagccaattaagcgcacaacaattgggcacggctggttgcttgccgacccattggccgccgaagggcaatgggaaaaggacctggccaaggcaggcgtcggcaatgagaatgctgtgttgctaaagtacggcaccganccccgacgacgttacgccatcaccactatacagagtcctcgccgttccgtcgcgcattctccagtcgcataatctagaggtccttgtttcgacggtaaacgtcaatgtcaacaaatctgtccctcatgtgtcaacagaaagctccacccgagtcgctgttggttcccaaactccaggccacttccgccagaggattgcctgtcccatatccggtgcacaagacattagtattaggagagggactcgacagtgctatatccntatgggagattttcagncgatggtcttgatgaatgannnaatatagtgaagttggctatttgatctgcagtaca

SEQ ID NO: 57668 - DNA, 1476 bp, Zea mays
  unsure (1)..(1476): unsure at all n locations
  Clone ID: MRT4577_152592C.1
gtaccctcgggctcggcncgggtcttctctctacgccagataggaggagcactgttctccccctacgctgcttcgcggagacaccttcgctcgcgcgctctataagaaatcaccggctccgcttcgcggcagttgcaaccacgggacgatgtagtcatggtgaggctgtcgccggcggcggaggacgtgaagagcttggccgtcacctggttgggggcctcgaacgccagggccggcggggcgtggccggcgccgcggagcgcggcgttgatcctggggcgatcgagctcctggccgtaggtctcgtcgcgcaccttccagacgcactgcagccgcgcgggacgctgctcgtcgccgtcgccgtccacggcggagaggcacgaggtaatcgtagagtcccaaggtctagtcagcgcggccatctatcctccacctctccacatttgcagtgtgagttttcttgattcccttcatccttttgttgcttcgtcactaaggacgctacatcagcacgtcactcgctacttgtccactagtccagtctcggatatctcagctcggacgcctaccgatctgtccgtttcctacagccgctccccaaaaattccaactgattcctccgcctcttccgagttccccagaatccccagtttgatgctgcctctggccccctgcccaccgattggatcttggtcgatttctccgttctgcagatcctgtgcgcatccgctctaggtagtggccctttgctcggctcccttcctcctccttcgcccatgctcggatctttcaatctgcgccggttttgagttcttgcccctgctagctgccggccgtcaaaggctagagcttcaatttcctggcaaagattggggattcctgctcgcgaggatggaattcgtggcgtccattgtcgacacggtgttccggccgctcaaggactacttcgcgcggaccgtcggctacgtcatgtcctgcggcgactacatcgacgcgatgggcaacgagatgaacgagctcaagagcaagcgcgacgacgtcaagcgcatggtcgacgccgccgagcgccagggcatggaggccaccagccaggtcaagtggtggctagagtgcgtcgccctgctcgaggacgccgccgcgcggatcgtcgacgagtaccaggcgcgcctgcagctccctcccgaccagccccccggctacaaggccacctaccacctcagcaagaaggccgacgaggctcgcgaagaggccgcgggcctcaaggacaaggccgacttccacaaggtcgccgacgaactcgtccaggtccgcttcgaggagatgccgagcgcgccggtcctcggcagggacgcgctactccacgagctccacgcctgcgtccgggacggcgacgtgggcatcgttggcatctacggcatggcgggggtcggcaagaccgcgctgctcaaaagttcaaaacgaattcctcatcaactc

SEQ ID NO: 57669 - DNA, 240 bp, Zea mays
  Clone ID: MRT4577_152594C.1
ggatgtgaacacggttacgctgctagaacatagcataggaacgagaataatatgatgcctgctacaggtctaggtttaagccgaagtaatcagctgccggtaggatcatttcgggcaaaccaacactctgaatgcgtccagatccggcggtacttggatacagttcatacagggctgaactggaccgaaatagcccgggaccgcatccatatctgtaaaataaaaggaggaaaacctcga

SEQ ID NO: 57670 - DNA, 549 bp, Zea mays
  Clone ID: MRT4577_152595C.1
ggaaaaaaaataaaggggggtccttttttggcggggggcggggtttttttttttaaagggaatggggggtttgccctccccttgggggggggggccccccccaggggggtggtggaaataaaaaaagggaatttttgggcacaaacaaaaccacccaggagccccttaaaaattataattttggccctgcccccggggttaattaggtccccccgccccctccgggtgggggatcccccccatttggcccccccccaaagatcactttttgggcatggggtaaaacactccccccctttttgggtttttccaaaaaaaccccttttttaaattagggcccccttttttgggaaatcccccggcccattttttttgcccccacctttttggccccttaagggtggaaaaaaccctttttaaacggtttttttggccatgaattttttttttttggccccgtaatttcccttgccttttcaatacgttttttttcccccccttttccaggggtttttaggttaccccccattttggcccccaaccccggtt

SEQ ID NO: 57671 - DNA, 406 bp, Zea mays
  Clone ID: MRT4577_152596C.1
ggatatagaccatattaatgctcagctgtataggaatgagacaagtggtacgaaaatgatatgtggcttattagcatctacacattggggccgatgagacccggtctatatactgactcatgccacaaacacattctatatgctctgaacgccttcaccttgcttgggcgcttatcgatacgctcgttaacccatatactagaatatatatttctaatgatgcatgaataaccaccccgaaaacatagccccagccctaggttgctacttcttttcatgtataggaactctcctgggaccgaccatactgcagctcctatgcacgttaaggagcaccactctgctagccctgtgcttaaccaacggcttggcctgtgaggttatccttgagacacgttcacggtgc

SEQ ID NO: 57672 - DNA, 1737 bp, Zea mays
  unsure (1)..(1737): unsure at all n locations
  Clone ID: MRT4577_152597C.1
gcgctgctcgcatctccctctgcgccgcgaggatgacgcgtccgcgcccagctgcgcgcggaggtgtgggcggcgctgagttacgtgcagcagcgcgagagaatggaggctgcggcagcggcagcggcggcagctccagcgcctgcgggggagaggaaccccgagcaccaccacggatgtctggccgtcaggacgtcgctgccgcggtgcgccatcggcgccggcggcggctcctcgctgcctggatcttccgatgaaacatcatgtggatcaccgagatggatagggagaggcctctcgtgtgtgtgcatcaagcggaaaggcacatatgaaaggatatgcatgaacctcacaccagtgcaggaagaaaggcttcagagattgaagcatcgcatgaaggtttactttgatccatctagacgagatcaccaggaagccctgaaagctctttggcatgcaacataccctgatcaagaacttgaaggtttgatatctgagcagtggaaggacatgggctggcaaggaagagacccatcaactgactttagaggcgcaggattcatatccctggagaatcttttgttctttgccaagacgttctccgcatcgtttcagagacttctaaataaacagtgcggtaacagagccacatgggagtacccatttgcggttgctggtgtaaatattacattcatgatcatgcagatgctagatctccagtctactaagccaagaacatttgtgcgagccatttttatccaaatgctctcagaggatgagtgggcatttgatctgctctactgtgtcgcatttgttgtgatggacaagcagtggctggacaagaatgcatcttacatggacttcaatgaggtgctgaagtcgacacgagcccagctggagagggagcttatgctggacgatgtcatccgcatcgaagacatgccgtcatacagcctgctttgctagtaaccaaaataccaaattcgccggagaacagaactgagttgatggttcaactgtatagtacctccctttgtctgatttctgggaggattttttttagcaacaaagtagagtgatgacgtactggtatcatgcttaatttgggctaatgatggtgatatgcacattctcagaagtgttacaatgttctgtacttgtctaagcatttgtcagatatctaatattgatcatttgatccacccatcattctcctatctgcatcatcttttctggggattgccataaactttcatgagcacaaaccggggaacaagaccagcacatttccttgtggtggcgataactatggttgctccagtgacccatcaccattaactgcgcttgccccagggattttagagagcctcgctcccttcatcaccttcctcagcttgtccacgtcctgccacctaccagcctcggcatacaagttggacagtaccacatacactccatggttactgggatttagtttcagcatctccaccgctgcccgctccgaatctcaatgacaccgtggttcttgcaggccgtcaggagtgctccccatatcacggtgtccgccttgcatgacatctcccgtatcatatcctccgcttccgataagaggccagcacggccaaggaggtccaccatgcatnccgtagtgctggattcctggaacgatccccgaagtccttctccatggacctgaacagccggcggnncctcgtccagcagccctgggtgggagca

SEQ ID NO: 57673 - DNA, 431 bp, Zea mays
  Clone ID: MRT4577_152598C.1
cggacgcgtgggcggacgcgtgggcggacgcgtgggctaacgagtacaaagtacgaacgacgcacacacacaccagcaggcagccgcgcgcgggctcgatcgcaatggcgtccaaatcctccactgcggccctcttcctctacgcggctctcctgctggtcctggtgctggtggcggtttccacgctggcccaggcgcagccgacgccgccgccgccgcccagctcctcgtgccccttcaatggctccgtgccgctatccaacatcacagaggtccttggactgctcgcggagctggacctgaacactgccgcccagtgcctctgcaccgctgtggaaggtgtcacttccctcgtccgcctcctcctcggctccatcgggctcatgctgcccttcgacttcgagtgcaccagcacctaggcgcatgcatgc

SEQ ID NO: 57674 - DNA, 366 bp, Zea mays
  Clone ID: MRT4577_152599C.1
atttacgggttgacccacgcgtccgggccaaagctcagagcaataatatacaccccaagcagaactcttcataacctcctgttaatcaacctgatccggaggtggcccctccaacaattgatgtccctgaattgacattggatgattcgaaacacatgactgatgattttggatcatgggctataattggtgatggatcttattgacgactattcatgcctcttttagacgatggcaggcaacccgcactttaaaaacctgctgcatttgaaaactgatcctaaagatgaggtcctcaaacaggcctcactggattaaatctgaaacatgactactttcttgtaatgtttcgttattgtgtggaag

SEQ ID NO: 57675 - DNA, 308 bp, Zea mays
  Clone ID: MRT4577_15259C.1
atgtctccattttgacattttttcaatacttcttgtggccctcgtctgtaacgatcagagcggagcctctatttctaacgggaataataacacaagggtcttccgtgcacaacatacggtgatacaaagtctatgtgcataccacatctgtaaagcttattgcggtcttgctttggtcatatctcaaaggtcgtgtaaattgtattacaacccaagttaaccagtctttttatctcacaaactctactacttaccaagcgtacgataccataaatgagcactcgcatcagctaaagaccaaaagatga

SEQ ID NO: 57676 - DNA, 523 bp, Zea mays
  Clone ID: MRT4577_1525C.1
agcaccgtacctgaagatgcgggcggggctgcggcaggcgctgattggggcgatcggtggcggcaagagcaccggcatgagcctcgtcgtagcgcttctacgagcggttctacgagaaggtgatgatcgaggggaaggacataccggagcgtgatacctgaagctgcatgctcatgtagatgggcctgatgcacgaggagccggagctggagcccaccatgatcctgaacaacatcgtctacagcatggactgcgcgacggacgaggaggccgaggaggaggtcaaggaggccaacgaggacggctacgtgagcgggctccccaacgggctcaggacgcccgacagcaagcgcggggtgcagctgtgcgtgcagcagaagcagggcatcaacatcgggcgcgcggtgctgaacgacccggtcaaggtgctgctggaccaggtcatcaacgaggtcaacaccgagttcgactgcgagctccaggacgcgctggagcacatgatgaagggcctcaccaacgggct

SEQ ID NO: 57677 - DNA, 446 bp, Zea mays
  Clone ID: MRT4577_152600C.1
ctattatatgattgtcctgctaattgactggcacgattctgttcttggatcttctggagccggcgcgcagagggagggctggacatcattacccatcccatgatgtcaaagcatgctcagccacacgccatgacagtgcgtgccaaggatcctttatacacctctgtggcctacatacaggtacttatgaaaggccaagggtcaaaccccaccgttgacgagcatattcgcacacgaaagctcaggcacttcttagagcatacgtgagagcaaaacccagctggatccacgacagctcctgctcgacgcgttcacctgcgaatactggcagtggaccgaatacaaacagacggaccaacacttgtatgaactactacccataaacgtaactcataagtacaactatcaggctacggcaagcaaccgcttgaacctgaacctgcagg

SEQ ID NO: 57678 - DNA, 255 bp, Zea mays
  Clone ID: MRT4577_152601C.1
caggttctgcgaggcgatcgccgcggctgcgctcgccgggcttgtactgccgctcgtcgaggtcgccacggcgcgctacggccgtcggacgggacccgcggcgagggtgccgccgccgtacgcgaccgtgatgcagatgcaggctgtgatgggcgccgccggcacggtggtgtgcctgcttggcatggccgtcaagagcgacttccaggcggtggcaagtgaggccgccacgtttgggcttggcgagaccaacta

SEQ ID NO: 57679 - DNA, 949 bp, Zea mays
  Clone ID: MRT4577_152602C.1
catacaagtcactcctggctgctggtgctggtgacaatgctctggtctctatctatgctgaggaaaattacaagtaagatgaggccttatatctcatgacaatgcagccacagtgcaatcggtaggccttacattttttcggccaagtgatgctccacagcatggttcagcttcaagatccaagatgacggtaagccttgtcacggagatgtcgacggtaccgtggctctcggtgcatattggctgttggacggcgtgtgcggtttgtaagatacagtcaagattcattagcctccttgcagaaggtttgtgaaccctaacctgatcctgtcattgaactcggaggctccccccagcccacccaaataattagccatacctaggctataaccaaaatgtaaatagccagcgcattcgggttgtactttgccagcattcaagtgtaaaaaggtctgaagatggttgatgtgataaacagggcttggtaggggctgctgcctgggcaagtggggttgtgcatatgggcccaggtagtagaatggttgcagaagtctgcccacagatgttgaagagaaaagtgtatttgtccagctaaaatatggcgttagatgggggtagtattggcctgcatgaatgaatgaatgaatgttgagtcatttgcattgtaattgtaacccttggatagatgactgcccgcttgtatatatgagtcgtgtttgtacagttgtctgctttctgtccccaagttgtaatccgtccaatgatgtgttttatgctggtgcattccggtagagatgaaccggaggtgctggaacatataggtggtcttgtggtctgtaactgtaatggatatgtgaatcttaatatgagtaattgattaccgccgcgaaaaaaaaaaaaaaaaaaaaaaaaaaaaaaaaaaaaaaaaaaaaaaaaaactcgaggaggg

SEQ ID NO: 57680 - DNA, 282 bp, Zea mays
  Clone ID: MRT4577_152603C.1
gtgcagggtcaaatgtaggggctgtactatataccactgaatatgtttgcacgggtaaccaaacaacgacagttggttcaagcaccaccagaatatggatccgaaatacaagccgatggtcctaaaaaaaagaaaatctgaggataccaagtggcaccctgagatggatgacagacatcacaggggaccatatcaggcagaagtacgtatacagcttacaattttttttctttacagttaggttctagaatgcagcagcgagccgtccatcgatcacccaca

SEQ ID NO: 57681 - DNA, 499 bp, Zea mays
  Clone ID: MRT4577_152604C.1
ctaattggaaagatccggtgaaatagactatgtttctcaactatgctaggctattgctattagtatccattgaaaatggagcattttctgtttctatgctattttgagaaaaagaatgcctcagctgtgtgaaccctcagcaaaaagacttggtgatatggttcatcttgtctgatatgcatataaataacccacaaagcttcaggaaggtaaaatcaacataatatgttctttatatcttccttacattattttttaatatatgtcgttgggtcaccctctagcttcttctgcatccagcaggttttggtttagcttgtcatctcggcgttcttgcagacattcctactattggagttggaaaaaatagaagactaatcccaacgtttcaactgcgtagctacttcacgtagatggccttaaccaatcagaagttagaagactgttcggatcaaaagaggactggaacagggaacggcttttgttgactggacagtct

SEQ ID NO: 57682 - DNA, 573 bp, Zea mays
  unsure (1)..(573): unsure at all n locations
  Clone ID: MRT4577_152605C.1
ccggccggggnggacactgacgccaccagcagacagggcgggcgccgagcgcacgacacaaagcgccggcagcgcgcaaccggcaacagccaggcggcgccagcgccggcgacgggggcggcgcggcggacgaggaggacggcgggggcccgaggcaacgggggcgggcacgaagccggcccaacaagcggaaggaggggggggggcaaccccggcnacgaggggcggggccaaggacccaccagagcggcaaggcggacaccgcgccggagacggagaacaagcagangcacaacgcgccgacggagagcaaggcggacgacaagaacgggaacggcaccaagccgacggccaccnggnacacggggaacgagngcgncagggcacaacaccacgggccaccacgaccgccgcngcggcgacacgggccacggcgcggccggacagaaggaggacaaccgcgggcgcccgcgcggccggcccnnccggcgcaccgacgacgacccccngcggagccaagcccaccggcggcgccacggccgcgccggcgccgcacccaaacgccgcgccgaa

SEQ ID NO: 57683 - DNA, 209 bp, Zea mays
  Clone ID: MRT4577_152606C.1
ggtcgcggacgagaggtgcctctgacgtagcccagccgctccgcctcccgtgcgtaatgtatcgtcgatacatcgccttatgaagactagaaacactaatagaactggagcgatgatgcgatgaaagcacaatagaaacataaagagccaaagacgaagcagagctgtttgttaggaccgacggaggccaagaagaaagacaagtacat

SEQ ID NO: 57684 - DNA, 322 bp, Zea mays
  Clone ID: MRT4577_152607C.1
gccgcccgcagtcccgtccgatttcccggttcgacctacccgtcttttctttaagaccattagctttatctactggggagcgcaaaagaacccgttggacaccatgagggtgttgctcgttgccctcgctttcctggctttcgttgagagcgccacctccactcatacaagcggcgcctgaggctgccacccatcgccgtcggttgatgtaccgtcgccggtgcatctgactattgcggttcactttggacttgagcagcatgtgcatgagtcgctgcagcattctccacatttaagaactggtttccaccatatttaaaat

SEQ ID NO: 57685 - DNA, 379 bp, Zea mays
  Clone ID: MRT4577_152608C.1
ctcgagttttttttttcttttttttttttttttttttttttttttttttttttttttttttttttggaattggtttaacccaaatatttcttccacccaaaaatcattttgtcttcaaaacatttttttacaatccctttgacataagatccaaagaaatccctttaacttcaactcagggatttaaccattaagtttaattgaaaataaccctttaatttaaaagccaaaccttttttttttttccaaagctattggaactagtttctatagcacccatagggttgaaaatcctcaaccggttaagtaaacttagaaagggaggcatttggctcctatggagccttaatactccactaagggaattgtatttttttta

SEQ ID NO: 57686 - DNA, 135 bp, Zea mays
  Clone ID: MRT4577_152609C.1
ctactgtcctgtctcctcactccaccggtccaacccaacaaccagccccgccgaattccaaggtctattcttctgcccctcgggcgttcccgagatcgcatttccgagttcctgatcacgggaaacccttctggg

SEQ ID NO: 57687 - DNA, 280 bp, Zea mays
  Clone ID: MRT4577_15260C.1
acccacacgtccagtcagatgcgccacacgagatacataagcctacacccattccgcggttgaggatgacgagaataagatgaagaaaatgggttcctcggcatacgccgcatggtccaggcggtggatccgtcgcgaggtgtagccactggtcgtgccgatagtcgtgggcctgggtagctgctcgttacagcgtgtgcgcaacatcacgggaaaccatgaggtgcgggtgacaaatgagaataaggcggacggcgtcgtggataaccagcacgagggc

SEQ ID NO: 57688 - DNA, 1711 bp, Zea mays
  Clone ID: MRT4577_152610C.1
cggtccggccttcccgggctctctcactcagtcactctgctccggctctgcgagtgagatgaatgaggagggagccggtcgagacggcgattgacgacgcaccgcacgccatcggatctgtcctctacttctgcctcatgttgacggctcggcgctcatccgcctattattttaaaatggagatgaagaatcggccgggagatcgtccatgatccgtattcctccctcctcgttgactgccgcggccagcgatctggtcgtcaccttcctggaccgaccccaggctgcagcagcctgcactctagtccgtgcgtgtcgcgtcgcgtctgcgggcggcattgcgtatcgtttctgtaggagcagaggagcagctgcctgaggcaattgttcccgtccccgcagagcggcatgtctccgcctccccctggcggctccaatggccgccgccaccagcagcagcggcaggaggcggtttcgtccatggaatccggcggcggcgcgtcgggggcggcgaccaagcgcttcacctggaagggcccggtaatcgtcctagtcttcgagctgctggagagcatcgcgttctcgggcgtggctctcaacctggtggtgtacctggccacggtgctgcacgggagcaccgccttcaacgccgcccacgtcgacacctggaacggcaccaccttcatcgtccccgtcatcggcgccttcctcgccgacagctactggggcaagtacaggaccatcctcgcctccatcgtcttctacctcgtgggcctggtgctcctcaccgtgtccgccgcgatcccgtcgctgcggcctgccacggcgtgccagatgggggagtcgtgcgcgccggcgaccaagacgcagttctctgtcttcttcgccgcgctctacctcacctccatcggcacgggaggggtcaagtccgcgctgctccccttcggcgccgagcagtacgtcgacgacgcgggccggccggagcggaagcaggcctttttcagctggttcttcgccgccatcaacctgggcatcttcgtcgccggcacgctcgtgtcgtggctggagcagaacgtgtcgtgggcgctcggcttcggcatcggcacggcctgcctgttcgtggccgcgctcgccttcgcggcgggcacgccctgctacagggtgcagatgccgacgggcagcccgctcaaggacatcatcagggtgttcgtcgccgccttcaggaagcgcgacgtcaggatggaacgggacgagggcgcggcggtgctgctgcacgaagacgaagccgaagacgaagacgaagacggcgatagcgctggacagcagcagcgactggcgcgcaccaagggtctgcggtgccttgacaaggccgcggcgatcatcgtcatggacggagacaaggagcgggagagcgaatggtctctgtgcacggtgagcgaggtggagggcgtgaagatcctggtgcggatgcttcccatctggatgacgtgcgtgctgtacgcggcgtcgctggggcagatgaccaccaccttcatccagcaggggatggccatggacacgcggctgggcggccggttcaaggtgcccgtggcgtcgttggtgtccgtggaggtggtgttcatgctcctgtgggtggcgctgcacgacgccgccatcatcccggcggcccggggctgacgggcgccccggtgggctgacgcagctgcagcgc

SEQ ID NO: 57689 - DNA, 356 bp, Zea mays
  Clone ID: MRT4577_152611C.1
tcccacttatgataagtccaaggaaccctccttacttcctacagggagcatgcatggagctagcatatatacaagacaagatcttgactataaccatgtatataataaaggattaattggttgtagctgtgagatcaagaagtaagattgaagatagctcaatataatggtgtgcgagcagctttactaagctcctcatatctatatgaaacggtatgatgcgaggtaatgataactatgattacagacgaggttaagcaattttgcagcatatgcatatgcccctgacgtacttgatactactactaggagctgtaagcatcatatacagggcagggtttgcacaattaattatc

SEQ ID NO: 57690 - DNA, 302 bp, Zea mays
  Clone ID: MRT4577_152612C.1
cccacgcgtccgcccacgcgtgggtttgaaaaagggcaggtgaaatttgcagggggtctgtgcatgacaaagggtcatccaacaaaccggtttgtcggccagacacccatgtttgtgacagctttacctttacaaaataccaggtgactgactttgagggatgtattaagggggcaactccaggggatgcattacttgtgggacaactgccctgttccactaatggatgatgctatatctttaaggccctaccttgatcttatactgggatagaaagaggtgaggggagttacgggaggaat

SEQ ID NO: 57691 - DNA, 283 bp, Zea mays
  Clone ID: MRT4577_152613C.1
cgatgacatgagctccttcgtaggcggggtcaactccggctcctaacccttcacggtctacatgcagcagcaggaggtccgacaaaaacagcattgcatgggcgcatactgagagagtcccgtggcaactgccgcgcatgaaaccaaggggtgtatcgagcaagtacaccaggttgttataccgtatactgcacaaaggatgggactattacaccggtgcggctttcgataccacgatgcaatgaacggtagttacaggtttgtacccatgccgcagacttgc

SEQ ID NO: 57692 - DNA, 226 bp, Zea mays
  Clone ID: MRT4577_152614C.1
ggagcacagagctagcttgccagccagccagcagccagcttgctcgccgggggcggcttctttctctttctagctccatctagatccgtccagcccgtcgtcaacgacacattcatggatggggatgaataagatcaggctgggccgttctattattcaactaggaggtctccttttctgttgtcccttaaggttctttcccggaaacatccatacatctggacgc

SEQ ID NO: 57693 - DNA, 296 bp, Zea mays
  Clone ID: MRT4577_152615C.1
tttgatcatgattgttgtgtgactattgagaatggacgcaaaagcaagattttcttcattgactagtccccatcgacatcccgcatacctgatatatatgctggactccacgtcaaaggaccacatcaaatacgactgtgacacgttccactacgaaatccaagcgaccgacccatccgaggtggacatcataggttctcccgcaaacgacctcactggaactggatctccttttgaatgatacctgtgtcaaggccgtgaaccttcatacagatgcaaattcaattatcaacgat

SEQ ID NO: 57694 - DNA, 447 bp, Zea mays
  Clone ID: MRT4577_152616C.1
tgtcgatagctgagtagagcgctgcgcagctcgatcttggtcggttgctgggaagggtcgccgccccatgcctccaactcctcgatctaccgcggatgcgcttcgcttcagctagctaagtcccttcttcctttgagattttgctacgaacaaccacctcgatctgctctcgtgctcatccgccatgctccgtggtgccatactggcatgtcgctcacggaggtcaggctacacttctgctacctacactccctctacatcgtgctcctatacttcctctacgtgatctcctgatcgcctcggacgcctcccgccaagctccgatcgaacaaggctttggtttgattcgatcagagccgaagcactagcattaattactcgatgcttgctcctcttcgttctccatgatcttgtcgtcccgttcttctccagacctctctgcttgct

SEQ ID NO: 57695 - DNA, 311 bp, Zea mays
  Clone ID: MRT4577_152617C.1
tttgccgatcgcccgtagccagggccgggcgatcctcgcacttacacttccaccagggcgcctcctcctcctactcctaggactccatcttcctcctaccactgctactggtctactacaaccactccctcgcctacgcagaggaggaggtgcacctcctcagccaggcgcgcgcgggggggggagggacgccgacgagcacgcggaccggccgtacgcaccaaaggccaaactgggccgcgcgcgaccgcaccagcagcagcacccgcgggcggagcacggacgcaataagtgctccgacctgacgccgg

SEQ ID NO: 57696 - DNA, 390 bp, Zea mays
  unsure (1)..(390): unsure at all n locations
  Clone ID: MRT4577_152618C.1
ccgcagtgtgatggaatctgcagaatcgccntaagcagtggtaacaacgcagagtactccatttcagtttcatcttttttttttttttcctttggtgttgttatttaattttaccggccctacgatcgattcttgatgtnnaaaaaaaaaaaaaaaaaaaaaaaaaaaaaaaaaaaaaaaaaaaaaaaaaaaaaaattaaaaaaaaaaaaaaaaaaaaaaaaaaaaaggtcctctgcgttgtaaccactgttaaagggcaaattccaacacactgggggccgtaaaaaatgaatccaaactcgttaccaacattggcgaaaacatggaactaacttgtttcctgaggaaaattgttatagggtaaaaatttaaaaaaaaaaacaacccgc

SEQ ID NO: 57697 - DNA, 602 bp, Zea mays
  Clone ID: MRT4577_152619C.1
atacacactatatttcgcctccccttccgacccagtatgttgtaacgcgtttaggaaaacccgcgacgaggcgactcatgatgtcctatctcctccacacaagcgcatgacgacgatatggaggaagcgcaccaaagatgaagctcacatcccagaacgatcatcggaatttgcgaataggcggaagtaccggatacttatgatacgtttcttcaatgtgagaattctgataaagatgacacatcctatgttgacttcgctgattgtcatgtcaacggtgattccagtggcaaatctgcgctaaagaagagcgtctataagagccgctaggtatatctaaagtttggtgttaagcaccattacatgtcagtcagtcttgtgcaacctattatgatggagctttattttctttgaatattcccctccctgtgtagttcaacagtccgaattccgacacgcatgtctttttcggtgaggctaggattgatgacctctactcccaggtgtgaacgcactcaggagattaattgatggctcctgacttgagcaagatgatctctattctcgagacgtctgacccggtacaagatgacatagatgat

SEQ ID NO: 57698 - DNA, 176 bp, Zea mays
  Clone ID: MRT4577_15261C.1
gtctgctatcaagctgctagctatggcttatcgaggggtacgggcggaactttgtgccgacacaacacagattccggctgtataactccttcttgtgggttctgcatttttgcagcgtggcttagaccaacttgggtgactatgattcaaccgttttggtgaattatcttagacaa

SEQ ID NO: 57699 - DNA, 317 bp, Zea mays
  unsure (1)..(317): unsure at all n locations
  Clone ID: MRT4577_152620C.1
aaaaaaaaaatgaaaaatcgccccatcatgctantcaagacggttcnnggaaacaccaaagcggccgccctatatttgatttttttcntcactnaaacctttttttaacccaacgaaaaaaataataaaaacgcaaaattaccccttacactggacaaccccaaaactctagttcccaattaacaagaataccactctgtccgactacatcaacaggtaccccacagcgacaacagtaaaacccatttgcagaaaacactccacaaacggcccgaacctagacccccacaaatcaaacgcacaagccaccaaacaca

SEQ ID NO: 57700 - DNA, 284 bp, Zea mays
  Clone ID: MRT4577_152621C.1
taccaaaaccaaagctctatgaaacaacgaaacacaagcatccacagcgaccatcgaccgaatggtccacaagggtagtatgctaattgtatagtctaacatggccacaacacaaaaggggacatcaaaactcatcggggtccctataaccaccactgcttacatttaactgcctcactcacatgccatcagttggctcctgctataccttatacttggcctactcatcgtcatcaccagtccgatcctggtactgctggtactccgacacgaggtcattcata

SEQ ID NO: 57701 - DNA, 177 bp, Zea mays
  Clone ID: MRT4577_152622C.1
acaacggaagccgcctcttcttcaggcatgatgggaagatgcatgaacgaccgcagcgtgcacatgaacgaggctatcaggatgcatatgcgtagtccagagaaggctacttgaactgtctagaggtgctaaggcatctccagatgaggatcgaagcccagggcaagtacatgcagt

SEQ ID NO: 57702 - DNA, 1257 bp, Zea mays
  Clone ID: MRT4577_152623C.1
aaaaaggaccccggcccacctggaagccggagagaatcgagcagagccaccgatcgctcctgagcactttccacattccagttccactccgcctccgctgccggtcgccgtctccgagactccgacagtccgaccgcaaggatccacagaaggatgagtgaagaggataaggctgctgcttctgctgagcagccgaagagggcccctaagctcaatgaaaggatcctctcttctctgtccaggaggtccgtagctgcccatccgtggcatgatcttgagatcggtcctgatgctcctgctgttttcaatgttgtaagtaccagcattaccttagaaccgtttgatgtgttatatgtttggtgctgtggggagtggggacttaggttgtctggaaccatctacgggaaggttgttgagatcacaaagggaagcaaagttaaatatgagcttgacaagaaaactggactgattaaggttgatcgagtcctatactcatcagttgtataccctcacaattatggtttcgttccaaggactctttgtgaagacaatgacccattggatgtgttggtcctgatgcaggagcctgttattcctggttcgttcctgcgagcaagagcaatcggccttatgcccatgattgaccagggtgaaaaggatgacaagataatagcagtctgtgctgatgatcctgaatatcgtcactacaacgacatcagtgagctgtctcctcatcgcctgcaagagatcaagcggttctttgaagattataagaagaatgagaataaagaggttgctgtcgatgcattcttgcctgcgaccacagctcgagaggccattcagtactccatggatctgtatgcgcagtatattttgcaaagcttgaggcagtagattggaagcaactatttatctgggcgtcttggaatgagtgtgattttaataagtcaaaacacttgatattgtgtgcaaatcttggggttgagaacaatgtcactagctgtgatttacttctgtgacttgcattttttttcttgttaaattatgaataagcgaagtccatacgtctactgtgtggcttcttgctgggttcatcgtctacccatgttcctcaagcttgggaacatggggcttttccccatttccgtgtcttcccatgcgaagtaaaatttatttgtatacaatcgtattaatctgttcatgtgaacaaaaaaaaaaaaaaaaaaaaagcttgtacctgcccgggcggccgctcga

SEQ ID NO: 57703 - DNA, 451 bp, Zea mays
  Clone ID: MRT4577_152624C.1
gtcattccaacaactctgttgacatatcttcagtccgaggatgaaaggaagccaaacaaaaaaatcttccctccttcgctacaatgatatacaattcatatgtgacaaacagaaaaaacctttacaccttcgcaaaatgggattgagattacaccggtaaccacaaccaatctgtcaataatcaatcctcaatattaattccactgaatctggacttcaaatattgaacagcatgctctttccagtctgacagagatgcaaatggcatcaaaccagccaagcatggcagaataatgtgacaccaaaatgtaaaatgtgtatcggcgggcccaatatggcaaatgaccagccttggtcctgtgagtcacagaaataggaccatacagcatgtgatgtaaaagagatggccaaatatttccaagtaaatggatggagcaaagggcctcccagt

SEQ ID NO: 57704 - DNA, 362 bp, Zea mays
  Clone ID: MRT4577_152625C.1
tttttttttttttttttttttttttttttgtttttatgttttttttttttttttttttttttgagaccagccccaagggcatcaaaagattttcaggttcggaactttgagtttttacacattttcctaggaccttgcagggccattaagaactttgaaaaaacataaaaaatggttttggcacctgcttacattagaccaggctacggattctccaattggcctgcattttccttggaagatgggaaggaaaagcccaattaactttttgttctgggaccaaacttaaaaccatgaaaaattgaactgggggaattgcgacgggattccacatttcaagatttcttttcgcctgcactttt

SEQ ID NO: 57705 - DNA, 333 bp, Zea mays
  Clone ID: MRT4577_152626C.1
ttgtatatcgtttatatgtgggattacatatttctcattcgtcgataatcatatcgcgtcacgttgacgacacagcatgactatgatagaggcccttgattcaacgtcagcgacgcaatcattcctaaggatcacatggcatacatgactcaagattctgctcatgcccgaggaggtggactggatatggctgaacagaggttgcacagaatggcccagtcatggggactgcccttcgagttcaatgctgtgccaacagctagtcatgaggttgagtttgaaaaactttgcctactatctaaggaggccgttgtcgtccattttgcttattag

SEQ ID NO: 57706 - DNA, 256 bp, Zea mays
  unsure (1)..(256): unsure at all n locations
  Clone ID: MRT4577_152627C.1
caccnaaacggggcannggagcanaggggggggggggacggcaccaccggaacaanngngnaacngcagcnngggagccngcccgccngccnncgcgggcgggacaagcgacacaggaaaccgggggggnanncnnnagngcggnaggcagagggaagaacccngagaaacaagcancnnanggnagggacagnnggggggccgggagaacaaaaagcngngcgggaacgggcngnggcaagngnaaaccgcagag

SEQ ID NO: 57707 - DNA, 346 bp, Zea mays
  unsure (1)..(346): unsure at all n locations
  Clone ID: MRT4577_152628C.1
gtcggcaccataccggtacaaatgctgctcgcatcgcggaacctccaaatcacgacctggggattctgcctgaattctggacttatgctgctactgcagttccagatatgggtctcatggcaatgaatcacatattacttattgccgctatgctagctgtgtgactgccatacggtgtctcggaacccgtgttaggcttcttacatacacctgttacgacacctgagttgctgtaacccttgctacatgagcctatgccgtnttacgtccatcattgataacaaatcagtctattacctaaagtacaaccattgaaacatggcatccggtctcaacgtccccagct

SEQ ID NO: 57708 - DNA, 274 bp, Zea mays
  unsure (1)..(274): unsure at all n locations
  Clone ID: MRT4577_152629C.1
gcnnttcctcgtcttcctcgctcgtcaattcatcagnatctcancacccaaagtcgacaaaattgaaggncacntagccggcaaaacatganggggaaggtngacgagtgntgggacgagtgctgntacnactggngcgantggaaatactgnntgctgttcctcgncatcgtggtggacatcgtcntcatcgtggngttcgtcgccgaattcggnttcgtgcgccacatcgacgtctccgtggacnancgcttngctgacgcagttcgagctg

SEQ ID NO: 57709 - DNA, 196 bp, Zea mays
  Clone ID: MRT4577_15262C.1
ctacggcggcaccgtccaacgacgcgagagtgtggaggtgatggtctcacggaatgctcgagacaggactagcacatcacgagtgatgattgatcaatttaatgctgatgttgctgataggatgccgtggaagttcatcaactgcacaggagagtggtcagggttaaacctagtgagagtgctcgtggcttgtata

SEQ ID NO: 57710 - DNA, 572 bp, Zea mays
  unsure (1)..(572): unsure at all n locations
  Clone ID: MRT4577_152630C.1
ctctccagcctctctcccccacctcttccacccctccacgcccccagagagccccaggcgcaccgccgacgaccccggttcaggcgcagatcagcgtgcgcagtgtcccgcccaccctgcctccgcgacctccgaccctgggagcgcctgcccgcgccgcagggggcgcttcgcatatctccccttctcttccctcgccggtgggtagcggccggcttgctgctgccctgtccacgccgcgtctacgtgtcctcaagggctgggcgctcttgtcctgccaaacccgactccgttcgtgtgcctctctgtaggttttctacgctctaggaggaggtcagagacgcctcagagttggcttcgccgcgcgcatgncgatttgcggcggnggncggaggctggcacagccgccgctggggcgacgacgacaacggcgccgtggatgcctccgccgccgccggatcgaagggactatttgtaccgggagggccgcangcacgacggcggcgggggcgacccgctcctgccgcccgccccaacnccgncgcgctggcgggactcgccggtccacccgt

SEQ ID NO: 57711 - DNA, 186 bp, Zea mays
  unsure (1)..(186): unsure at all n locations
  Clone ID: MRT4577_152631C.1
cataggacatgcaaggctgatcatacttgtgaaagatggtggaaaaacaaaaccggcgatctataacatcatataaaacnacttactacactcttctcaattnttncancttntnctcttcttanttttcttctaatccatcatatntnncancannaccatttncaccttcatcaatttaanttc

SEQ ID NO: 57712 - DNA, 442 bp, Zea mays
  Clone ID: MRT4577_152632C.1
agcaaaaaatcattcattggttgaaaaacggggaacctttgccttggttcccccccaaagcgggggggtggggtttttcaaatgagcccaacccttttgcggcccccaaaagccccctttttttccttagggtttaacttaaaaaaaagcccggcggggggaacagcccccatcgatccccaatccatgctgggtgatgcatgggcctcctggaccccaggatgaacccaacactaacaactggcacagagcgacctttaatcaaaaacacaggtgggccacccccaaccccagaccaacgaagataaaccccctggactaggggaaacaacccgggagcgaacaggataacttgggcgcgcgggccccaccggtcaattcctccagttcccggcggagttgccctaaccccccccaccggtgccacccccctaaccccccc

SEQ ID NO: 57713 - DNA, 505 bp, Zea mays
  Clone ID: MRT4577_152633C.1
ggggaaaaaaaaataatccccttttggacccagccccaaatttccggttttacaggaaaaaagaaaccgggccgaaaacaaattttttcggtttaaaagaaaaaaagggttccgggaacccccccgaaaaaacaaaagggttttaaaaggaccaaattttgggggggggaacccaaaaagggccccggccccacaacagttaatttttccctttggaacaactaagttcctttgggaaaacggaacctttttttttaaaacccggggggggcaaggaaaaaaaacccggtttcccattggggggggggcaaaaaaaaaattggtttggacgaatttttaacccttttttccccgggggggaatggggtttcccccgatggttaaacaaaaaagggcccttaaaaagggaaggggaacgggggccccctttaaggccgccggggggatttgtttttggtgaacccccgggggttccccatttttgggggattcgaaggggaggggg

SEQ ID NO: 57714 - DNA, 444 bp, Zea mays
  Clone ID: MRT4577_152634C.1
ggtatccttctcagcaccagcaaccccagaatcatcaacagttattgctgaaatatattacgcaggatcttggattctctgggagaaaacctattgctgcgtctcttatatactactgtcttcttcattggagatcttttgaagaagcaaagacaactgtctttgacagtattatacaaattgtaaactcagcaactgaggctcaacatgatacgagaagcttggcctactggctgtccaacttatccacattgtcagttctcctgcaacgttcatttaaagccaccagggcaactgcctcaactccacatagacgaagaatttcctgtgaaaggatttttcaagccaatcaaacttcaagcagtggacttgcttgtctcagtgctcaatcagtggatggaggtaccgtgtttcaccaaattgaagcaaggtatccggcttcgc

SEQ ID NO: 57715 - DNA, 240 bp, Zea mays
  unsure (1)..(240): unsure at all n locations
  Clone ID: MRT4577_152635C.1
gatcctctagagcggccgacctacgctttcgtttcccttcttagacggctcgagacaggcaaacactggagggacgtggggaggngacggcacgacagcccacacacgcgccagcaaagggaccacaacnacaaccaagcgaaaacgcaagagnggccggaagacgcacaaaagnggccgaagacactcgagcacagccagagagccacacgcacaagcnggaacaggggagagccagaa

SEQ ID NO: 57716 - DNA, 242 bp, Zea mays
  Clone ID: MRT4577_152636C.1
tcgagcggccgcccgggcaggtccgtatggtgtgatatagagaagggggttgacttcgaagaaagtacagtatgataaagagagcaaatgttttttggttttgatgatgttttcttttccctcctcttctataagagcaactccattcgttttctaaaggactctctaaatcaacaagttaggtagttggtcttaaaaaaaaaaaaaaaaaccaaaacaccacaacaacacaaacccacccc

SEQ ID NO: 57717 - DNA, 600 bp, Zea mays
  Clone ID: MRT4577_152637C.1
ggtaccctcggggccgtccgtgtctgttgctcgtccgacgctctcccgccccggctaacgaccttctccccagccaggatgcctccgtggccgcgcgccctgaagctccagttgacacgtcccgaccaagccccagctcggattccccttcccatggcggcgcccacctccctgtgctccctgttccagctcgtcggggatgccccttcctccagccgtgttctgcttctctccctgcgcccctattcatctcctgcgcgccttggttttggtcccaagctccatggccgccgcgctgcagctctctggtgctcggtcgccaagtctccctgctctatgcgttcttcttcctccctggctcctgctcgtccaacgacgccgtcggccggacctctctgcttctcctgcgcccgcgtcgtggctcttcactgcgcgtagtggtgcttcagttctgctctgtccattttcctgtgccgcgccactgcagctcgcctcggctcctcgcctcatccacggccgagcgccctctgcccagcctgtcgaagctcctctgccggctgcaagctcctgctcaagcttgctctcggcgctcgcccctga

SEQ ID NO: 57718 - DNA, 362 bp, Zea mays
  Clone ID: MRT4577_152638C.1
ggcgctttctcttttgcttacttgtttctctcacacacacccaatgggccgggtgctcaaatttgttcggctgaggaaaatacatttctcgtcgggggcatgatgttttgtggctatagctagagaggatgaagagacataacttggttaggatggatcgagtgacaattaagctagaacaagtacttactgatgatggaccgggtgcgacagtgaagagaaagagatgttgcgatcataaaaggccacacgatgacacgaggtgggtcatatatcattaaagggagatcaagcaagtgttgatctatgttattgatcaagtggcttgacgaagaacgacggaggaacttcatgctttgtgc

SEQ ID NO: 57719 - DNA, 539 bp, Zea mays
  Clone ID: MRT4577_152639C.1
gggtggggtttttttttggagacgacacggtgctgtatagagtcccaatagtattgtccatgaatcaccaagttacttcacgctacagacgatgccttaacctcaaggcgggcatctgtctgaacattattaagattattattttttccaacaccgtgggggggcggccacatactaatactgattcggcacacaaaagcacttcatgcacagcccaccaactgaagggggacagggtactcttatctcctatcatgcgatagtatacgaggaatttccgaaccgagtatgcatattggcccatcacctcgttctgtatcgccgaccttgatgggcctaagggtaaagggcagcgcgtgctacagaccagctagctacagcatttgtacaggcaggctcaccagatgagtcgaatgtctatcgcttgagctcgcgtgggcggtcctgacggcactcccgtgaatactccacatgcacatgaatgcgatccaggtgtgtctaaagggaggcatatttcacctgggacgaatcatatctat

SEQ ID NO: 57720 - DNA, 571 bp, Zea mays
  unsure (1)..(571): unsure at all n locations
  Clone ID: MRT4577_15263C.1
ccctcggttttttcttttttttttttttttttttttttttttttttttttttttaggcaacaacaattttaatagtaataattaacaaaaaaagagaaataatggaaatatctggaatatttcgcaaaaggatctaacaagctccgatccatgcacgcaaatgcacgacgcgagagcttcctccgggccggttgccttgccgggcaggcagctaataatcaacacacgccgtagtcacggaacatgagctccggcccgggggatcccgccgctgccgccggggggtcacggggggttccgcggatgaggacgagctccttttgggggggcagctccatgaccttgcggtgcgagttggagtgctgcgtgagcacaaagggggggctggacccggggcggtactcgggcaccagccgcccggacttgaaccgcacgccgcacgcgttgcacagggtcttggggcccaacggccccgtccgccactggggngtcgtctccgacgcgcagtgcgtgcaccggngcacgccgccctccacgcccaccgncattacctccccggggggccccgggc

SEQ ID NO: 57721 - DNA, 525 bp, Zea mays
  Clone ID: MRT4577_152640C.1
cctcgagggccggccgggaacggagatgcacacaagcgaggaactctctatcccttccccgcaaccagtctctatcttctctcttgctctctcattcaaactgaacaacagctcggccaattgagatacttgactcaatagatatcctctaggagacgttcttgctccggccgcctatctatacaacaatgtgttggcgtctgtcgccaatatgatgtatcgattcggcctcacacatgaacatcctgtcacaatacaaaacggtgctgttggtaaaacaccccttactatagctcgcctgcatacctttccctatcgacttgctcgtggtgatcgccgcgttcgtattctacttctattcttatcatgagaggcctaatactggggaacttccctattctgaacccgttcaaacattagggtgcctgttcctctattcatcggacacgctggctataacctcagacaacatatagcctatctatacctactgaactctaacacagacatcctaataacttaggc

SEQ ID NO: 57722 - DNA, 262 bp, Zea mays
  Clone ID: MRT4577_152641C.1
acaaccctctatagtgagtcgaataatgtttggaccaggatggaaagaaagaagccatggattttacccttgggcgaccagcttattttgctggaggccccagatgaacaaggctaaatatatgatgttttcgtgtccaaaaaaaaaaaaaaaaaaaaaaaaaaaaaaaaaaaagaaaaaaaaaaaaaaaaaaaaaaaaaagaaaacagaaaaaaagagaaaaaaagtgagagattcaaaaacctacagagacatccaagca

SEQ ID NO: 57723 - DNA, 459 bp, Zea mays
  Clone ID: MRT4577_152642C.1
ctccagctcaacgacgttcatgacgagcaagtacactgccagcacgatggaggcgtagaggaagaggaagaaggctttgcgctccccgctgccatatggctcgtcttcatgcccaccatccgtatcaagtctcggcgaagccccccttccagcacaatccattggcaggcctcgcgcaggcattgagctggacaagcacggacgacgacagcgactacttgtgatctccgacaagatcccccctcacaccggacagcgggacctctactactccgagggggcgtcgcactacgatacgctacagcacaaatacttcgagagctgcccttgtccgatcaccaacagagatctgctgctcaagttcatgatgctgccctgaggatctctcctaggctagatcagcgccggggcaacaccaggaccacctgcccatacgaatataagctagaggggcgccgc

SEQ ID NO: 57724 - DNA, 1414 bp, Zea mays
  Clone ID: MRT4577_152643C.1
attgggtacctcgaggccggccgggatgaacagcaagggcgaatagtctagtccagttccctccccagattccccttttcataaagctcaccatctcgtcgtcttcctattccacacctgctgtgtttttttatattattattattatatcatttctgctacgtatttttttttcctttttttgcttctctagtcgtctatgcgatagtttacggtgttctgcacatagatctcatgtccggttttgcttctttctcgcgtttctcggccgtggtctggcctggtctggtctctgacctcaaacaggcagatgcttggatttgaagcggagctcctctcattccaatgaagggtccgtccgaagggtggttccgctgctcgttcatggttcccactatcctatctcatccatgtttgtgtcttcgagaggaagcggagagattcctgtggtcgccttttgagataggcttgtggtttgcatgaccgaggagctgcaccgaccccgtgctggccgctctttggattgaagggagctctgcatcctgatccaccacccccatgcctgccttgctgcatccgtcgtcctcggtccatgagatctgaggctcatgtagccgatgagtccttttttttttctttctcttcctgctgtttctccaagattcaagttggctggccgtgcttatccgtgcaggagctgaagcaggtttctgccctgttggtggtgatggtatctatcggtacccgtactttgcgtcgctttattcccatctttgctggtgaggtgctatgtcagcgttgtcacactcgtttattttgttctcatattcttcggtttcccgttcgtaccggcggcgcgtgcattttgcggtggggctcctggatctcgctctggacggaggcacagacagcttccctggcgtccccaaggtgctggtagattcacgccaagaggccaccgtgctctctatcgcttgctggctgagcgctcatcgtcacatcgcgcgcggcagcttctatcttgtggttcatctgtacttttgactgacatgtgatgtgccatgaagctctgagtctctgacccagatctttgcatgcgttcgcgcagtgctcctgggccgttcggtgcagtgctctcgcaacgcttcagggtctcttgctagacatctgtaaggtctgggatgcagggagtcgttctagcagaaacatcattcgccgtggacatgatgcgccaagtttattattcttgtttgggctagggatcttgcgttttttagctatcttgtaaccaaatgcagcgtaatgggaaacgaggtatctatgcgccagtgccacttggatactgtgtcgttggatgtttgtaattgtaatatactcagcgtttcttgcttcaataatgatgtttattatatgt

SEQ ID NO: 57725 - DNA, 457 bp, Zea mays
  Clone ID: MRT4577_152644C.1
aaaagttccggttcaaaagggcctggtctatatggaaacatccattaacaaacctttctatcacagtctcctaaaaaaaccctcgctaacttacccctggaaactgaaaaaaaaagaaccgcttgggattgaactcttctatttaaactgctgtatttgaactgctttgagccaaaaccattaaaacaatatctttttccaatacggataagccccttccgatcgggctcacccaaacagcctgtccctttaaggttgtccttgactgggttgttttgaattctaagcttttaaccattttccgatttcccatttgtttagaaaaaaccacccaggcgctacccatggagagattctcaagggccaaaacttctggcaactttctcaagtcaagcattctgaatctgtgatccttaatctctgtgaccaaccttcacaccataaggctctttatata

SEQ ID NO: 57726 - DNA, 566 bp, Zea mays
  Clone ID: MRT4577_152645C.1
ccaagaccaaatgtttacattctaccaaatcttcgtaaaaaaactcaggaagaaactgtgatattagatacagtagaatctgaacctattagagaagaaacttccccagatttagataaaaatggtccagatagagcagctgatgggtcagaaattgttgaaactatagctgtagatgccccaaatgatgttagaactgaccctgacggccaatccagtgaacccgatgtagtgaaagaccaatccgttaacgaagaagatacaaatgattctgggtttattgaatgtggaaaaaatagttctgataaatataaatcaaaaaagaagcctaaagttgttaaaaagttatcagaaatagaagttaagaagaaagatcctgttataactaaggagctaaagaaatctactagtaataaatttgctgcacttcttgatgacggttccaacgaatagaaaatacagttaatggtttatattttttcattatattggtatattacttatatttaaggatatatatatatatatacatacatacatacatagagaaagagctgaatattaaa

SEQ ID NO: 57727 - DNA, 313 bp, Zea mays
  unsure (1)..(313): unsure at all n locations
  Clone ID: MRT4577_152646C.1
gcttgatatcactngtagcacacggcgccgcccttgttctctgtttggttcttaaggtacggagcatcctccactagcaacaaggctccttgtgcaaccctactcgtcttcatgaatggtatggagaccgagcaagatcctttacgtcgggttttaggccactacatgaaacctctcgagtccggtgacgacaactgagaccggagagggcccctcggaacccatttcatctatatatatatgcggggagcggcgttgtgtgtagtgtagagaacctgaaatcctcaccagagtggggggaccgaggcactgc

SEQ ID NO: 57728 - DNA, 1495 bp, Zea mays
  unsure (1)..(1495): unsure at all n locations
  Clone ID: MRT4577_152647C.1
tgcacgcgggggtaaggctcgaggttgggcgggagcagctgacccgagccgcagatggtctctcccggccgctactagaggcttagcgttgagagccacatgttgagtgaacagacggcggctagcactagcagcggcgagcatcaggagaggagcgtcgtcgaggacaggcggctacagccggtgggggagaacgaggaggcggagttcagggacatccacgcgctgagcccgccgccgagccagccttcgtcgtaccgccggagcaggcacgcgtccgtcgggagcgacaccgcgcccagcgagcccttcccgaccatgagcagggagttctcggccatggtcgccgccgcagcagccatcgccaacggtgccgccgccgacaggctcggggaggccgaggacgaggagaccaacccgctggccatcgtgccggacagcaaccccatcccgtcgccgcgccgggcccggggcccgcccaccccaggcgccggcgccgcccacgccaacggcgacggtggggtgtccgtggggcaggtcaggaaggaggaggtggagtccaagatcgccgcgtggcagatcgccgaggtggccaaggtcaacaaccggttcaagcgcgaggaggtcgtcatcaacggctgggagggcgaccaggtggagaaggccggcgcctggctcaacaagtacgaggtagtcagtccatcgcatcgatctacacctccacactcactgactagcgtcgtccgaactgtccagtgcttgctgactgataccaacgcatgtaatgtgcagaggaagctcgaggagaagcgcgccaaggcgatggagaaggcgcagaacgaggtggccagggcgcggcacaaggcggaggcgaagcgcgcgtcggcggaggccaagcggggcaccaaggtcgcgcgggtgctggagctcgccaacttcatgagggccgtggggagggcgccctccgccaagcgctccttcttctgaaccctcccccaccgcccaccgggcctctcctccttcaccaattcctctgccctgcctgctctggtcgtcgccgcccgccgcctgtgcagttcagttgcatcgttcaccgcttcactccacgggatcagacagagtgatcagtgccgtgcttagctgtgtggaacgcttgttttagtgctgtgtccacatgtatgatttgtaaccttttcttctccctcctgtttatgtcattgttacgaaggatgtgctctgcccgagtcttgagggcaagagctgcctgtattttgttgatatttcgtcatcaacagctgtgtatgtcagtacgaacaagataatggaagtccattaccactgtgtaaaaaaaaaaaaaaaaaaggcccctagggatgcaccgacgagcttcactacttggaacttcagttttgctgttgagctagaaaaaaaaaaaaaaaaaaaaaaaaaaagtgttttctgctntagaggtccaccgacttacgtacgcgtgcat

SEQ ID NO: 57729 - DNA, 436 bp, Zea mays
  Clone ID: MRT4577_152648C.1
gatcttctcattgctggcagatactttaactgaaattcaggaacaaattggtgctggtgatggcgatgactccgaagaggataatgactgggaagaagttcagaatggtgatgctagtatatcagatgatatcatacactcagcatcggttccttcaatgactaatccatcagttgaacatttaaatgcaatggccaaggtttttgatgaggtttgtgagcaaccaggtctgctcctttgttagttctgtcatatttatgccatatttaccttgagttgtacaacaggatgatgatgatagttatgacgatgatctgacaaaaaccgaccctcttaatgaggttcgttttcactgcagaaaagatcttccatttgaattagatgacgtcaaagtcaaataacccatattcatgcaggtgaagttagcggactttct

SEQ ID NO: 57730 - DNA, 158 bp, Zea mays
  Clone ID: MRT4577_152649C.1
gcagatggagctgaaattatttacccctgtataaaacccagaatttgcttctttttactatgggaaggcatattctcataaggaaaaaatttgttgctgttacacaaggttaatcgaattactaacaagggggaggccaaagggtttgttctgaaggg

SEQ ID NO: 57731 - DNA, 509 bp, Zea mays
  Clone ID: MRT4577_15264C.1
tgcacgcgtacgtaatttttgtacctctagtacggacgccccttttttttttttttgttttaaagagtagaatggtggacctgcgttctggtgatcaagtcagattcatatcattcgatccaaatgaagctcatgcatactctccaaacacgagaggtcatcaaattatttttttaaaggatccccttcctggggggggggcgggttgtggctctaaattgctgccgcgtcaaacgtggtgacagtgcatccaagttaaccacattgctgaactgagggcttctctacttggccacatctctttcaggcttacaggaggatgaaaaccaggtctgtgcatcccagcggccacagcctacttggggatcttgcacaccagcccgcgtctcgggcgttgttcgaactatttttgctgggaacatggacagaatcgaaccgtggggtgaagatcggtgctcttcgtgatcgattcctccacatttccgcgactgtgctgagcttttgaacct

SEQ ID NO: 57732 - DNA, 674 bp, Zea mays
  Clone ID: MRT4577_152650C.1
ccgggaaaaatcgccgggtggccaggtcaacaaccgcttcaagcgcgaggaggtcgtcatcaacggctgggagggcgaccaggtcgagaaggccagcgcgtggctcaagaagtacgagaggaagcttgaggagaagcgtgccaaggcgatggagaaggcgcagaacgaggtggccaaggcgcggcggaaggcggaggagaggcgcgcgtccgcggaggccaagcggggcaccaaggtggcgcgagtgctggagctcgccaacttcatgagggccgtggggagggcgccctccaccaagcgctccttcttctgaacccacggatcagttcagttcagttgtcctgtgggtcggaccgttcaccgcttcactccacgggatcaggcacagtgatcagtgccgtgctagctgtgtggaacgcttgttttagtgttgtatccacatgtacgatttgtaacgtttccttgcttctcccgtttcgtgttttcgtatggtatctatggtattgcaaagtccatggccacgatagacagggaaagcatatgtatacaccattagaaggatgtgctctgcgcctctgcccgagtcttgaggacaggagctgcatgtatttttcaccaatataatggttgtgtatgtcaattacgaaaagatatgaacaccattaccaccgcgt

SEQ ID NO: 57733 - DNA, 238 bp, Zea mays
  Clone ID: MRT4577_152651C.1
agtggctggaggggctgtacagattaacgcgaaagagacctgcaattacctttgttctcctctgatctagacactgatgtttttgaccacgagtcggaaacgcttgaagtactagttaaagaactgcctgagcaaactgacacctaaagctacctggcattatacatgggaaggacaactcagaagatatgaggataggggagtgatccaccacgtagagatgggaaactttgaacaa

SEQ ID NO: 57734 - DNA, 356 bp, Zea mays
  Clone ID: MRT4577_152652C.1
agtaaatctctcctgccctgggaggaatggggggagtttgaagtgacaaaggatgactgaaaccctcagactgcactgattcctttgcatccagacctgcgggcaaaatgtactgagacagcatcttggatctatgcagaaagcctggaggggaaaccttctgggtgtcacactatgatcgttagctggactgatacccccagtgatcagtctgcacgaccattagatgcacatgtggctgcttctggtatgactgaatgaagcacgcttcaaccagaggcctcatgctagatgtggcaagaagcccacaacatacggactggaactaacggtctagtactcactgaaatcatagt

SEQ ID NO: 57735 - DNA, 653 bp, Zea mays
  Clone ID: MRT4577_152653C.1
gtccaaaatcgccgcgtggcagatcgccgaggtggccaaggtcaacaaccgcttcaagcgcgaggaggtcgtcatcaacgggtgggagggcgaccaggtggagaagtccggcgcctggctcaacaagtacgagaggaagctcgaggagaagcgcgccaaggcgatggagaaggcgcagaacgaggtggccagggcgcggcacaaggcggaggcgaagcgcgcgtcggcggaggccaagcggggcaccaaggtcgcgcgggtgctggagctcgccaacttcatgagggccgtggggagggcgccctccgccaagcgctccttcttctgaaccctcccccaccgcccaccgggcctctcctccttcaccaattcctctgccctgcctgctctgctcgtcgccgcccgccgcctgtgcagttcagttgcatcgttcaccgcttcactccacgggatcagacagagtgatcagtgccgtgcttagctgtgtggaacgcttgttttagtgctgtgtccacatgtatgatttgtaaccttttcttcttcctcctgtttatgtcattgtcagtacgaaggatgtgctctgcccgagtcttgagggcaagagctgcctgtattttgttgatatttcgtcataacagctgtgtatgtcagta

SEQ ID NO: 57736 - DNA, 1560 bp, Zea mays
  Clone ID: MRT4577_152654C.1
tgaagttccaagtagtgaagctcgtcggtgcatgcagcagacaagcacaaagtttacacgactaatggcacagaggtcaagttatgaggtcgtgcggggcgtttgtccacctagtgttagtgagttttttttgttgtttttttacgcggtggtaatggtgttcatatcttttcgtaattgacatacacaaccattatattggtgaaaaatacatgcagctcctgtcctcaagactcgggcagaggcgcagagcacatccttctaatggtgtatacatatgctttccctgtctatcgtggccatggactttgcaataccatagataccatacgaaaacacgaaacgggagaagcaaggaaacgttacaaatcgtacatgtggatacaacactaaaacaagcgttccacacagctagcacggcactgatcactgtgcctgatcccgtggagtgaagcggtgaacggtccgacccacaggacaactgaactgaactgaactgcacaggcggcggcggcaagacagaggaactggtgaagaagaggccggtgggttcagaagaaggagcgcttggtggagggcgccctccccacggccctcatgaagttggcgagctccagcactcgcgccaccttggtgccccgcttggcctccgcggacgcgcgcttctcctccgccttccgccgcgccttggccacctcgttctgcgccttctccatcgccttggcacgcttctcctcaagcttcctctcgtacttcttgagccacgcgctggccttctcgacctggtcgccctcccagccgttgatgacgacctcctcgcgcttgaagcggttgttgaccttggccacctcggcgacctgccacgcggcgatcttggactccacctcctccttcctgacctgccccacggacacccccccgccttcgcggcttccgtgcccgtcggcggccaccagcgccgccgcgtcggcgcccggggcggcgggcggcgggccccggcgcggcgacgggatggggttgctgtccggcacgatggccagcgggttggtctcctccagctcctcctcctcctcctcctcggccctgcccacgacgtcgctgtccgcgtcacggctggctgctgcggcgctggctgctgcggcgaccatggccgagaactccctggtcatagtcgggaagggctcgctgggcgcggtgtcgctcccgacggagcggacggacgtgtgcctgctcccgcccgcggcggacccccacggctcgccgccgcgcgcccggccgtacgacgacggctggctcggcggcgggctcagcgcgtggatgtccctgaactcctcctgttcctcctcctcctcctcgttctccgccaccggctgctcctgtctttattgacgctcgacgccgccgccgctgctgctagtgctctccgccgtctgctcactcaacatgagcctctagtggcggccgggtgagaccatctgcggctgggccttctccaccgccttggggcgcgctggtcagctacctggtcgaagggcttggcgccgccgggtgtgcggtgaa

SEQ ID NO: 57737 - DNA, 405 bp, Zea mays
  Clone ID: MRT4577_152655C.1
aaagaaactcgaactgtaactggatatgggttagtggggcactctgcttcaggacgtcttacaaagaacatgtcgtccctattggtccaaccaatacatacatctgtaccgtataacctagatgtatatcttgaatccggtacgaccacagggatctgactctgatgctacactgtacacttgattttatagacgtgaatactattcatgtttgcacgaggcaagaacttatcaaacgctacaccaacagccagaaaccaaatctatgttagctatgcttcctacacctatagtgagaactggttaaggtgcaatcagcatccgggtgccaactggatgaattgctataactgcaggaatacctacatgatctgcttctcatttaaaccagaacatttcactgac

SEQ ID NO: 57738 - DNA, 465 bp, Zea mays
  Clone ID: MRT4577_152656C.1
acagcggaaatcttattaccaaactttacagatctcaaaacttttacttcgtggcatgatcagagtgagtactacattgatccaaacagacaaactttgaacgggtgtagattatttgcaggttctcttttatgctacctcaactgaccatccttaatacaaaaataaaggggcgccatacttatataagaaggccgtgccagccaccgcttaacaccatcagcagcaacgccaccctatggcctctgaaacaccaggactggaaggcctgtgcatggagaaactgctgagacttacccgtctaaagaggagactgtcagggatatgctggatttccaagtcaaggataggctttcccacgacccatctgagatacaatcgtccagatgactgaccatagggagtcctgactttcattatgctagcgcccgaagacttattcagcagactctgttcgcatatacc

SEQ ID NO: 57739 - DNA, 229 bp, Zea mays
  Clone ID: MRT4577_152657C.1
acagtcggccttctccgtggaagcgggcgggccgccgcctcctttgaccctgtcgacgtgctgttacggaccggcattcctacactggccagggcgagatctcgcgtgtacggcgtacctcgtttgcctcggcggtggatcagtgacggctcgctcgagatggacgatgtggggtgaggacatcactctgtgggaaccgcatggcggacggtgccgctctaaggatggg

SEQ ID NO: 57740 - DNA, 1646 bp, Zea mays
  Clone ID: MRT4577_152658C.1
ccaaaaaaaaaaaaaaaaaaaaaaaaaaaaaaaaaaaaaaaaaaaaaaaaaaaaaaaaaaaaaaaaaccgccaagcggggtaggttgactcttctgtctacagcacctacctcttcacaccaactgccgcccctgctccgagaaccagaatggccgccgccgatgcatcttcgttgcctccgtccgccatcacctgccgagcggcggtggcgtggggaccgggccagccactggtgatggaggaggtggaggtcgccccgccggggcccatggagatccgtgtcaaggtcgtctccacctccgtctgccgcagcgacgtcactgcctggcaatccaaggcgcaacttgatctgttccccagagtcttcggccacgaggcatccggagtagtagagagtgtcggtgaaggtgtgaccgagttccaagtcggtgaccacgttctcactgtcttcattggggaatgcaagagctgcaagcactgcgtctcagggaagagcaacatgtgccagaagctcggtctggagaggaagggtgtcatgcacagcgatcagaagacacgcttctctgtcaaggggaaacctgtgtaccattactgtgcagtgtcaagcttcagcgagtacacggttgtccattccggatgtgcggtgaaggttggcttgaccgtgccaatggacagggtgtgcctgctgagctgcggtgtgtctgcaggactcggtgcagtctggaatgtagctaatgtatcaaagggctcaagtgtagctatatttggtcttgggaccgtaggactttctgtcgctcaaggtgctaagcttcgaggggcgtccaagattataggagttgatactaatcctgagaagcaagaaaaggggaaatcatttggtgtcacggactttattaacccagatgaattgagtgaacctgttcaacaggtaatcaaaaggattactgatggaggggtggattactcatttgaatgtgtgggtgattctggagtagtctccactgcacttcaatcatgttctgatggttggggagtaactgtaactcttggcttaccaaaaggaaaactagaagtgtctactcattatgcatttcttctatccggaagaacactgaagggatctatgtttggaggatggaaacctaaatctgatctaccttcattggtggataaatatgcagcaaaggaaatccaagttgatggcctagtcacgcatgatataccattcaatgaaatcaacaaagcgcttgagttgatgctagaaaacaagtgcttgagatgtgtgattcacatgccacggtaacagggtcgaacagctgcacataataatatgatatctaccatatgttgcatatctgctctttctaccttgatcatctttgtggctcaaccgttcaagtactcatcagtcatcaccacgccggagcttgagtttttgtccttttctagtcccctggtaaagttgttgtaaatccagctatccatcaagaattatcaggagaactacactgatttgcttttgtatcttcatactttttcttctagaattgtcttcttatattgaatctttaatgtctgttctgttattttaatgctccatgtacaaaccaaaaagcaaaaaaaaaaaaaaaaactcagccccccc

SEQ ID NO: 57741 - DNA, 247 bp, Zea mays
  Clone ID: MRT4577_152659C.1
attgagggggaaatcttaaatatattagaaacctataaaaaactgcaatcccgccacaaataatccaaatagaacgcgactaaattaattttaaagacctgaatcagacttcataattccaaccaatatttaaattcctacccaaattaaaaaaaacgaacaccgcccacaataaaacaaaaccttttgatgtttaaaaaccccaatagaaataacacccagactggtgccctcgctaacttaaaat

SEQ ID NO: 57742 - DNA, 317 bp, Zea mays
  Clone ID: MRT4577_15265C.1
caactcttttctattgactttacactatgtgtttcatgataacttacttatcatgtgtcgtacatacatatactgagttttatattaacttatatatatcatgtttctgtatattttaaggtcctgcaatctaatttgacatcgcacatcgcgcgctggacgcgcgacatacactagtaatacaatccatattcctttgttttcaattttatgaccttatcactaggtgcataatattcatacaagccaccttgcagttttttgcgtggttaataatgcaccttttaactcaattaattttgggccgacagaaaatt

SEQ ID NO: 57743 - DNA, 520 bp, Zea mays
  Clone ID: MRT4577_152660C.1
ctgagaattcggacgaggcatccatcttcaccctccttgctactatcccacacccacgctagattttgaattcccttgattggggaacaagccaaacacgcaaacctactgctgactgctgcccaacatcaacatgcaacaacccaagcaaatcaaagcttcaccatcaccatcaccgccaaggacaggtcacctcagcttagctcagctccctagccagcagaaactgcccagcgcaagtgcaaaatggcctgtaagtactggcaccacaaatcacctaacactaagttctgcccgggtcgcctgccatgcagtcctactaccgcggatagtccgatttccagcagttcatcatggacagcggctttgccatgtccgcgccgacgtcgcctcagcagcaggagcctaataccgccaccgtccactatctgtacagacccttcatgtacctaccgatgttgaccatgcatctccatcgcttgaccaacgacatacaccgcaaatgcgggctaactatggc

SEQ ID NO: 57744 - DNA, 791 bp, Zea mays
  unsure (1)..(791): unsure at all n locations
  Clone ID: MRT4577_152661C.1
gcncctcatcattcgtgccgtccgcctccgccgtctcgtctgccacccctcgccaccccctctcctccccaaggagcgcagccgcggagcccctcgcccccgtctcccatggcggcctctctcctccacgcagccgcctcctccccgctcgcgggcccctacccggccgcccgcgcggccttccgccccctcgcttcctccccattcctgcgcctcgcgcgctcctctcccgaccgccgtgcccgactggacttcccgctccgggcgctctcgggtggcgctcgcctctccaccggagtggccgccctccgtcctcgccgcttcgtcgccgccctcgcgggggaggaaccgatgagttcagaattgggtgatgacaaggaaaaggaaacggaaaagatcgaaatagagcctgaggaggcccaggaagtgtggagggaaatgctcaagcagttcaaggccgaggccatccgaatgcaggccctgacaacgcaggcatacgatgtctactccaagagggcgagggaggtgctgttagaggcctcagagaagctaaggatccaggcagataaagcacaaaaggacctgaccattatcgctgcagaggttggtgaggaggggcaggaatatctacagctggcagctaagaactccccagattcaatcaaggatatcaccgagacaatcaatgcagttggcaacctcaatgggccatcagagtataaggattatcatgtcggaatttcatttggtacctttcctactgtaggaggtttcctgaacttctgctaact

SEQ ID NO: 57745 - DNA, 602 bp, Zea mays
  Clone ID: MRT4577_152662C.1
ggggtaccggcgccctctctcgagtttttttttttttttttttttttttttttttttttttttttttttttttttttttttttttttttttttttttttttgggggaaaacccacatgttttgaataggattgggccggtttaaatccttaacaaggaaaaatcccttctaatcccccctaaaaccctccaatacccatggaatatcaaaaaccgaacaagggtttatgatttttttaacttcaaaggcccaaaccttggggaaggaagtaacaaaccccctaaagtaatcccaggaagggggtcatcccactgggggttttacacatgaacataaccgaggccttaggggacataccctggagcaaagccgataatccccgttaaatttgttacccccccaacgattattggggaatttttcacaaggacttttggaaaacatttcacatggttcaaagggcaaacctgggaggtcttgggcttttggcaatccatgggagggctgaaacttcccaaacgatggggaacagggggtctaatccttggaaaaaaaggtttggtgacccattttatttgggagcccacccctgcagaatttgg

SEQ ID NO: 57746 - DNA, 140 bp, Zea mays
  Clone ID: MRT4577_152663C.1
aggtgacgcatgtacactctggcagtctgctgctgtgtccagagtccgactccagctgggctgtaactaggcttggcacccgcattaggccccgccagcaggcaaagcagggagatgtcagactgctacacggagctgga

SEQ ID NO: 57747 - DNA, 272 bp, Zea mays
  Clone ID: MRT4577_152664C.1
cgcgaaggggactttttatgggcagccaacctaacttaatttttaaacttcaatacaaggcctatttatatacaacaaaactgccaattggcaacctcctatttgccttattccaaggggaaaaaacacccaaccgccccaaaattcttttcctaacttaaccacggaaaaatgttctttttcacccaattcttaaacaaaggagaccgaggctttttatccatcctcgccaccataagaaaaaatttttttggccgggaacaaatcccata

SEQ ID NO: 57748 - DNA, 311 bp, Zea mays
  Clone ID: MRT4577_152665C.1
aacccacgcgtccacccactcttccgttcaactcctatgcttatcactgccactaccaccagatcgagctagtccttctcacaaacccgcatgctttactgatacacctacaaatcttcatcttaacacacatatatctccactacatctaatcctcacacacatccaccattaatctcatacctaacacataaccctcttcacttatcccatacttcacatactcaacgcacaaacgaattccactatcgtctaactgatcctcaccatccccataatactgatcctttcactttccacactcaatatta

SEQ ID NO: 57749 - DNA, 237 bp, Zea mays
  Clone ID: MRT4577_152666C.1
cccatcctcctcctcctcctccgccgcggcggctgccttcggcagggcgctcggcgacctcacgctccgcgacacggtgcggcccgtgctggtcccgtgctacgacctggcgacgcgggcgccgttcctcttctcgcgcgccgacgccgcggagcgcgccgcgcacgacttccggctgcgggacgtgtgcgccgccacgtgcgcggtcggggccgggcgcgtggtggaggttgtgtt

SEQ ID NO: 57750 - DNA, 189 bp, Zea mays
  Clone ID: MRT4577_152667C.1
cggacgcgtgggcgcgccgtcaacagggctcaggacggccgccgtcgtcagggcgtccggggaagcgcaagcgcaagcgcaggcgggccgtcgcgccgtgctcgggctggtggccactggcatcgtcggcggcgccttgtcgcaagcggtgcacgccgagaccgtcaagaccatcaagatcggagcccc

SEQ ID NO: 57751 - DNA, 412 bp, Zea mays
  Clone ID: MRT4577_152668C.1
aatcgaatgccaaaaaaacacaatagctctttccaagattacacgcattacaacaggcatttgaggagacacctggtcggtcgatgcatatacaggcatgcaacgcgtatagcaacaccaaacgtagggaatgcactatgctggacagacaagtggggcgcgggcggataccacccaaattcgacaacgagcctttttaaactttggatacttagggctaaaagcgagacattttgactgtctcacgtgttactaagatagaaatggatattgaatgggatggaatcaatcaactgcattcaaatttctgacgggacggcacagactagatgtacgagcacctccagcgccatgggcacatacacgtagatgaggaacaccttgagcttgatcgccgtgttaatggacccca

SEQ ID NO: 57752 - DNA, 430 bp, Zea mays
  Clone ID: MRT4577_152669C.1
ggtagatccttgtgcaaacaaacagtgctctctgtagccaaagccaaatgcagccgtcttctctgtgggtgctagtgcttttctggctcctcatcactctgcaagttgcagcaattgcataacgcaaggcactcactggtgaattggtgctggaggcactgctccagagaagcttctggagttctggtgtggggggtggctatttgctgcctcgctgaattgttgagcttgccgttcagggctgcagcgaatatctgaagcctgaacttctttcaggctagttgccactcccggtcaccttctttgatgtctcactcactccacctgattcagttcactgaacaaccatccagtttataattatcaacatgaaccgccaaaacaatgtttttaagattatttcattgacggaataaaactttttgaatgc

SEQ ID NO: 57753 - DNA, 684 bp, Zea mays
  Clone ID: MRT4577_15266C.1
tgttaacatgcctcccctcctcaaagcaccccttcgtccatcggcgctgcatcggcgacttcgcatacgggccatctcggtcgagcatcagccgagcggagcgagcaagtctacagttgcgaagagaatctcaaataaacaacctatcgggcttaaatttattcatcaaatcctttttgggaggcttgaaaaggcaacaaatattatcactttgtatgatgtttccaatatctggcacattcgtttgttgctacaggtaagttacatcagttttctttcaatggttcgacgatgtacagatataacttgaaggttcctccatggtaccatagagaccctacataaaagaaagggggggggggttggttcagaaactttgaaagggttcttttatatagccccctttgaaaggggggctggagagagtactttgcagtttagcgtcaatacataaaagaaaggggagcttcttttatacagatacaacttgtagcatttccaaacagtccaggcagaggtatacaaggtatacaactgcttatttcatcacacgaccgcatatatgtcttgtagtatattaggtgtaatttagaatgtcttgtggcaaaggcaattttttaagtggcctaaggcaaagctcacatttggatgacaaatttggctttatttttttgcagtaatctt

SEQ ID NO: 57754 - DNA, 1429 bp, Zea mays
  unsure (1)..(1429): unsure at all n locations
  Clone ID: MRT4577_152670C.1
ggtaccctccnggttcggccggggcttctgcggatgcgcttccggcatagtcacccaaaacctaccggcaaaacctacagcccttcgtctcccacacgcactctgccactcatctctaggttgtgtacgatcatcagcgagaggagctccctcgcttatttgtctctgaaacagacatcattgcttcagttagggaatgaagggagattccagcagacaaaatagcttagaggacaactcacaaatactaagtgcatttccaagggaaccaaagctagaattcctaaaaaacatcacgaaagacttctcaagtgaacgagtgattggacatggtgtctttggagtggtttataagggcatacttcagaatggacaactggttgctgtgaagaagcttgtgcaaacatccggagttcatgatagacggtttcagaatgaggcaggcaatctccagtttctggagcacagaaatatagtcaagttacttggttcttgttaccaagtagaaaagaaattggtggagagaaacaacaaacattttctatcagatgttccagaaaagtttctatgctatgaatatctgtctaatggaagccttgacaactatatttacgatgaatcttctggaattgattggaccatgcgcttcaaaataatcttggggatatgcaatgggttacattttctgcatgaggagcgaagtgaagccatagttcatttgaaccttaaacctagcaacataatgttgggtgacgacatggtgccgaaaattgcagattttgggctttcaaggttgtttggtgaagaacaaaccagaactctcaccaaaaacgttgtgggatggataggatacattgccccggaataccattacagaggagaaatatcagttaagtcagacatattcagtttgggtgttcttattcttgaaatagtgacaggactgaagagggacctcaatattcaagacatttcttctgagttactaattgacaatgtatctaaaaattggacagaaatgtcgcatatagaatcaaagtatccatccttggaagaacaacacctactacaagtaaaaagatgcattgaacttggtttgaactccttggagtctgatccaacaccaaggcctacaanngtaanaaagaatgncnnattgannnacttggtnnnttgaaccctgtgtngnngagtctgnnnatccaaagnnaaaaggcnnnctactgnntaggaatcanatanannttggtaanannctcaaagnannaatcagtcattgaaaagcttagcattacccacaaatnnttatggagaaaaagaaactgcnnaactgataacntnngaattcnnccaagggnaannncaaagctaccacttttcatagnagnngttatcanncaggggaactttnntgccaatgaaaaacgtg

SEQ ID NO: 57755 - DNA, 277 bp, Zea mays
  Clone ID: MRT4577_152671C.1
ccacgcaaacgaccacgcgacctttcacacttccgaccacgcagacagcctatgggcgacggcaagcaatagcggagagcggctcacaacaaccaacttcccacgtgcaacaacaatccttggcacatctaacaatacaaaccatcgcaacgcaacaacaacaacaattgctaccagcactgagccacctagccatggggaaccctggcgtctactagcaacaacacgtgcttgcataaaacccacttgctccggcaaacataggtgcaaaccaacc

SEQ ID NO: 57756 - DNA, 532 bp, Zea mays
  Clone ID: MRT4577_152672C.1
ccggccgggcccccgcgctccggaacctggtagccgtcgcccgttccgtcggctcttcctcctagcgcactgcgcggtcccaagctacagatcttgctcctagcgccctgcgcggccccgagctacagggttcttgtccttttcataaccctcgacgacctcaaggccggcacccttccctgttgctgcgttggcatcgccggcgactcgctcccgctgctctacggcatctccgtcgacaaggtcatctgctgagcgcgccgcccttctcgctggagccagccaccatcgtgaccattatgcgcgcgacgaccatttcatcatcatccccactttttgggctatttgtgttgtgatcaaacaacatcttcaaaaccttggcgaagctttgaagaattagtggcctatacaagaccaaggaatcttgtcctttctttgcgacaccagtacgcgcaacagttatcatctacccaccacctatccaaggagattatgagagttacaatgccatcattatctccagaagaacgac

SEQ ID NO: 57757 - DNA, 168 bp, Zea mays
  Clone ID: MRT4577_152673C.1
cagtatcctccccttggtaggttactgctccaatatatccagcagcatgggcctggtggggttcatcttcatcaagcccatggtgatcacacctgctcgcaggatcctcccctagcggacgtttagtgttcgcgacatctatgcagactgctgcagctgcagtcatca

SEQ ID NO: 57758 - DNA, 396 bp, Zea mays
  Clone ID: MRT4577_152674C.1
attcggctcgaggcacaccatactgctttttttaggcattttgtgcttctctggctatggggggtggtacaacccatccgattggatgggctgtattagactactttgctgaaaaggagctctcaaatgccccttgaaaaagttttgaatgcgcactactacaggaagttgttgctactttgggtggttcacaattgctattacacgaatattagctatcctatgcatttacctggaatgggagattattttatttcactatatccatccaaaagtggatcaaataaaataaaagcccctacttaaacgtctgtatatagtcatgaatttaaccattgttttttatttttcttgaaaaaagtacctatttttaagttctatgactaacaccacttt

SEQ ID NO: 57759 - DNA, 610 bp, Zea mays
  Clone ID: MRT4577_152675C.1
gccggccggttcgggaggattaatagtgagtagcctaatgtctatagctctagtattgcttgctctccacaataaacaagacaggagcaccaacaatgctcgtcgcctcctcttcctcggtcctcctgatgctcctggtcgccgccttggatgggatgagcgccaacgccgccaccttcaaaatcaccaataactgcggattcaccgccgtgcgacgcgcgcatcccggaggtcggcggcacgcagctgaacccgggcgggaggtggaacatcaacgtgccgtgccgctaccacctccaggcgagtgggtacccgcagcgggtgatccttcaacggtaacaggaagagctgccagacgagcgactgcagatcggcgctggacagcacgctgtctgcgcaaacgccattagactctgccgagatcaccatcagggcgaggaagaacttcatacaacatcacgagtcatccaccgctacaaactcctcatgggcttctcctgcagtagctgcgcgtgtgtactgtgaaccaaccctgaatgaccccacgattaccacaactacccccatgtgataactcatgcctatgccgttaacataaattaccaagtca

SEQ ID NO: 57760 - DNA, 292 bp, Zea mays
  Clone ID: MRT4577_152676C.1
ctcttataaagggcaatgattatagtagacaatattgtaactcagtagacttgttgaatatgcaaacttactgtcaagtgacctcaaaaaaaaaatgaaaagatagaatacactagtagttcttatcctcttttgtaggaaaccaataatagccattgtggcaataattcatcagttgattttaaagcttcatgttatgcaaaaaagaatcctgctgttatacatgtgacagtgactttgtgctgaaatttcagctattccagataaacattgtatatcttgtaaattaatg

SEQ ID NO: 57761 - DNA, 426 bp, Zea mays
  Clone ID: MRT4577_152677C.1
gcacgctatagaggggtcgaccctacgcgttcgttcacgcgtacgggcacgcgtccgatggagggcttgttggcgcacctctgtgcacgatttgagacgatgtagcaccccctgctcctgtattgaaggcactgtgcttattggcctgtctggttactgaggcaaagctatttacgcatagagctctaagagagtactctttttccgatccaaggaatgagaacgtgggtaggtctatgccaggggtattctgaccagatgatattaacatcagatgatgaactttttgaagcctcaaatgacattgtatgacacttggtatagaactgctctgcattggtgattctagacggagacggagacatggttaccgctgcttatgtcataaaagaacttgctgagaaagccatcgggaacgacaagacc

SEQ ID NO: 57762 - DNA, 669 bp, Zea mays
  Clone ID: MRT4577_152678C.1
gggaaaaaaaaatttagaaactatcttgtattatattagactattattatgtgattcaaatcttgtcattacattggaattattgtgttggaatatgatctcaacttattgctatattgtcatattgatctatggtctatgcaatgctcgcggtgtaaatgtcttatgcgtgaactcaattctagtaaataataagcaattcatgcattattcgacaagtatctgttatccatatgtatctgaccaaataatatctatatttgtcacttatccgctcgaataaatattcggtccttgtatccatacatgtcctatttctaactatatgtataccatcccgaatatgattaaaatacattagggtaggatacagagtggcctactatccatttgtatttgtcctgttttcacccttagttgttaagacatttcatgaaacaagttgaagtgttgatctagggcttctctgttgagccgagttgaaagcagtagacctcaaaatagtttgagctgagaacaaggaagtgccaaaataacatcatggagagtctcacgctcatgaacgtctcgcacaggcaggtaaaggtcacgttgacaagatagagttaggggtggaggtgttcaatctataggtcatgtacttctataatggtagagtcgaaccacgtg

SEQ ID NO: 57763 - DNA, 366 bp, Zea mays
  unsure (1)..(366): unsure at all n locations
  Clone ID: MRT4577_152679C.1
ctnnnnnnnnntgccttaatttttttaanaaaaaatttttttttttgttttttttttaggggatttttttttttatttttncccccggaaaaaaaaaaacccccgggagcaaatttggtaaagataaaatccaaaaaaaccccttcaaagggtttcacaattccccaaaatcccggggcccgggacaatttgtaaataaaaaaatttttaaagacaaaaaatttaaattccaaaaaccggtttctttcaaaacatcaatatccccattcttggaaaccccccaacctatttaaacccagccacctattttttaaaaacctcaaaaatttcaaaaaaaatttcttttttcccgaaaaaaccaaaatt

SEQ ID NO: 57764 - DNA, 432 bp, Zea mays
  Clone ID: MRT4577_15267C.1
ccgggaccgggggggcaccccggaaattccggaccggtccctggaggggaaccatttttccctaaagggaggggtattaaagctgggggaaaataggggcataggtgtttcctgggaaaaattgttttcccttaaaaattccacaaaaaaaacaagccggaagaataaagggtaaagccgggggggcctaaagagggacctaccccacattaatggggggggccccaccgccccttttcaagggggaaaacctgtggggccaagtgtattaaaaaatcgcccaacccccggggaaagggggtttggtttttgggccccaggggggttttttttttccccagggaaacgggcaaaagttgattgcccttccccccctggccctaaaaaagattaaaaaaggggccccccctggtttgccccaaaagggaaaaa

SEQ ID NO: 57765 - DNA, 380 bp, Zea mays
  Clone ID: MRT4577_152680C.1
gagagacatgatgaatgtgaatcaccgaaagaagtagaatctgagtctctttgttagataagaggaagcttgtgacactgtccacaatggtctatgttaaaggagtagtacgtatcgttgacgaccattgttatgtgatacatctaggcgttgacgggaacgtaacttacacaacccatttgttatacggttagcaatattggcacatgatgaccaaccatgtgagagacgctatgagggtgctaattgatatggcgcaacatgaccacctactcatagtactagtaaatgattctggtgcgtaacagaagattctggtacttcgaatagtgaatgccctcattctgtgacttatggagtgcaagatgacactgtcattc

SEQ ID NO: 57766 - DNA, 558 bp, Zea mays
  Clone ID: MRT4577_152681C.1
ggagggcccaaatgaagacgctgagcctaacggtagcgttaggagtcagctgatgaaaataaatttcgaaattttccaaaacttccccaatcatttcgttcaaaggaaatctcaatcccgctctgaagaaactcttgaaaaccaccacctcatcattttccggtgtcagaggggtttcttccccggcaaaacgaatcagctttttttcagcttctccgaagtatcctagctttatcataatgggcatatcagcctcagaaacagtagattctccaaagtccaagtggttgggtttggctggcatgaaagtgttataatcttcttcttcatcatcaacatcatcttcttcgacattagcctattcagctttggcagcaggtgcaccttcgtcagtagctccctctgttacaaccagtcccaattgtctcatcacttcagaaattggggcagtctctggctttggcagcaggtgcaccttcgtcagtagctccctctgctacaaccagtcccaattgtctcatcacttcagaaatggggcagtctctgtggcttcggtct

SEQ ID NO: 57767 - DNA, 180 bp, Zea mays
  Clone ID: MRT4577_152682C.1
atggcgttgaccagcgcgacggggcgacgaggcgacgaggctgcgcgcatgcatatgggagagaagagtgagccgatttgtaggagggtcgagtgggtgtgctggcgtttgaaggggcatcgagaacgggcagttgctgaggtccatgcgacgtgggcgcgaccgtgccaggctgagtag

SEQ ID NO: 57768 - DNA, 290 bp, Zea mays
  Clone ID: MRT4577_152683C.1
gccttctgcaaacaaaagaagatacataaagcaatggaatttgtggaactaatggtgtccaggggttgttacccagacatcgtttcatacaacactctacttacagcactctgccgcaatggggaagttgatgttgctattgaattgcttcatcaactcaaggacaaaggctgtagcccggtcttgattagttataacacggtcattgatggccttactaaggctggcaaaacaaaggaagcgttagaactgttggatgagatgaccagtaaagggctccaaccagatat

SEQ ID NO: 57769 - DNA, 222 bp, Zea mays
  Clone ID: MRT4577_152684C.1
cgatatcttatcccattatttctttacctaggcgcttgtctaagatcacatttttcaccagatcctctcccctagtatcttcagcacatgctcactgttctccccatccttgtccttcccatgttcattaattcatattgccccgcgcctagtcccattttcacttcctttgacgctcctagtagttttgttaagtcttaccctgtaatttttgcttttaat

SEQ ID NO: 57770 - DNA, 277 bp, Zea mays
  Clone ID: MRT4577_152685C.1
gattgacgcccccggtctttgcctctgagcgggagagtctgtgtgtatgtgtcttccccggaatccacaccaccccaccctcctcctgtcccgtggtttcatcatatctctttgcataccccatgtcttccccagttgtcccctggagtttggggggacatcccgcctcaggcatccttctcaaggggaagccaagagaggcatcaggatgggtgggtttctgattgtggcaacgtttgcaaccgttcacgattcaataaatattggatgaatttaa

SEQ ID NO: 57771 - DNA, 1106 bp, Zea mays
  unsure (1)..(1106): unsure at all n locations
  Clone ID: MRT4577_152686C.1
ttgccgggtccacccgcggatncgtcaggatgacctgaggcttgaaattgaaagattgaggtttaaattgcaacatcttcataagcttcatgaagtgctctgcatgagtcattagacaccacccaaaaactgcataaatcgggcgctcggcacattgaggatgaaatcaagctgaaagaaatccaactggcagaggacacggtaaggagactagtaagaaaacaggagatggaagaacgcgaagcagcgacagaagctgagttttatcaacgctccgatgaaatggaagcaaaacagagttatgatggtggggaagaagctggtgtccgcgaaatgggaaagaagattgctggtcgcggttttggcgagtataataggtacacgtgggaggagattcaggcatcgacttcaacgttctcttctgctcttatgatcggtaagggatcgtatggcacagtttacaaggcgaagcttcgtcatacagtagcagctgtcaaagtactgaactcccctgaaggctgtggaactcagcaactacagcaggagctcgaggtcctcggcaaaatccggcaccctcacctgctgatgatgctgggagcatgccctgaacacggctgcctggtctacgagtacatggaaaacggcagcctagacgacatgctgcaacgaaggaagcagaactcgtcgccgctggcctggttcgacggttcagggtgcctggaaggtggcggcggctctgatgttcctccacagctcaaagccagagcccatcatccaccgcgacctgaagcccgcgaacatactgctggacgggaacctggtgagcaagataggcgacgtaggcctgtcgaccctgctcccagtcccaggcacgggcggcggcggtcagaacgtgccgtcgacgatggtcaaggacaccgcccctgtcggcacgttctgctacatcgacccggagtaccagaggaccggtgtcctgtccatgaagtccgacgtctacgcgctgggcatcgtgctcctgcagctgctgacggcgaggccgccggtggggctcccgcacgccgtggagaccgcgctggagaagggccgattcgctgacgtcctggaca

SEQ ID NO: 57772 - DNA, 772 bp, Zea mays
  unsure (1)..(772): unsure at all n locations
  Clone ID: MRT4577_152687C.1
gcgaactggtccgtgcggaggtgttcttggaaggttctcccgcgtcagggagtagttggcgccatcgcccttaccttctttagctagctagctaagctaggacaaccgcccacgcgcatacatacacgagaaagagaaagagaaaggattcactcgtcctcctcacctacttcaccctctccgagcagttcgccatcgccgcgcccaacggtgcgtctcgtccgcctgaactctcacttgcttttccatgggttcactttttttttgttgaggacatttatttttgttctccttgttgcatgctttatcggggcaagcaagcatatgtgattcgcctcaaaagctgcgatttctttcggcccaaagaattgctgtgttagtattgtagtcctttatttgaacaacttttgaatgtttatgaacgcaagacttggtcaaagcatggacatgttcttccatgttcttggttatctcaatttaaggacatagtcaccaacctaaaactgaaactgatgagaatttggctacaaattgcagctatccggaggacctcggcggcacacccgacgccgaccgccccggccgtggcagagaagacggtgcagcagcagcagcttcccgtcaaaaaggaggaagcacctctgccagagcatgaacaagtacaagagaagccaccgcnctgtcgacgaggagccccacagggaaacagaggagcccaactcagaaacagaggaggaccccaagcccaccgatgacgctaccaagatcgtga

SEQ ID NO: 57773 - DNA, 460 bp, Zea mays
  Clone ID: MRT4577_152688C.1
ggggtaaaatttaattaattttttggttttttttagggaaccccttcccgttttgaggccccctttttcgattccttttattttttattttaaaaaatggcccccccaccattgggttgttgccacaccagggcagggttattaaaaaaaacctggttgtttggaaccatttgttgttgttgtagaaaggcaccacccattggtttaccccccgttggggatttaattaactgttgcccttgttgtaggtccccacaaaatttcaccccatccagttggttaattggaattattttttgcaagtaggcacaagggttggccccacttggttaattaaaacctgttccatttggttgaaccacctgtggttgcaccacctgttgttccaggtttttaggtcctttgcccttagcaagcggcttaaataaaaaaatttgttgttgttttaggtaggcaatag

SEQ ID NO: 57774 - DNA, 1326 bp, Zea mays
  Clone ID: MRT4577_152689C.1
atggccgaccgggtaaccgttgttctgctgtgcgacccgtggcctttctccaccgtcatggtggacgatctggaggcccttgttgccgatggcttgctccatcccctctctggtgacccgcagccagagtggatggtccctccgagtggggtcgccctgaccccgccgccggggtatgtgctgagtttcgtctccttccatgagcgggggttcggagtgccagcaagccgtttcatgcgggcgctcctgcaatattacggggtggagctgcacaatctcaaccccaactccatcgcgcaagcggccatcttcacggtggtttgcgaaggatttttggggattgacccccactgggatctatggacccatctcttctccgtggagccttttgccctgatgacgggggaaaagagggtccgcatggcggtgcgggccggtggctgcatcctccagttgaggcaggcacgcgcgcaacagtacatccccgccatccttgtgtcttcgaacaaggggtgcaactggcgctatggggctgcgcacgagaaacagaagaatctccagccccttctggaggccttgcaggagctacgagacggagggcttaccgccgcgggggtggtcgctgccatccatcgccggagggtgcttcccttgacagagcggtggttgctgctttcggagatgatgccgggggtcgacttggagggttcgcagatgtcctcggtccccctctccgccgatgacctccacaggtgggtagctggcacagtagggaggctggacgccggcgcccttacccagcccttgatgcgtcccgagcgcgggtgcatatccctggagttggggtgtcacaagccttccctgccaccggtcccggaggacgcggtggaccgagccacgcggagggtcgctgcggagaagaagaaggagaataaggacgcgaaaaaggctcgggctcgcgagcggatgcgggcttgggacaccttggagaggcgccatcggaggcaggagagggacgggctcccgagggagccgtcatcggagacgcctgacgacgacgatgacgatgatgatgacgaagacgacgatatggcggcccgccttggcctcagcctggatctaaggctgggccaggggtcgtcgagccagcccccgagtgggctggcgctgtcggtatctagggccgggacatcagggtcccggtccgaagaacatgggaaggctgagggggtacttgaccccttggctgaggtagttaaggtgaccccggggagtcaggccgacccgcctgtccccaagtgccgttgcccgttgaaagggaattag

SEQ ID NO: 57775 - DNA, 385 bp, Zea mays
  unsure (1)..(385): unsure at all n locations
  Clone ID: MRT4577_15268C.1
ttatttttgtncttttgaggtctgttttttttttttttaaacaaataaaatcgggagaccctttttaaagtaaggttcccttgcagggactatgtgaaccgccgggggaaaatttttttccttgggcctttttttccttaaccttgtgaatccgacccttggagctattcttaaaatcaaatgatgaaccccccccttgtcccaagggcgggatgattcttttaaaacggggcttcctttttgcttgattaaaacaacaggagttgttttcgtatcatttttgccctcaaagggcaaaaccaaaccccttttttccttttttaaactactttaccctactaggggttggatgaacaaggaaaaacagggttttgcacggcccccg

SEQ ID NO: 57776 - DNA, 657 bp, Zea mays
  unsure (1)..(657): unsure at all n locations
  Clone ID: MRT4577_152690C.1
ggtccgtgcggaggtgttctntggaaggttctcccgcgtcagggagtagttggcgccatcgcccttaccttctttagctagctagctaagctaggacaaccgcccacgcgcatacatacacgagaaagagaaagagaaaggattcactcgcgggaagaggaggaggaggaggaggaagagatagggtgagagagatcgatcgatgggggacgaccatggcgccaagctggtgaagagcctgcggggcgcggcgcagaaatacgtcggcgtggggttcttcctcggcttcttcctcgtcctcctcacctacttcaccctctccgagcagttcgccatcgccgcgcccaacgctatccggaggacctcggcggcacacccgacgccgaccgccccggccgtggcagagaagacggtgcagcagcagcagcttcccgtcaaaaaggaggaagcacctctgccagagcatgaacaagtacaagagaagccaccgcctgtcgacgaggagccccacagggaaacagaggagcccaactcagaaacagaggaggaccccaagcccaccgatgacgctaccaagatcgtgacgacggcggaggagagcgcgccggcgaagaaaccggcgtgcgacatccagggcccctgggcgtccgacgtctg

SEQ ID NO: 57777 - DNA, 658 bp, Zea mays
  Clone ID: MRT4577_152691C.1
ggccgggaaaaaaaacttcacccggccgggaaccatttggcaacgactgaccgactcgactatcaacgccgtcaccatgccgagccacaagtctttccgaaccaagcagaagcttgccaaggcgcagaagcagaaccgccctgtgccccagtggattcgcctccgaactggcaacaccatccgctacaacgccaagcgaaggcactggcgcaagacccgcatcggtatctaagctactcgttctcaaccgttgtccgcccccagcacccgactttctctctcttgggcatggtatcacgatgttaaaggaaaggatggattgatttgttatggcgtgaactatgggaccgtgttgttagcgtacgcgcgtgcacacggtgggggatgggccggatgcctggtttatcgattatcacggttactgcatgtcacggacggtcatagggaaaaaggaatgcaaagatatgatgcccccaaaaagaaacgggcctgaactacacggatgctgtccacttgacccgtgaaccgcaaagcaaacgatgctatgtgccgtcttgttgagcggctgaccgtacacttcaagatgcaccacgcactcttaaaatagccgaatcaactcacgtcacgcctgaaaaaaaaaaaaaaaaaacccgcggcc

SEQ ID NO: 57778 - DNA, 312 bp, Zea mays
  Clone ID: MRT4577_152692C.1
tctaaagtgactcgtggtaagtacaaggccggttacgttttgcaaggacttgaaggacaacaacctcgtcacgcccttctccgacaacaattacttgccaaggggctgcaacttcgaaggaaaactcctccccgcaagcaaaaccccaaaaaggacttgtccgtaaccaggcaagaacaatcaaaaccaccccgttgaggtggtgttgacgccggactccgacgagagctcgccgaagccgccgccgcacgcggaccaggactcgcccggaggctgcgagtcggggcgccgcagcacggtgccgttcaaggt

SEQ ID NO: 57779 - DNA, 275 bp, Zea mays
  Clone ID: MRT4577_152693C.1
ccaggcgcaggggatccgttcccacccatctcgcccagccccgaagagcagctccagccttcggagtgccacaccttctctgaccccacctgccccggagcccctgcggtgctgcactttcctctggtcagcgactccttccgggagtactcggcccctggtgtccggcggacacccgaggaggcggcagctggggatgtgaacctgtcttcatcggactctccctagcactacacgaaggtgacctacagccaggaggacgtggacaagctgct

SEQ ID NO: 57780 - DNA, 391 bp, Zea mays
  Clone ID: MRT4577_152694C.1
aaacgccatatcggtcaatttcttgttttctgcagcggcaccaatggggggggtgagcgaggatcaatccgtgcgcgaggtcgactccacggagaccaacgctatgtccctcaagctcacacaccgagctctctccgacatgtcccgcctgagcagcttcaagaacctgtagcacctctacctcagcttaaactgcctcgtcaccctaaaaggtatgctcttctgagcccatcagaagcggctgtcaggtcaagaaaacatgcttgtgagcttaaaaggcgttgaggggctctcaaagctgcaagtactgaatgctggcctgaacgaacttaccaaaacggacgacgtcacatcttatacaagacctggagcattgagtcttaatgataac

SEQ ID NO: 57781 - DNA, 389 bp, Zea mays
  Clone ID: MRT4577_152695C.1
ctggaaggagactccagaggcgcacgtgttcaaggcagacgtaccggggctgaagaaggaggaggtcaaggtggaggtcgaggacggcaacgtccttcagatcagcggcgagcgcaacaaggagcaggaggagaagacggaacctgcgcaggaatctcccgcccacgcgtccgctcctcgcggaccccgaaggccgccgtgcctcccgccccgcccctcgccggcgaccatcggccgccggcgacgcccggcatgccgcccgcccgcttcgtccacctcatcctcctcgcgacgctctcgctcctcctcgcgcagaccctggcctcctcgtcccccgcgcccgcctccaacgccacggcgggggagcccggcgacccctgcgcggccgc

SEQ ID NO: 57782 - DNA, 458 bp, Zea mays
  Clone ID: MRT4577_152696C.1
ccccaaacagggggggcaaaaaaaaatggcccccgggggggggggcgggaaacgggggcccccccaaaaaaggcaaaacagggggcggggaaaaatactttgtttttgttatttcccggggcaaaataaaaccccacccggggggcaaagaatttgcaggggggggcaaaccccccgggattttgggggaaccggctcctgggtaaaaggaggcgagggggggcccttggaggaaggggggggggggttctggaccccatcccgggggcggttccggaaaaaaggggccccccccgggggggggggaaatcttaaggcccggaataaaattgccaaggggccccttgcaaaggggggtttcaaacccgggaaactgaagaaaaaagcccttttttccaataacaaaaagcaccggggcggggaattgggggccaagccgtgggggaattttgggaaaa

SEQ ID NO: 57783 - DNA, 954 bp, Zea mays
  unsure (1)..(954): unsure at all n locations
  Clone ID: MRT4577_152697C.1
tgcatattcagaaaacgtgggttttctttgtccgaaggtcaacgctgtggaagacgtcaaagaatataatcactaggagaacttttgcgtgttcgagaggggtttcggaagaagaagaagggagcaaatgaagcaaagtgtccacatcttgaaacacgaattggatgccccgcaagcttgaccattagactcactgctaatggcaagtgccatttgatagagtttgtgccgaatcataaccatcaactggcaatagcctctacaattcatatgctgaaagcgaagaaaatcaggcacaaagcacgggttgtgagagaaaatctgacagatgataccgtgagtacaccagattttgagaatgaagatgaggcatatgaattttatagtatgtatgcagggaaaattgggtttatcgtgcgtacggctggcatgacagtgaataatgagaatgttataaccacaagaatgcttgtttgttcaaaagaacggttccgtgagaagaaaacaggagcaaaaagagtaaagaaacctcgacaggaaatgtgaactggttgtctagcatgtatggtcatcaggcttggaactaacgggaaatatcgagtcacagaacttgttaccttccacaatcactagcttggagctgaagcagcttctgatcttgtcatggcatctgggagtacagaaaatgatcaagatagatcacacgatgattctgtttacaagcaaaatctgattaatggaagttgcactctgaattccctagaaggtacaagttgaaaaagatacaagtgtgcaaatactccacgctcaggtgatgttggtgctacactagagtacttgcaanaagtgcagcatgataacccttncgttctctatgctgtaaaatctgatgatgatgggaactttcatattnttatgggcacattcaaaatctattatggactttttccattt

SEQ ID NO: 57784 - DNA, 127 bp, Zea mays
  Clone ID: MRT4577_152698C.1
gcagcttcgccggctgtggcagcggctgcaaacagttaccaccaagtccgccagcgctgccactttgtccgtactttggcggtatcatcatcgtccaacacgctgctgcggagtgacttcgatctcc

SEQ ID NO: 57785 - DNA, 305 bp, Zea mays
  Clone ID: MRT4577_152699C.1
cttcaaaaaaaaaggggctttaaggcaaaaaccagggggtgaatgaccccttccagggcacctcttttgcgttcgaaccgtggtttgttaacaccgatctggggaccccggtataaggccggggatttaccatcgaccaagtaacggtgatcacaaggatgcgcggcacttaagggggggacaaatgtgtgcccgccgcaccatctgggggtacctggctcccctctggggaccccacatatggcggtggggaaatttgctgaggttgccactgcagcagccgatgctacagggggggtattttg

SEQ ID NO: 57786 - DNA, 206 bp, Zea mays
  Clone ID: MRT4577_15269C.1
agtgagcatctgaagattttttacacttagtacttccaggtgaaggcacgttttgctgatggagagcgaactactaggaacgtgctatgagaggtacttgagccatgaggcagactacatcggtaccaaacacagtagcaaggctgccggtacgggaggcgcatctgatgcacgaggaaacaccacattgggcatcaacttaacta

SEQ ID NO: 57787 - DNA, 469 bp, Zea mays
  unsure (1)..(469): unsure at all n locations
  Clone ID: MRT4577_1526C.1
tcgnacccacgncgntccncttccaancactgcagaaccgtttggcgcttgctttgctttgctctgctgtagtaaccagaacacgcaccgcgaaaacaggcaccgtgtttccttcttgtcctcgacacaggcacaggcagggaagtcgcgcgatcgatggacgtggaggcggcggcgtcgggacggtggtgcacgtggaacctcgcggcggtggccgcgtgggtgcgtgtctgctcctggtgcacgtggnggcgcgggtggcggacgcgctctggtggcgcccgcgccggctggaggcgcacttcgcgcgacagggcgtgcgggggccaccgtaccgcttcctcctgggctgcgtcagggagatggtcgcgctcatggcggaggccgccgcgaaacccatgtcaccgccggactcgcacgacgcgctcccgcgggtgctcgggtnctaccactactggaggaagattac

SEQ ID NO: 57788 - DNA, 856 bp, Zea mays
  unsure (1)..(856): unsure at all n locations
  Clone ID: MRT4577_152700C.1
gcctcctccatccaccacaccagtccgtcgttaaagctgcggcatcggcagcacacgccgacgggtacaaggagcactcattgcctccccatctcgtgtaggctctccccctcctccgcgctccgtccgtctctcatcaccgttccgccgccgccccacctctccctcctctcgccgccgcctccgaacccgccacggcgcggcggagatccaaccggacggatctggatcgacctactccgacaccgggccccccgatcacgagcatggacagaactgccaataatgcggtattggatatcgagagccttcctcaaccgcctgataaatgctgctctgggagtccgaagatgatcagggccttgtcgcgtaagggttcgaaccggatggagaggaggggcggcggcggcggcgagcaggaggaagaggatttggccagaaaacttatcatcaaagttgtgccatctcagctggagcagcagcgggccctggttcactgcactccctgcgcgcctgtcctcctcattgactccgcggaaggaaggagcagcaggaggtttggccggttcatcacgcccgtcgtcaaccctcggaggattctgctcttattcgcgacgctgtaaagtcgagcgtggggacgacgatactgatctacttcacgctggcgatcaacagcagagcagaggcctagtcgtctgaaagccacaaccacagacgccgccgccaagccatttgtgtcgcgggcgtcgacagcagtacatgcatgtagtattcgtgagcgagtgagacgatggatgaggggggggagttgtacccccttcttcctcgcgtgtatgtatatcggttgctctccnna

SEQ ID NO: 57789 - DNA, 1188 bp, Zea mays
  Clone ID: MRT4577_152701C.1
gacggccgaaaaaaaacggcgtcgccgcactgtttcctagtaaaagacgcccactctttggctcctcgcctccctcctcccctccgtctcatctcctccctgtaggctgtaggagcattcgtgtgttcaccttttgctcccccacgttgatccttgaccctcgtactcctttcttgattccttctccgtgggatctcttgccaggagtaacctgccccgtgtccgcgctcgcactcgcacagacatgcttcttgccgcgtcttgaaaggggagaaagtgaagatgggtgcttgcgcttcagttcacaaggacccggggtaccccaaggagcagtttcttgactcgcccaccaaggcggaagctgcaaacgagaagggcggctgcggcggcggtgacgatgactttgctgatttcaagtccaaggtcgacgctgagcagcagcgggcagagttgaaccccaagagcccggattctggtagcaaggatgaagtgttcttcgaatctcgagcttggttagattccgactgcgaggatgacttctacagcgtgaatggagatttcactccatctcgtggcagcacacccatccatcagcccagagcgcagacggtgatgagcaacatctttcaaccagacacgcacggttccaaatcaccggagccttctccaactggacggaggaagctagctgagctcctgcaggaggcaatgcaaaacggccccgaagaaagcaccgaccaggagctgcagttgcggtctgttgccgcagatgggaagccggtgtctgaatccacatccagctccgcttgcagcactgtgacgactccgatcgcagtcgctaacgccaagagccggaaggagaaggcgtggtacaccggacgctgttgcctgccgagctttgttcatagcctgaccttagatgagagtgagagggcgcagaagatgagctctaggccatgtgctgtttgacagtggggctccagtgccctcacggctcatgccctgagctatactgtaaaggagaagtattaagagtactgtatgtatagagagagggtaatcaagtggataatagctactagttaaatgctctgcacaccatgtttatcaattgcccttacctgtgtatatatatctaatcgaatctcaaatgtcaacagccagctgagctgtcctcttggcacttgc

SEQ ID NO: 57790 - DNA, 1050 bp, Zea mays
  Clone ID: MRT4577_152702C.1
gcttcttccccaggggcatccgtgttttcacttttttgctcccccacgttgaaccttgatcctcgtgctccctttcttgattctttctccgtaggatctcttgctaggagtagcctgccccgtgtgcgcgctcgcacggacatgcttgtttccgcgtcttgaaaggcgagaaaaagtggagatgggcgcttgcgcttcggtacacaaggacccggggcaccccaagaagcagtttcttgactcgcccaccaaggcgaaggccgccaacgggaagggtggcgggggcggcggtgttgctccggttggtgatggcttcggtgatctcaagtccaaggtcgacgctgaggctgagcagctgcgggcagagtttaaccccaagaacccggattctggtagcaaggatgaagtgttcttcgaatctcgagcctggttagattccgactgcgaggatgacttctacagcgtgaatggagatttcactccgtctcgtggcagcacacccgtctaccagcccagagcgcagacggtgatgagcagcatctttcagccagacacgcgcagttccaaatcaccggagccttctccgaccggacggaggaagctcgctgagctgctgcaggaggcaatgcaagacggtcccgaagaaagcgccgacgaggaggagcagcagcagcagtcgcgatctgctgccgctgatgggaagccgccggtgtctgagtccacgtccagctccgcttgcagcaccgtgccgactccggtcgcagtcgccaagagccggaaggagaaggcgtggtacaccggacgctgttgcctgccgagctttgttcatagcctgaccttagacgagagtgagagggggcagaagatgagctctaggccatgtgctgtttccccccgggctccagtgccctcctgagtcctgccatgagctgtatttagcgcgatatgttatctgaatgcccgattgggacgctgaagctactgtattgagagtactatatagtaatcaagtggataataggcactcgttaaatccaaaaaacccccccc

SEQ ID NO: 57791 - DNA, 212 bp, Zea mays
  unsure (1)..(212): unsure at all n locations
  Clone ID: MRT4577_152703C.1
gtnatcaaactgaaagggttgggcgtctgggttacctaaagggtttttttaaaaaggttttttaggccgggtttggaacacaagaatttcaagggggtcccatataaaattcacggaaatccactcaaatttttttgggcgtgaaaaaccccggaaccgaggggaaaaatcgggttccaaacaggccctcagggggtactaaaggaagcttc

SEQ ID NO: 57792 - DNA, 778 bp, Zea mays
  unsure (1)..(778): unsure at all n locations
  Clone ID: MRT4577_152704C.1
actcctatgggcgattgggactctcgaggccggccaggtagctgaaattcgtcaaacacgtatgcaaagattactgttttcatgaagaagaactttatatggaacttaatttgcaggtagcaaggatgaagtgttcttcgaatctcgagcctggttagattccgactgcgaggatgacttctacagcgtgaatggagatttcactccgtctcgtggcagcacacccgtctaccagcccagagcgcagacggtgatgagcagcatctttcagccagacacgcgcagttccaaatcaccggagccttctccgaccggacggaggaagctcgccgaattgctgcaggaggcaatgcaagacggtcccgaagaaagcggcgacgaggagcagcagtcgcgatctgctgccgctgatgggaagccgccggtgtctgagtccacgtccagctccgcttgcagcaccgtgccgactccggtcgcagtcgccaagagccggaaggagaaggcgtggtacaccggacgctgttgcctgccgagctttgttcatagcctgaccttagacgagggtgagagggggcagaagatgagctctaggccatgtgctgtttgacggtggggctccagtggcctcctgagtcctgccctgagctgtatttagcgcgatatgttatctgaatgcccgattgngacgctgaagctactgtattgagagtactatatagtaatcaagtggataataggcactcgtccaaaaaaaaaaaaaaaagcggccctcgagctc

SEQ ID NO: 57793 - DNA, 1428 bp, Zea mays
  Clone ID: MRT4577_152705C.1
tgagaaaacagagaaatattatgagtcgccaatagtttttgtgctcggctgtttcagaattaatagcccccaacattttttgattccacgcccgtttctaaaaagggagagtatggccgccgcagcgtcggggtactgttcccagtaaagacggccactccttccctccccccttctcccctccgtcttcttcccccaggggcatccgtgttttcactttttgctcccccacgttgaaccttgatcctcgtgctccctttcttgattctttctccgtaggatctcttgctaggagtagcctgccccgtgtgcgcgctcgcacggacatgcttgtttccgcgtcttgaaaggcgagaaaaagtggagatgggtgcttgcgcttcggtacacaaggacccggggcaccccaagaagcagtttcttgactcgcccaccaaggcgaaggccgccaacgggaagggtggcgggggcggcggtgttgctccggttggtgatggcttcggtgatctcaagtccaaggtcgacgctgaggctgagcagctgcgggcagagtttaaccccaagaacccggattctggtagcaaggatgaagtgttcttcgaatctcgagcctggttagattccgactgcgaggatgacttctacagcgtgaatggagatttcactccgtctcgtggcagcacacccgtctaccagcccagagcgcagacggtgatgagcagcatctttcagccagacacgcgcagttccaaatcaccggagccttctccgactggacggaggaagctcgctgagctgctgcaggaggcaatgcaagacggtcccgaagaaagcgccgacgagcagcagcagcagcagcagtcgcgatctgctggtgctgccgctgatgggaagccgccggtgtctgagtccacgtccagctccgcttgcagcaccgtgccaactccggtcgcagtcgccaagagccggaaggagaaggcgtggtacaccggacgctgttgcctgccgagctttgttcatagcctgaccttagacgagagtgagagggggcagaagatgagctctaggccatgtgctgtttgacggtggggctccagtgccctcctgagtcctgccctgagctgtatttagcgcgatatgttatctgaatgcccgattgggacgctgaagctactgtattgagatttgagagtactatatagtaatcaagtggataataggcactcgttaaatcctgtggagaccatgtgtatgtgtcgaccaatttgcgcgggtagagcatctacctcaaggaattgcccttccctgtgcatgtctaactgaatctttgaataaataaacacactgtataatttttcagaaaacaaaaaaaaaaaaaaaaaaccggcgcgtggcaattgcccttacctgtgtatatatttctaatcg

SEQ ID NO: 57794 - DNA, 526 bp, Zea mays
  Clone ID: MRT4577_152706C.1
gtgctgccgatcgacacgagccggtcgccgtacctgcggtcgccgggcccggcggggacgctccacaacctcgagtgctacctgcacggcgtggccggcgagcagggcagcgccgccggagggttcaggctggaggtggaccgcgacgtggcgctggtgaacaagggcgccgacgcgctcagggacgagtacccggtgcccgcgaactggtgggtgccagagaacaggtggatggtcaggggctccgacggccactgggtgctcaaggacttcgaggaaatctaaatcgtatgcatgcatgccaagcttaacttgagaaaatgggcacatattcaacaccgatgacattttatttccaaccctgatggactttagttcattacgatagatgatcctgagcaatttggctatattcacgcaccctgtatggcaatatatatatagatagatgtttgtttgcacgacgagaggcatgaagttcaaactctgcgatgatgtgaattccagcaaaacctttgaaaagaaa

SEQ ID NO: 57795 - DNA, 1728 bp, Zea mays
  Clone ID: MRT4577_152707C.1
atatggaacttaatttgcaggtagcaaggatgaagtgttcttcgaatctcgagcctggttagattccgactgcgaggatgacttctacagcgtgaatggaggtaatcaaacctttaaacacatgtttatttactataaatgtttaaagaagttctattctagttttagagatagcttcttataccctggccctgcaaaactgagattactttggcaccagttagtgctcaagttgatcgtgccatttcctttttttttaggttctcctattattataccagaaacatgtgcagcgtggattgttccacttgttacgcacaagatgcatgtgctgtgctaggttccttgatgacacagctttatctgtctctagaatctaagggcgtcagcaatggctgtctcagatagttagttgatgtggagcttagagaagaataaaaatagtaatttatctcaccactagtatatggtcctacacttaatacactcagttttttgaaatacgtgaaatctcctatctatttactcgtcactagctattttcgttttctccacattttctatccacgtagtaaagagagtgaatctaactagtgaaatagctagccattggggacaccctaagactatctctaacaaattagccaaatggctcgtcaagccaaattttagctactcaacagcaaaataactctgcaacatactagctatctgactcgtcaagctatttgactctccaaattgacttactcactagtcaaatttggctagccacctgaatagtaaaactagatagattagatagtctgttagagtgagatgctacatttagattgtatttttttatgaaaaggtaaatagagagttaaacagagggaaaaaaataaagagtctcttggagatgcttacctaattttcgctctgattgcctatcgaaacaaaaagtcgatgccttcgattttgtctttgggcgctatcattatggacatggaccccccacctttagcatgtggtcctctatcaatcagtctagcaatatcccggaaacattaacacgttcatttatggactttgacattctcaaggaagttctgatgcacccaagtttattaatgtgttttgcttcagttgctgcataaccataggtcgtgctctttatgcagatttcactccgtctcgtggcagcacacccgtctaccagcccagagcgcagacggtgatgagcagcatctttcagccagacacgcgcagttccaaatcaccggagccttctccgaccggacggaggaagctcgctgagctgctgcaggaggcaatgcaagacggtcccgaagaaagcgccgacgaggaggagcagcagcagcagtcgctatctgctgccgctgatgggaagccgccggtgtctgagtccacgtccagctccgcttgcagcaccgtgccgactccggtcgcagtcgccaagagccggaaggagaaggcgtggtacaccggacgctgttgcctgccgagctttgttcatagcctgaccttagacgagagtgagagggggcagaagatgagctctaggccatgtgctgtttgactgtggggctccagtgccctcctgagtcctgccctgagctgtatttagcgcgatatgttatctgaatgcccgattgggacgctgaagctactgtattgagatttgagagtactatatagtaatcaagtggataataggcactcgtt

SEQ ID NO: 57796 - DNA, 480 bp, Zea mays
  Clone ID: MRT4577_152708C.1
ttttttttttttttttttttttttttttttttttttttttttttttttttgggaaaaacttttatttttttcaatacccccactttttttcaaaattcaaaaaatacttaagtttttgggcccctttaaatgccgttgcaatgactcttccctccattgatcaaaaagagtttttatcccccaccattttttgtttttcaagcaccttgcgctggcaaccacgtttttggaccttgtaattccctttggggacattcaaggcttgcacttggctgtctgaaaccaaacctggcttacgagttgtcacctgaaccagctcttaaaaaccctgatgtcttctttgggtggttattgccccctcccttgcactaaatgactttcacttttccaattaaatgaaaggcccacggcggccggtttggcccccattggaagatcgataccttttctttgacaacaccccaacttttccttttttat

SEQ ID NO: 57797 - DNA, 317 bp, Zea mays
  Clone ID: MRT4577_152709C.1
tacgtaagctcggaattcggctcgagcccaatcgaggagctcacgatattgcacccgcccaccttctcttccacggggggtcttttgaaaaaggttggcgggaaaacaacagaccccatcacgggggagagcgaatcaaccgcaacctgacaaaggaagcgttccaataagaccactccaaaaggaccttccaaccagcgaaccgcctcagaagcaatactcgatcgacggagcgcaagcatgaaaaatgcgaccttgcggactctatcaacgccccttaaaaggagaactgcttctacctacaaataggacggcct

SEQ ID NO: 57798 - DNA, 2333 bp, Zea mays
  Clone ID: MRT4577_15270C.1
gtggaactgtggaaaaagaaagatattactgggatctgaccacaaatggcaaaatatgcaacctggatggagcaaagagagcaagttagttggtgtaaatgctatgcttgtccgtgttgttaagctgctcaagaacccccacttcatggcgaagcccgctgcgattgacttgataagaagcattattcagactggaggtgcttccacagagcaggcattatcatcagctctaacaagtattatggatgcactgaagagtactgactagaatacaaggaaggctgcctcattagctctttcaagtagtgcggtcagttctgggtatttggccacctcttccgaaacttcctgacttcgctcccttgagcgtagtaaatttgacaagctgtggaaagctattccagggtctcatactcctgaaccatcagaagctggatcatcaacaaaagagaactactttggagaccatcatgacgctagaagtatacatgatggaggatcaagagatacttcttttaggagaacaaatcatgggccttctgtatttgttatcagtggtagttctctcagttcagcaaagcagatgtctcctttatctattaacaaagtagccataaacaatgctgcaaatttgcaacaaatgaagactggtgattggcgtgttgaggtgtcagttccaaagcagagtatgatactgctggttgataatgacgagaaggggtccattaaagtctgcagcctaaaagatacaaagagaaatgcatatgaaagtgttgatgttgacagtaagtttgactatgacattgtagatgataaacaagaatgctcctctgtgtcagaagtagccagcaggagttttgagacaaagcatgtcactactgctcaggaatgcactgaagattgtgattcagcagaagttacagaacaatgtcccaggggtcgagaaagtaagagcataggctcaacaattacagatgttactactcatgacacacatagttgttgtctgaatactatgaatgaattggcccttgttaggaagcaacttcaagagatggagaggaagcaagcaaattttttgatttgttgcaggaatttatggccagctcagcagagaacatgtcagtgctaaatttgaaggtgcacaacttggagaatgctgcagacaaaactgtatatacaattactcagagcgaaagccggtatcatcttcctggctccaagcattttaagaaccaaagcgtctcttctttgcctaggctttcgacttctacacctagatcatctatggatgttaactacaagccaccaccaaactcagagttgaaacatgagaagtggatgcgtgatctaccatctcggggctcaaacatgtgttgtaaagagggagctgattttcgaaaggatcatgttcgcagtaaagttaggaagcttgggcctgtgagcttagaggataacttgggaagatgtgatccaagcccagcaagaagtcgaacatcaggggttaaagggacttatccagtttcatttaccagtgagtgtgaacaatctggactgcgaaatgcattgtgcacctcaaatcaacctggtgagtttcaagatactgatggcatggaacctgcatacatggaagccctgaactgtggtgattatgatgatctgattgacctaatggatagaactggaccatgtctcggtcgggtgtcgcgtgggacgacaaatgagcttttgagggttatagctgaacaatttcttaataagaagttctttgacttggcactgccttggcttcaacagttagcagatttaagcacgatttataagccaactcaactttttgcatctgtgagagcacaaaaggagttcctttctgcattggaggaagctgcaacgggtggatctatggaaccagccttgaggattgcaattgcacagctcggatttaaactatccaaagcttttgaggttggcccatgcaggaaaatctcagccagaatgtgcagagaaaatgaaactatcatgaccaatgcaatgtgagatgtttcttgtctagtatatgctcaggccacgaaaacagtgctttagggagcttaagttaatttcttgtagcagcacaacctttgtaacttgtcgtatgatctgtttaattagcgtgtgaaaggctagaagatttcaatagaggttgatagtttggtagtttaaaacatgcgtgctttggttctctactgtaggactggaaacttttgctgtgtagcaatgtggcatgacttatgtttggtgctttcagacggggccgtacagatttttgcttgaattaaagaagtcaacacgtc

SEQ ID NO: 57799 - DNA, 316 bp, Zea mays
  Clone ID: MRT4577_152710C.1
atgatatttctttctctcctccattttcatggttttgttttcaaattagggtttgggtgttgtgggcacattaatacattgctattgatacttttatttttattatccacaaatgcacaatcaaataaactccagcatgatgcataagttatttatgtgttctttattttcattatccacttttgaactagggttgatcacatgtaatgataagtagaggtcacaaattattgagattatctcaattcttattattactcttttgagtattacacatatattcggcgttagttctactgagtctgagtctaaaccc

SEQ ID NO: 57800 - DNA, 257 bp, Zea mays
  Clone ID: MRT4577_152711C.1
gaaggacaggtgagctcattgcacgcagtgtgattggttcatacactggacaggggctcgtgcaaagaaagatcatactctttctttgagcgcttgccatagcccaactagcatctgatatgagttgactataactgctgaacgaagtacaagccccgaaagtaatcatctaacactgctaccacaaggggcaacactttatggtgataaagtgctgagatcatagctgatgagatgtatcatgaattatacgagcg

SEQ ID NO: 57801 - DNA, 370 bp, Zea mays
  Clone ID: MRT4577_152712C.1
attcggctcgaggcttcaccgactgatgggtttttaacgaccgcgaagactgcgctccaggaggagggtgctaatcactctggctgatccagtctctctatcatggaccacggatggtactgccttacaaagtattgccgttctatgcttaacgagtcggacctaagctggaattttggtccaagtgcatgctcactgccaaaaactatagtgcggcctcataagagttcatcatcattaactgaggagtttgaatgtaaaaaagctctgcttctcccagcggcaaataatggtacaaaagctatgctatctgcagatgctaacaaaaagcaagggggtgggaaaactaccgcaagctatctccccagaa

SEQ ID NO: 57802 - DNA, 387 bp, Zea mays
  Clone ID: MRT4577_152713C.1
atacaaaccaaattagaaataaatcgaactttataaattccgaggggggccggttggacaaccccgcacaaggaaaatcaaagcaataaacaacgctctacggggtgcataaaaaaaaaatataaaccgccaattggtggttaaaataaacttaatgggaggcccctttattgcacttaaaaaggacaaacctgaactaaaataaaaccaaattaggccggaaaagcctaccaatggccaagtaagtttttatcaaagttctgggaaaacggacccaaaacggcccaccagggccggccgggggtctataacaaaatacaaacgggcgcctggaacaacccaacaattcccgacccggacccgcagaccaactaaatttacctatag

SEQ ID NO: 57803 - DNA, 485 bp, Zea mays
  Clone ID: MRT4577_152714C.1
aaaacggaaaacagattttccgggggggccctttattaaaggggcccccaacgggggccgggcgggcaaggggccccagggctgggcgggtttactaaggcagggggagcaggccggccttatgggccgggaaaaaaagctaaggctgggttaaacaccccagcccgccggatttttccccaaaaaacccccccttgctgggggagggcaaaacggccccccccccccaggcatgacccaggggccatagaggaaaccaccgcgggggcccccccgggggggggggacccccaggggggggcgacccaaagacttggctagcaaaaacattaccccccgaaaaggggcgggggtccaaaaccatcccggggccggggttaaaaaaggggccctctttgcgaaacacccagcgctcgaaagaagaaccccccccggcgaagagtttcaccgccacccccccgctgggataaacagccaggccctgc

SEQ ID NO: 57804 - DNA, 553 bp, Zea mays
  Clone ID: MRT4577_152715C.1
gtggccaaccagaaataagaagttacatttccagattctaatgtgatattggtctccaagggtgttcgataattacttttgctaaaaaaaaaaaaaaaaaaaaaaaaaaaaaaaaaaaaaaaaaaaaaaaaaggttttacctcccgccggcgcccgctaaaaaagggcgaattgctgcaaatatccacaacactgggggggcctctagcattcttataagagagcccaattccccctatatggagtgttataacaaactactggccgctgtttaacaccgtgacaactaagaaaaccccgtggctacccaaattaaactcgttgaacaacatacccctttcaccagatggggtaataaagaaaagacccccaccgatagcccttttcaaaaattgggcccccctaatggggaatggacaccccctgtagcgcggcattaaaagcggggggggtggtggttactcacagagcgaccgctctactttccaccgccctatagccccctccttttggtttcttccccctctttttcgccacattcgccgggtttccc

SEQ ID NO: 57805 - DNA, 382 bp, Zea mays
  Clone ID: MRT4577_152716C.1
tgagcgtttttttttttttttttttttttttttttttttttttttttttttactataaaagggtcctctctacctttatacttggctttgttctgtacaactcacgacgaaatcagtttccgatcccgtcccggttttcaaaaaaataactcgaaccgggaaaggaacccaatcattaaagacgaaaagcagtcaaaacaaaaacaaatgtacaacattcgtgcgccatatactatacatggatgacacggtcgccggtcgtcggtgctggcgcggaccccggcgtttgccgttgttcgtagtgccggtggatcttattcaccagccaccgggctttcttgcccgcctgcggggtgccgtcggtgatcaccgggtacagcgc

SEQ ID NO: 57806 - DNA, 617 bp, Zea mays
  Clone ID: MRT4577_152717C.1
attgtctatcatctatggtaacaacaatgaaacttgtaatagatgagagtgaagaaatacagacagcgcttgcatcgtatcttcttcaaaaggctagaaatgaggagagggaaacgtctccagcatcttttgaacttgcagagaaggtgatcagctcatgtgaagatgggaagctcaaaccaatattcctgcagttacttaaagttcaaggcactcccttggatgaatacagcaaaattgtcacgctggtttgtgaaggtgataaggttgtcagggaagacaacaatgttgatccttctgggaaggacacggtggatgatggcaaactttcggaaaggactatttctgatgaactgcctcacgaatcttcaaaactggagcaagatggtactccaactactgctattagtagtggtgcaactctggttgataatggtgaggctaatcaaggaccagtgtctccaaaaggaccagcgtctccaaaaggaccagcgtctccaaaaggaccagcgtctccaaagggatcagcgtcaccaaaaggaccagcatcaccaaaagagaagcctgaacagcctgaagacacaaaagatgctgatcagttgaaatctgctaatgat

SEQ ID NO: 57807 - DNA, 429 bp, Zea mays
  Clone ID: MRT4577_152718C.1
gaaaaaagagtgggagaaatccccccccaccccctataccaggcaaagtaaacagcctccccaaccaaaaaaacctgggatcggaagggcccaaatcaaaaaaagggcctggaacccccccccccttggcccccatggccatgaggcccccccccacccgcggggggggcttaaaccccagctgcagcttgccccgggtttcaacccaggggttcaccaaggccccgggaaacaggcccccctgcgccttgtacaccaggaccccccccctcacccaatggagcacgccccacacaaaccacacccggggggggggcccctccgccccccaaagaaaacccaacccccaccaaaatacccaccgggggtatacggggaaaaaaaaagacccattttccccacccccccccacttggactaggccaaaaa

SEQ ID NO: 57808 - DNA, 514 bp, Zea mays
  Clone ID: MRT4577_152719C.1
ggggcccaaaccccttttatctttggggggaaaaaaaggggcacccaggcctaacccacaacagcccaaaccaacctaaagttgggggaaaaaaaacaccccgaaccaaaacccgcaaaagggttttccccaaaaaaaaccccccctgggggcaaaaaaaaacattgggggcccaaactaccccctagggggaaggcttaccccaaaaaaaaaaaatttttgggtaaaaaaaaaaaaaatggcctaggtcccaaaaacagggatcaataagcgggaaaaaccgggggaaaaagaggtttcggaacaaaaccaaaaaaaaaacccccccggggcgaagggaatttttgtttgggcccggaccaaaaaaaaaaaggggggaaacccccctaaccgggagggttttggaaaaaacaaattcataatgggggccccccttcaaaaacaggggatgggcccaaaaccaaactgaaagcaacggccgaggaacaaaaaaatttggaatccaaggaaccgg

SEQ ID NO: 57809 - DNA, 176 bp, Zea mays
  Clone ID: MRT4577_15271C.1
caagccaaaaccaagattacaaaggggccggaacgatgatgtaggccaccgggtggcgctcaatactgctgggttgtggccctgggccactaactaatcagggcccagcgcgacggtcctgcagcgggtacatacattaagggccttggatagccgaataacaaacgctaaaccac

SEQ ID NO: 57810 - DNA, 679 bp, Zea mays
  unsure (1)..(679): unsure at all n locations
  Clone ID: MRT4577_152720C.1
cattgggaccctcgaggccggccgggaaaaaaaaaaacccggaaacaatgccccgtcttcctctgctctctctcccctctccctctccctctctcctcctttcgtctccttctcgcgtaagccttgccttgccctgccctcaaaatccctcacaaaatcatcacctccacccgccgcctctcccccaattctccccggcggcgcgccctccccgaggcaactcgaccgtgcggcggcggcgctccggctaatgcgcgtgctcccctgagcctttcctggtgattttgtgttatccgtgcgtcacacgtaactctgggtgccgtagtgttggtgaaactacctgcattgtgtgatcgagtttggcttcgtggactcttctggtactgatatggacgaagccccgggtaatcaggacaatctgccattccttggcaacttcactggagccatgttttatggggaacaatctgcagggtgttcttctctcgaggcagggtgggttcctatgagtgaaaggatccctgctcagcatgatatagcaatggcgcgaggtaactgggatggtctgggcatcatggacaatgccaattttgttgatgagcaggcattggtatctgcatttggtaacatgggattgagcctcactggtaatgccgctgctgnatcttctgctcactct

SEQ ID NO: 57811 - DNA, 635 bp, Zea mays
  Clone ID: MRT4577_152721C.1
cgctgccgcacttctacccggacggggacttccagatcgcgtgcgaccacttcacgggcgacccgagcgacctgaacaacgcgcccaacggcgggttcgcgtacgtgcggtccagcgcggagacggccgagttctacaggttctggtacgcggcgcgggagcgccacccggggctgcacgaccaggacgtgctcaacgccatcaagcgcgacccctacgtgggcgagctcggcgtccggatcaggttcctcagcaccgagctcttcggcggcctctgcgagcccagccggaacctgagcagggtctgcaccatgcacgccaactgctgcgtcggcctgcgccgcaagatcggcgacctcaacgccatgctccaggactggaggcggtacagggcgctgccgcgcgaggagaagcgcgaggtgtcctggaccgtgccgcgcaactgcagtctttttcacacacaggaggagcgtggttgatcaggaagctgttttttatttaaattttttgcaagacttgtcagaacatggatgggtgatgtgatgtaatgtaaacaaaacatgtatgggaagttcatatgtgttgtttatgtgacttcagcgaaaaatatacagttttgcagggtttgggtattc

SEQ ID NO: 57812 - DNA, 487 bp, Zea mays
  Clone ID: MRT4577_152722C.1
ccggccgggtcatttttcccaatatattctcatcaaatcaagaacatgtcatggtataattcacagacgctttcctatttgcccctttcagtattttattcatgttattcaattcgtacttgtaactgatttatgccaacatgactaaacatcgtaaacaaatccggcgtcacttggttgaaaaaacatttgacaattacatgcatgaggaatcctaggttaataaccaaagatggcctctttttctgtcataatattgcaatattgaagagacctggcattaaggcaaggttttatattcagctgaggaagaattgcaatcatcctgatcttttggaatctcaagttgatacaacagtgatttttttttgttttattacttgcaggtttatatccacctgttgagaagatcctggaacaatgtggtgaattccaactttttgacaggctacttaatttcctgaaaaaaaaaaaaaaaaaagcggcc

SEQ ID NO: 57813 - DNA, 584 bp, Zea mays
  unsure (1)..(584): unsure at all n locations
  Clone ID: MRT4577_152723C.1
cacgcgatggcatggtgcgagaccaagagaggatgaccatgggttcgttcctggtactgcaaagatcaaagactggagaccaagaatgattctggagcagcgaaatataaagacggattgctcaccggacgagacatacgtcctcctttgaagaatgatatgctcttatgacctcccatacttatgactgactttgactagcatcgatttttctttcattatagcgaattcctatttgagtttgaagcctatcactatcatatacattatctaaatgaatccactttgaatataatgcacattctcgatagacccctactactaatgactcatatgtgaacaggatatgtgtgtttgataatgctgatatagagatcttttttataccatgactcctcgataggatgattataacaagcatcctatgatactatatatgaatcatcctattttaattaggcgctaacacacttagtacgaagtatgtacctttctatcatatagtctctgactctcactaactanaggggggagcaatttctttcttctagaagattctagtagaaagtgagacaaagtgaagc

SEQ ID NO: 57814 - DNA, 389 bp, Zea mays
  Clone ID: MRT4577_152724C.1
tggaaatgcttgaggatgtgccctcgctatttgtcgctgttgttccagcgcacgtctcgatatgatgtactgagaactttgaagattattctgagcaccggctcaaatttttttctctgctccgagcaattgtcacccattgctttcaagcattaattcagctttcaagccagcaattgaagcttgtgatcgattcgatgaattgggcgtttagacataccgtgagaaatatctctgagactggccttagtctatagttggaaattttgaagaactttgttgctttaggaattcataattcattattactatattctctttttgacattttatctagatatttttgctgtttttgatcagctcatttttataaattttgtgttttagtt

SEQ ID NO: 57815 - DNA, 106 bp, Zea mays
  unsure (1)..(106): unsure at all n locations
  Clone ID: MRT4577_152725C.1
cggaannnnccgggtcgacgccacgccgtccgtgcaagatcctgtacacacctaccgatcgcttttctctaccgggtcagtgagataaatgtcacggagagagggg

SEQ ID NO: 57816 - DNA, 284 bp, Zea mays
  Clone ID: MRT4577_152726C.1
atggttattattttttcttttctcattctttaacacctctctatttttattttaattatacactacttgatacatttaattatatttatgggcacatttacgatctatcaagtgccataaaactaataaccacacagcctgatagttaactacaatgattttgcaaaacttaaaggtggcatgaagctgcaagatacttacagaataaaagacgctgcagctgtaacggaaaaaaaaaccacaacggaagaattttcaacccactgaaagccacacgctttttt

SEQ ID NO: 57817 - DNA, 537 bp, Zea mays
  Clone ID: MRT4577_152727C.1
aaaaaaaaggccaaaaaaggggtgctgtagttttaatacttgtgttaaagggaatttaggggttcacaatttcaaccaaattatgggtataaaagaacccttgaaaacagaacaaattttaatccataaccgccgctaccacaatgagaaaacgtctgaccttttatttatggggatgggaaatttgttttagaacctaaggttatggccatatgcccgaaccttccctaaattcagaagcctatttatgaaggctcacctgggctggccctggagcttgccttccttgacaatgtaattgtgcacggggaaacactggccctgaaagtacctttgtagcatgttcttcaccccgtccttatacctcaggtgggcattaagggagggcccggaaatgtgaggggctcatggcgttgttgggcatgcaaaacccctgggtgcgcccttgctcccacccgtgaggatgccacacatctacagcgactccaccatggggccggtgcagcaagcgtccccccggtttgggttaacatgacc

SEQ ID NO: 57818 - DNA, 2980 bp, Zea mays
  Clone ID: MRT4577_152728C.1
tctggccggggagagatctgaatatggtcgttatggttatgattcggattatgaaagaggcaagagagatagtagctggagaagacgtgattcatgtgacagcgaacgtgaaaggagtggattaagtcgtgaaagagaggaaagcccgtacacgcgccatagccgttctcgatacatgggcgcgatgaccgatcaagatcacggtctagatcaagatctcctcgtccgagaagtcatggtcggaaccaaagagatggcctgtattatgataatcgatttgacacaagaagggaatatgattgggatgatagggggcatggtgattcagtggctccatctgccactgttgttgtcaagggactgtccctgaagactaatgatgatgacctatataagattcttgctcagtggggacctctacgcagtgtgcgtgtgatcagggaacggaattctggcatgtctcgtggatttgcttttattgacttccccactgtggaagcagcccgtagaacgatggaagctacaggagagaatggtctcgaaattgatggcaggaatgtgttctttcagtacagtaaaccaaccggggggatgggtgggccttctcttggacaagaaaattttacgaggcctacttatgggcacaggactgctgctgcaccgtgtgactggatttgtactatatgcggatgtatgaattttgcccgcaggacctcctgctttcagtgcaatgaacctcgtactgaggatgctcttccagctgatgcgacaggttccgcttcacactttgggagaaggggatctgaactaagcttgggtgtaggtccaactcatgttttagttgttcgtggcttggatgaaaatgctgatgaggaaatgcttcggtacgaatttgctaagcacgcaccaataaaggacatccgccttgttcgggataagtttactcatgtgtctagaggttttgccttcgttcatttccattcggtggaagatgctacgaaagctctggaagctacaaacgggattacacttgagaaaaacggtcaggttttgcgtgtagcatatgctaaaagtacacatggacctgcatcagggggttctcagtcaaacagccttgctgcagctgccattgaggctgcatcatttgctcagcagtatgatgccataggttgggctccaaaagagtacaatcctgatgacaaacagaacaacaactctgaatctcaaaaagatggcagcacagcacagtcgggatttgtttgggatgaaaaatctggttactactatgattctgcatctggattctattatgatggaactactggcctttactatgacagcaactctggagtttggtattcatatgatcaacagactcaacaatatgtcccttgtaatgaccagagcaacactaaggcagccggggaggcggccagcgaaaacacgaaaacctcagatagtaatagtggcaaaaaggttgtgatctctgcgcctgctgccacaattaaacaaagtgagaaaacttcacttcctgacgctgttcaagctgctgcaaatgctgcactggctgcagaaaagagagaaaaggagaaggcaaaagagattaaattggcctcaaaaaatagtctcatagctaataagaagaagatgagcaatgtcctagctatgtggaagcaaaggaatcaagaagggcaggccgcacgaattgtccttgatgacaaagaaccagcaaattctgatgataaatttagtcattcacgtagtggaactggattctctttgaaaagcaagccaaattctgaccttgaaaatgctatgggcaattctcttggccaaggaatgacatcgactcaaacattggattctgttgtaaagcctagacctgtcagtaacagcttagggactacagttatgggtgtcataagaggttctgctagaggagtgatcaagtcagatactacgtttcacgcattatctgatgctggtagcactgattcccgcaccactataaccacaagagcaagtgggttaatgacaagttctgaggcacttataactcctgcacccttcaaaactgatgtgtctgccttagtctctaatactccatcgggagtttctgggagtggtaaacgtcggttttctgaggcaccgggacaatcccagtacagggatcgagctgcagaaagacgaaatctgtatggatcatctcatggcactgatactgttggattggattcaactggtgactatccgtcccgaaagggttcaagtgagatagggtcgatgccgtttcctcctggtgtgggtgaacgttccagtggtgaaattggcaacagcgaaaactatgaagttattaccgctgatagagcaatcgatgaaagcaatgtgggcaaccgcattctacgcaacatggggtggcaggagggactgggtctcggaaaggatgccagcggtatcaaggaaccagtcctggcaaaatccgtcgacgccagggctggactgggaagtcagcagcggaagcctgatccatcccttgaagcccaagccggggacagctacaaaaccatcatccagaagaaggccatggcaagattcaaggagatgtcttagctacactgttttatctattttattgctgcattttgtagtccgtttttaacagcatgcatttttttgtttgctcgtgtgttttttaaataaactgagccgctgaattgtgatttattatcctgaaaggggcactacatagttcgagaccgaaaaaaaaaaaaaaaaaaaaaaaaaaaaaaagtactctgcgttgttaccactgcttaaggattcccagcacactacatagttcgagacctggatgctttggttcccttgtgtgttagttttcttattaaaaaaaaataaaaattttattgtttttattaattactctaaatctttattttacttagcaatgtttttattataaatatttttatattaattg

SEQ ID NO: 57819 - DNA, 1076 bp, Zea mays
  Clone ID: MRT4577_152729C.1
gaggctggccgggtttacgcattatctgatgctggtagcactgatccccgcaccactataaccacaagagcaagtgggttaatgacaagttctgaggcacttataactcctgcacccttcaaaactgatgtgtctgccttagtctctaatactccatcgggtgtttctgggagtggtaaacgtcggttttctgaggcaccgggacaatcccagtacagggatcgagctgcagaaagacgaaatctgtatggatcatctcatggcactgatactgttggattggattcaagtaagaatacactttcatacgtttttattgcgtgcaattgctgtcattttcccatactgtccgtccagaaatttaattttcttattctcatcattatcattttgctgaagcatcgttggcagtatgcttagatttacattagtgtttatataatggcaacttcgtatttctagggattttcttgttaccattggaatgtatccttgacccaacatacagtttagggatgatgttttcggttttgcttgtaagatttttattgattttctggaaattacctgttgtcaagctggtgactatccgtcccgaaagggttcaagtgagatagggtcgatgccgtttcctcctggtgtgggtgaacgttccagtggtgaaattggcaacagcgaaaactatgaagttattaccgctgatagagcaatcgatgaaagcaatgtgggcaaccgcattctacgcaacatggggtggcaggagggactgggtctcggaaaggatgccagcggtatcaaggaaccagtccaggcaaaatccgtcgacgccagggctggactgggaagtcagcagcggaagcctgatccatcccttgaagcccaagccggggacagctacaaaaccatcatccagaagaaggccatggcaagattcaaggagatgtcttagctacactgttttatctattttattgctgcattttgtagtccgtttttaacagcatgcattttttgtttgctcgtgtgttttttaaataaactgagccgctgaattgtgatttattaaaaaaaaaaaa

SEQ ID NO: 57820 - DNA, 186 bp, Zea mays
  Clone ID: MRT4577_15272C.1
tcggagaccttagaccattaactttatttaatctacaacggcgaaaaaccccgaacgaaccgtgggggggctgcgcgtctggctcgctcttccggcttttgctgggagcgccacctccacccatacaatctgcgggtgtggctgtcaggcaccgccggcggttgatctaccggcgacggggcatat

SEQ ID NO: 57821 - DNA, 604 bp, Zea mays
  Clone ID: MRT4577_152731C.1
aaaaaaaaaggctttttttaaacaaataaggctgttagggcccttttccccttttgtcccaaaaaaacggggggtttaattaaaaaaacaacacttttcgccccattaactttgggggggggtttttccctttcaaaaaactgttattttttttttttttcccccccccccccacccccgggttaaaaaaaacctttggttttttcgcccttgaaggggggtttttttttttttcggccggggcccccccccccaactgggggggcctttttttgggtttgccctccccccccagaatcccattttggttccagggaaaattttctttggggaacctttttttttccagggacaagcccaaaaaacccagggttttggggtttttccccaacctccttgcttaatttagggggttggggaaccctttgcagggggtaaaacggtttttcggcccttttttaatctccaaaattttaaccccaaacttttccttttttaatttaaaaaaaaacccccccccctttgttttttcgggaaacttgtacccgttgttcaaaaaaaaacccaccaccccttttaaccatttggagatggctcaaaaatt

SEQ ID NO: 57822 - DNA, 355 bp, Zea mays
  unsure (1)..(355): unsure at all n locations
  Clone ID: MRT4577_152732C.1
gcgacggatgtgttctcgttgcggctggggcggccgtccagcgaccacggagtcagtcgggagtaatcgtccgactaccgctccagctccaccagccgctccaatctagccgccggcccggccctggcccctgggggagacgaccagtcgacaacgacgacccggccgcctnctcatggaagaccagtcgcctgaccgtacatcggtcggttcagcttcagcgccgaaaaagcatagcgcttcctcacgaggccggcgccgtaacttctcgtcgtcaacgtgcaaggattttctccgcaagtttgtggacagcgagcttctgacgtcaatcctagaggactgggtctccggtcac

SEQ ID NO: 57823 - DNA, 253 bp, Zea mays
  Clone ID: MRT4577_152733C.1
ggaatgactgctgaaccacaattagaacttaattccttggcatttacagccagaacacaaagggttaactcggagcacgcttaatttgttccacgtaaaaattacaagaatttcgacccaaaaaaataaaaataccggggacaaccaggggggttccttattctaatgggggaaagcactcccctgaattctcatgggtggagatatacaatccctcaattggcgtttttgcttggcttgtttgaccccgggt

SEQ ID NO: 57824 - DNA, 313 bp, Zea mays
  Clone ID: MRT4577_152734C.1
gacgccgatagtgatatatcacgctgcagtactattactactattacgtatttactccctttttgggaacgtaggattggattaggggctgcagttcgtggaggtttaattttccccacgaggtctagtttgggtactatagtaataactgagatcgaagtggattgagatgtattgaagagggatttgctctattagggatttaaacactcttaaatctctccaaaccacatccacacacgatccattgtggaaactgggttagctgtaaaaattaagactgccttcaacatgtgtctttaaacgctcctga

SEQ ID NO: 57825 - DNA, 230 bp, Zea mays
  Clone ID: MRT4577_152735C.1
ggccgggatacatttcacaaagtatagagcaggcaacagcacttctcagccttcacccctctcacactctcttcactcaggacgagcaaggggggcagtgagcgaagcggtaggtaggagcaggacgtgctgccgacaaggtagctagaggcaatggcgagggcggtggcgatgctcgtggacctgaccctggccctgccgctggtcgtggcccgcagcgcgcccggggc

SEQ ID NO: 57826 - DNA, 309 bp, Zea mays
  Clone ID: MRT4577_152736C.1
ataaaaaaaaaaaaaaaaaaaaaaaaaaaaaaaaaaaaaaaaaaaaaaaaaaaaaaaaaaaaaaaaaaaaaaaaaaaaaaaaaaaaaaaccttgggcgggaaccccccttaagggggaaattttgggaaattttccatacaaactgggggggccgtttggagctttctttttaggggggcccatattcccccttataggggggtggttttaaaatttcacggggcccggggttttaaaacggtgggggagggggaaaaaccctggggtttacccaaatttaattgcccttggaacaaaatacccctttt

SEQ ID NO: 57827 - DNA, 691 bp, Zea mays
  Clone ID: MRT4577_152737C.1
tcactctgctttctctctctctctctctctctctctctctctctctctctacatacaaagtggaaaaaacgcacccaaaagaaaggctcacaccacccacctccatagcagcctactatcctctccttcctccattctctcgctatcttccccactccccagccaacaaatcgaccttgctgagaacgagagggctatagagcctggggagggcagcgcaacacgcgccacctagcggcggcggcggcggcggcagagcagtccgccgggagcagaggccgcgcgcgcaggcagccatgggcgcgccggtgaacggcgccgtcgtcttgttcctcctgctgctggctggaacgggggcggtggccgaggagacggcgccgcaggaacccacattgcccgccgccggctccggctccggttccggctccggcgccggcgccggcgcagcggtcggggtcaactccaactccgtgctggtcgcgctgctggactcgcactacaccgagctggcggagctggtggagaaggcgctgctcctgcagacgctggaggacgccgtcgggaagcacaacgtcaccatcttcgcgccgcggaacgaggcgctggagcgggacctggacccggagttcaagcgcttcctgctggagccgcgcaacctcaggtcgctgcagggcgctgctgctctaccacg

SEQ ID NO: 57828 - DNA, 272 bp, Zea mays
  unsure (1)..(272): unsure at all n locations
  Clone ID: MRT4577_152738C.1
ctttctaacttgacggtaaacnatttgatacaataggccccaataaaccccccctatagaaatgttgtaatgtactggngctactccnacatactaggagtggggtaagggacccacccccaatggcaatagaatccaaattatacgatggctatataggaccccttgttaaagtaacctaaagcgatgtcagcccccccttaactttaatattggtaaaacttttggtatacatccnaagctcattagtaattggcaggccaccattgtcg

SEQ ID NO: 57829 - DNA, 335 bp, Zea mays
  Clone ID: MRT4577_152739C.1
aactagttaaatgtcgagagttaccatccttctaaaaaaaaaaaaaaaaaaaaaagaaaaggtataagaaaaaaaaaaaataagaaaaaaggaaataaaaaatgaaaaatcacaaaaggggtaatcaataaattttggaaaaaaaaaagggggggccgccctaggggttcaaggcttacttgcccttgcatgcaatttcataccccttctagattgtcccctaatttcatttccggggccgtctttttacaacttcgtgccggggaaacccttgggttttcccaatttaacccctttgcagcaaatccccttttcccaattgggggtaataccaa

SEQ ID NO: 57830 - DNA, 1233 bp, Zea mays
  Clone ID: MRT4577_15273C.1
cgggaacgtccgccaaacgtccgccttacgtccgcgtaccgtggggcccgtggtgctggcgcgcgacctcctcccgctccacatcaagcactacaacttctcctttgtccgccagctcaacacctaccaacctgccccgagcaaagagagcaagttagttggtgtaaatgcttcagcgaagcagggcagcaggcgtgggcagtcgggctggtccagggacgccagctcgcatctgacggtttccgtctgcaaaggtagcagcagacgtcgcctttgaccgtctatgcctcaatcccgcagatgcttgtccgtgttgttaagctgctcaagaacccccacttcatggcgaagcccgctgcgattgacttgataagaagcattattcaggctgaaggtgcttccacagagcaggcattatcatcagctctaacaagtattatggatgcgctgaagagtactgactggaatacaaggaaggctgcctcactagctctttcaagtattgcggtcagttctgggtatttggttacctctttcagaacttcctgccttcgctcccttgagcgtagtaaatttgacaaggtaaaaccggtacgtgacaccattatacatgcaattcagctgtggataagctattccagggtctcatactcctgaaccatcagaagctgggtcatcaacaaaagagaactactttggagaccatcatgacgccagaagtatacatgatggaggatcaagagatacttcttttaggagaacagatcatgggccttctgtatctgttatcagtggtagttctctcagttcagcaaagcggaggtctcctttatctattaacaaagtagccataaacaatgctgcaaatttgcaacggatgaagactggtgattggcgtgttgaggtgtcagttccaaagcagagtatgataccgctggttaataatgacgagaagggatccagtaaagcctgcagcctaaaagatacaaagagaaatgcatatgaaagtgttgatgtagacagtaagtttgactatgacattgtagatgataaacaagaatgctcctctgtgtcagaagtagccagcaggagttttgagacaaagcatgtcactactgctcaggaatgcactgaagattgtgattcagcagaagttacagaacaatgtcccaggggtcgagaaagtaagagcataggctcaacattacagatgttactactcatgacacacat

SEQ ID NO: 57831 - DNA, 851 bp, Zea mays
  Clone ID: MRT4577_152740C.1
ggccgggacaagctggaaaaaacacacacaccggccggaaaggctcacaatacccacctccatttagctactactactccctcgctgtcttccccaaccaacaaatcgacctagctaggcacaagagcgctagacgccgcagcgcagcacgcaccacccaccgagcggcggcggaggcagggcaatccgcagggagcagaggccgcgcgcgcaggcatgggcgcgccggtgcacggcgccctcgccttgttcctcctgctcctggtgggggcaggggcggcgcccgaggcgagctcgccgcaagaacccacattgccagccaccggctccggcgctacaccctcaccagcgcgcgcaggctccgccgaggcaagctgctggaagcgacgtgccaagtggctgggctcttcggtcagcggtcgcgattcgcaagctgccgccagtagacggagaaggggctgtgataccgaaagacgaacgaactgaactggtgggctggggctgccctggagaggcagagggagccgtccacattattacttggtttctttcttttttttgtttattattgagaataatgatgaatcaggtcaggtgggtgggggatgtggctgtaaactcggtgggctgtcggtgtgtccaggggggaaaaaagagagtaaaggcagcgaaagaaattgtccatacatgaagaagcccagggtcgtcgtctgtgtataggaagggattaaagatgttttgttttcttctgtctttctttgctttgcttgtgttcccgttttgacaatgagaaatatcgggtaaacacacaaccttccctattatacatttcccttcattttattatacat

SEQ ID NO: 57832 - DNA, 623 bp, Zea mays
  Clone ID: MRT4577_152741C.1
ggccgggccgggcgacaaaacagggttcggcggcgtccaggttcgcttcctcgccgatgccgatgccgatgccgatgccgatgccgatgccacgggcgcggacgcggtggtcggcgctagccgccagcgcgctcatccaatgctgcgcggggagctcctactgcttcggcgtctactctcagacgctcaaggcctcgcagcgctacgaccagtccgcgctcgacgccgtcgccttcttcaaggacgtcggcgccaacgccggggtcctctcgggcttcctcgtcgcttgggcgccggggggccgcaggcgcccctggattgtcctcctcgccggctccctgctctgcgccgcgggctacctccccatgtggctagccgtcgcgggggtcgcgcccgcgccgctcccgctcgtctgcctctacatgctgctcgccgcgcaggcgcagaccttcttcacaccgccgatgttgtctccgccgtcgagaacttccccgaccgacgaggcactgtcatccgcatcatgaagggttttctaggcctaagtggggcaatacttgtcgaaatttaccgcactcttggcattgatcccagctctttcatacggatgctggcagttttaccca

SEQ ID NO: 57833 - DNA, 1971 bp, Zea mays
  Clone ID: MRT4577_152742C.1
cattgggtacctcgaggccggccggcgggagctccactactccctcgctgtcttcccgaccgaacaaatcgacctagctaggcacaagagcgctagacgccgcagcgcagcacgcaccacccaccgagcggcggcggaggcagggcaatccgcagggagcagaggccgcgcgcgcagcgcaggcatgggcgcgccggtgcacggcgccctcgccttgttcctcctgctcctggtgggggcaggggcggcgccgcaggaacccacattgccagccaccggcgcggcggcggtcggggtcaactccaactccgtgctggtggcgctgctggattcgcactacacggagctggcggaactggtggagaaggcgctgctcctgcagacgctggaggacgccgtcgggaagcacaacgtcaccatcttcgcgccgcggaacgaggcgctggagcgggacctggacccggagttcaagcgcttcctgctggagccgcgcaacctcaggtcgctgcaggcgctgctgctctaccacgtcctcccctcgcgcctgccctccgactcctggcccgcggcgtcccaccccacgctgtccggcgaggaggtcgagctcgcccccgccgccggcgacggcgccggcatgcgcgtcggccacgccgccgtcacgcgcccggacgccgtgctcaggcccgacggggtcatccacggcatcgagcgcctcctcgtgccgcgctccgtgcaggaggacttcaaccgccgccgcagcctcgcggcgatctcggccgtgctgcccacgggcgcgcccgaggtggaccccaggacgcaccgcctcaagaagcccgcgccgccggtggcccccggcgcgccccccgtgctcccggtctgggacgccatggcgcccggcccctccatcgcccccgcgccggcgcctggcccgggctccgggaagcaccacttcgacggccacagccaggccggggacttcatccagacgctgctcctctacggcggctacaacgagctcgccgacatcctcgtcaacctcacctccctcgccaccgagatgggccgcctcgtctccgagggctacgtcctcaccgtgctcgcccccaacgacgaggccatggcgcgcctcaccacggaccagctcagcgagcccggctcgcccgagaacatcctctactaccacatgatccccgagtaccagaccgaggagtccatgtacaacgccgtgcgccgcttcggcaaggtgcgctacgacacgctgcgcctgccgcacaaggtcgtggcgcgggaggccgacggctccgtcaagttcggccagggcgagggctccgcctacctcttcgacccggacatctacaccgacgggaggatctccgtgcagggcatcgacgccgtgctgttcgcgccggacgacaccaaggccacgcagacagccgaccctaacaggaagcctcccgccatcgtcacccacaagaagaagatcaagctccggcgaggcaagttgttagaggcgacgtgccagatggccgggctcttcggtcagcgatcgcggttcgcgagctgccagtagacggagaaaggatctgttgatctccacgacaccgaaagacgaacgaacgaacgaactgatgggctgccgcaggaggagggggagccgtccacattattgcttgtatttttttttccactcttttgtttattgttgagaataataatgaatcaggtgggggatgtaaactttgggttgttgttggtgtgtcgtccagaggggaaaaaagaaaggcagccaaaaaaaattgtccatacatgaatgaagaagcccaggatcgttgtctttgtataggagaaggaattgaaaccttttgtttttttttctttttctgtcattctttgcttctgttcccgttttgacaatgagaaatatcgggtaaacacacaaccttcttacttattatccatttccttcttttt

SEQ ID NO: 57834 - DNA, 2116 bp, Zea mays
  Clone ID: MRT4577_152743C.1
caagtgcgaaaaacacacccaaaagaaggctcacaccacccacctccatagcacatagcagcctactatcctctccttcctccattctctcgctatcttccccactccccagccaacaaatcgaccttgctgggaacgagagggctatagagcctggggagggcagcgcaacacgcgccacctagcagcggcggcggcagagcagtccgccgggagcagaggccgcgcgcgcagcgcaggcagccatgggcgcgccggtgaacggcgccgtcgtcttgttcctcctgctgctggctggaacgggggcggtggccgaggagacggcgccgcaggaacccacattgcccgccgccggctccggctccggctccggcgccggcgcggcggtcggggtcaactccaactccgtgctggtcgcgctgctggactcgcactacaccgagctggcggagctggtggagaaggcgctgctcctgcagacgctggaggacgccgtcgggaagcacaacgtcaccatcttcgcgccgcggaacgacgcgctggagcgggacctggacccggagttcaagcgcttcctgctggagccgcgcaacctcaggtcgctgcaggcgctgctgctctaccacgtcctgccctcgcgcctgccctccggctcgtggcccgcggccccgcaccccacgctctccggcgaggacgtcgagctcgcctcggccggcgccggcggcatgcgcgtcggccacgccgccgtcacgcgcccggacgccgtgctccggcccgacggcgtcatccacggcatcgagcgcctcctggtcccgcgctccgtgcaggaggacttcaaccggcgccgcagcctcgcggcgatctcggccgtgctgcccacgggcgcgcccgaggtcgaccccaggacgcaccgcctcaagaagcccgcgccgccggttccccccggcgcgccgcccgtgctccccgtctgggacgccatggcgcccgggccctccatcgcccccgcgccggcgcccggcccgggctccgggaagcaccacttcgacgggcacagccaggtgaaggacttcatccagacgctgctcctctacggcggctacaacgagctggccgacatcctcgtcaacctcacctccctcgccaccgagatgggccgcctcgtctccgagggctacgtgctcaccgtgctcgcccccaacgacgaggccatggcgcgcctcaccacggaccagctcagcgagcccgggtcgcccgagaacatcctctactaccacatgatccccgagtaccagaccgaggagtccatgtacaacgccgtgcgccgcttcggcaaggtgcgctacgacaccctgcgcctgccgcacaaggtcgtcgcgcgggaggccgacggctccgtcaagttcggccagggcgagggctccgcctacctcttcgacccggacatctacaccgacggcaggatctccgtgcagggcatcgacgccgtgctcttcgcgccggacgacgccaaggccacgcagaccgccgaccccaacaggaagcctcccgccatcgtcacccacaagaagaagatcaagctccggcgaggcaagctgctggaagcgacgtgccaagtggctgggctcttcggtcagcggtcgcgattcgcaagctgccagtagacggagaaggggctgtgatctccacgacaccgaaagacgaacgaactgaactggtgggctggggctgccctggagaggcagagggagccgtccacattattacttggtttctttcttttttttgtttattattgagaataatgatgaatcaggtcaggtgggtgggggatgtggctgtaaactcggtgggctgtcggtgtgtccagggggaaaaaaagagagaaaaggcagcgaaagaaattgtccatacatgaagaagcccagggtcgtcgtctgtgtataggaagggattaaaaaagatgttttgttttcttctgtctttctttgctttgcttgtgttcccgttttgacaatgagaaatatcgggtaaacacacaaccttccctattatacatttcccttcattttattatacatatatactctctctctcaaaaaaaaaaaaaaaaaaaaaa

SEQ ID NO: 57835 - DNA, 459 bp, Zea mays
  Clone ID: MRT4577_152744C.1
tggcccggacctttgggctgatttatgtgcttggaggaattccgtcaagtcgaacgacgagtctcacgaggcgtattagactacgatctgtagggcctaagaagcctctggcgccggcgaaaaatcagattaggccagcgagacgctaagcaggccgatcctggacatcagaactcacgtagaaaaggtgaaagactctaactgttaggtaccgacctgcaaacacgtttttgccgtcaccgcgaccgggacagcggcgacgtctcctcgggcgaagaataagacacggcgatcggcgttactccgtgaccctatagccactacgtcggaattagtcgagccgctccgctcctttctgcgtaattacacgcccgactgcggctttaaaaagaaaagaaaagacggtctgacggcccactttgtactcgttgacctaagtgatcatcccagtcactaaaa

SEQ ID NO: 57836 - DNA, 2100 bp, Zea mays
  Clone ID: MRT4577_152745C.1
ctctctctctctctctctccatagtccatactacaaagcaggaaaaaacacacacacacaaaagaaaggctcacaatacccacctccatttagctactactaactccctcgctgccttcaccgaccaacagatcgacctagctaggcacaagagcgctagacgccgcgccgcagcacgcaccacccaccgagcggcggcggaggcacggcactccgcagggagcagaggccgcgcgcgcaggcatgggcgcgccggtgcacggcgccctcgccttgttcctcctgctcctggtgggggcaggggcggcgcccgaggagacggcgccgcaggaacccacattgccagccaccggctccggcgctaccggcgcagcggcggtcggggtcaactccaactccgtgctggtggcgctgctggcttcgcactacacggagctggcggaactggtggagaaggcgctgctcctgcagacgctggaggacgccgtcgggaagcacaacgtcaccatcttcgcgccgcggaacgaggcgctggagcgggacctggacccggagttcaagcgcttcctgctggagccgcgcaacctcaggtcgctgcaggcgctgctgctctaccacgatcctcccctcgcgcctgccctccgactcctggcccgcggcgtcccaccccacgctgtccggcgaggaggtcgagctcgcccccgccgccggcgccggcatgcgcgtcggccacgccgccgtcacgcgcccggacgccgtgctcaggcccgacggggtcatccacggcatcgagcgcctcctcgtgccgcgctccgtgcaggaggacttcaaccgccgccgcagcctcgcggcgatctcggccgtgctgcccacgggcgcgcccgaggtggacccgcggacgcaccgcctcaagaagcccgcgccgccggtggcccccggcgcgccccccgtgctcccggtctgggacgccatggcgcccggcccctccatcgcccccgcgccggcgcctggcccgggctccgggaagcaccacttcgacgggcacagccaggtcaaggacttcatccagacgctgctcctctacggcggctacaacgagctcgccgacatcctcgtcaacctcacctccctcgccaccgagatgggccgcctcgtctccgagggctacgtcctcaccgtgctcgcccccaacgacgaggccatggcgcgcctcaccacggaccagctcagcgagcccggctcgcccgagaacatcctctactaccacatgatccccgagtaccagaccgaggagtccatgtacaacgccgtgcgccgcttcggcaaggtgcgctacgacacgctgcgcctgccgcacaaggtcgtggcgcgggaggccgacggctccgtcaagttcggccagggcgagggctccgcctacctcttcgacccggacatctacaccgacgggaggatctccgtgcagggcatcgacgccgtgctgttcgcgccggacgacaccaaggccacgcagacagccgaccctaacaggaagcctcccgccatcgtcacccacaagaagaagatcaagctccggcgaggcaagttgttagaggcgacgtgccagatggccgggctcttcggtcagcgatcgcgattcgcgagctgccagtagacggagaaaggatctgttgatctccacgacaccgaaagacgaacgaacgaacgaactgacgggctgccgcaggaggagggggagccgtccacattattgcttgtattttttttcactcttttgtttattgttgagaataataatgaatcaggtgggggatgtaaactctgtgggttgttgttggtgtgtcgtccagagggagaaaaaaaaggagaaaaagaaaggcagccaaaaaaaaattgtccatacatgaatgaagaagcccaggatcgttgtctttgtataggagaaggaattgaaacgtttttgttttgttttctttttctgtcattctttgcttctgttcccgttttgacaatgagaaatatcgggtaaacacacaaccattcttacttattaaaaaaaaaaaatgacaatgagaaatatcgggtaaacacacaaccttc

SEQ ID NO: 57837 - DNA, 537 bp, Zea mays
  Clone ID: MRT4577_152746C.1
ttttttttttttttttttttttttttttttttttttttttttttttttttttttttttttttttttttttttttttttttttttttttttttttttttttttggggaaaaattaaattaaattgatcccctcgggttgtaaaaaggggggggggggggagcgattacaattaaaaaggaaaaggacagggggcctggtaatttttttataggccccaaacccaccccgagaaaaaaaacatttatgaccaaaaaatttggtaaaaacgggaaaaaaaaaaattgggggcgaggtgggtttttccttttgaggaaaaaaaaattttggccttcggcaccattttaagccgaagggggaattttttgggtaaaacttggggggtcattgttaaaaccctcgagctatgttttcgttttgaaaaccttttacaaaaaggaaaaatttcattggaaacagaaaccccctggaaaagccacttttttgctaaaaacaaaggggtaggcctgtttttggggaccttaaaaaaagaaggccccc

SEQ ID NO: 57838 - DNA, 181 bp, Zea mays
  Clone ID: MRT4577_152747C.1
ccaaacatcctttttccctaaatattattccctcccatttcaaaggtccattcagggcatggggcaccccgccccccatggggaggggggacaccccggtacccatcgccgctaaacgagggaaccagccatagggagctaggcaggggccccattacacttattactacaggacccgggg

SEQ ID NO: 57839 - DNA, 522 bp, Zea mays
  Clone ID: MRT4577_152748C.1
aaaaagcccgcacactttggggtaacatataagaggatataagaatggaaaaactctgtttcacgagtcaatcccaacctggataggaacctacgggtgttttaccatatataaggacaagttacggttctttccaacatgaaacagggttaaaatgtaaacgtgactctggttgttctctggtttaactggccgaaacattactgagatgactgtgcacccttgacgaagaggctgaagcctatatcatgatgggtttattgcttttcttgcaccttctcttctttttttgactgagctggatgagcagctccggctgcatgaggtgaagctgccgaaacatcgacaccaccgtcaccacatggcagtgaaataaagttgttcctgtccgcgtcaatgatctagaggatggccttaccggtcatgtgggactgcatgagctccatccttacattgatgactacaaagtgaactgtatcaatagtggtggtcaaatccttattgtggggctggcgttcccag

SEQ ID NO: 57840 - DNA, 356 bp, Zea mays
  Clone ID: MRT4577_152749C.1
cggccggggactgcctcaccattcctcccacatcacctcgcctgccatcttcgtagcccccctagcgtcgagcatcgatcatgccggactactgcggaaagtacaaggatgagctcatcaagaatgctggctacattggcacccctgacaagggtatccttgctgatgatgagtccactgccaccattggcaagcgcctttccagcatcaatgccgagaacgttgaggagaaccgccgtgccctccgtgagctcctattctgctgccccggagctctcacaaacatcagcggagtgaacctcttcgaggagaccctgcaccagaatacacaggatgcccagccttttgtcgatgcc

SEQ ID NO: 57841 - DNA, 331 bp, Zea mays
  Clone ID: MRT4577_15274C.1
acgacccacgcgtacgcaccaaacctctaaacaaaccaaccaattttttttattgcattgtacaattacactacgggagggtgtttattatgcacacagacattctcatcaccatatacatttttatacatgctcatcaccataccaatcacgctaatctactacatacaactcggcctttgacctacccgcgcgtgcacgcactactgtaactgtaaaaaccactgctgacactaaccgttcacttgacgcaagtgaagacactgtctaataccacatttgctttccgcctgataaaaaaatggtttgtatttataacaatctctctcta

SEQ ID NO: 57842 - DNA, 388 bp, Zea mays
  Clone ID: MRT4577_152750C.1
ctctttttttttttttttttttttttttttttgtttttttttgggggattgttttttttccccccctggaaatgagcggggggaaatacccaatttcaccgttttttgcccccccgttccaaaaaaaacatactttttctggtgggggcaaagcatttctgtttgcccgcccccccctttttgtatcttaaatccctaacccttctttttaaactcttacgctttccatccttggcgggaatcctagccaccccaagtttttttaagcgggttatgcgaaaccgttggaaagcccatccttcttaatggggggcaggggaccctccccgagtatgatgtctgcttaaaaagagagggtggtaactccttgcccagagcctttataaaa

SEQ ID NO: 57843 - DNA, 582 bp, Zea mays
  Clone ID: MRT4577_152751C.1
ggactattcaaattggtgaagcactgcagatgcaaatccaggttcaaagacagttaaatgaacaacttgaggtgagttactaacaccacgaagataacacttttgttctagacagttaaatgaacgatgggccagctcaagcattttggctagcacagtcccaaactttggaagagcgcaagggaagactacgattccaaattactacctcctttaacaatgacaaaataatttaaatccggatctgttttagaccaaacattttcattatgatgacaagggtgtataactgtagacccaatatatttagcaaaaaagttatagttagtaagtaatacttatatactccctacgtttcaacttataagttgttttaaaattttgtcctaagatacctgtctaaatttgactaatttgtagaaaaatgtacaaacatctgcatcattaaacaagggtcattaaatgcactatgaatatattttgatagcatatagtgtatcagtgtatatttttgatattgtaggtattataatatttttctacaaacctggtcaaagctaaaaaactttgacttaaggcact

SEQ ID NO: 57844 - DNA, 252 bp, Zea mays
  Clone ID: MRT4577_152752C.1
tcgcgccggctgactagagcgccttcagtggggcctctgacccttgcaagtacactctcacctactaccatgggtaaagagaagtcccacattatcattgcgcgtattggcgcatgatgactaccgcaagtccatcaccacaggacaccttatctacaagcttagaggcattgacaagcatttgatcaatacgtttgagaaggaagctgctgaaaagaacattcttttctttaagaacgccattgtgcttca

SEQ ID NO: 57845 - DNA, 519 bp, Zea mays
  Clone ID: MRT4577_152753C.1
cgatcaagagagtagtacattattataactgacaaacttgttcttgcaaagggattacgagttacaataacaaaagactatcaaagattataaggaaaacacaaaggatacaaactaccaacaatatcatcatcttcttcttttcaaagagattactgcaaaatggtctgagaaaattctgaaaccatttcgtctgaaatattttaccttttatttctttgatcactcggagcgattagcgaacctctcaaccttctcatcgttgagattgatcccaaccatgggttctccaagcccacagctcacctccacaagcatctcaaggtcactgtaatgagtcacagcctgaacaatggcacgtgcacgacgagctgggtcaccgctcttgaagataccagaaccaacaaagacaccatcacatccaagctgcatcatgagagctgcatcagccggagtagccactccaccggcggcgaattggactacaggaagacgaccaagctgcttactctgcatcac

SEQ ID NO: 57846 - DNA, 580 bp, Zea mays
  Clone ID: MRT4577_152754C.1
ggccgctttttttttttttttttgcataacaaaacagacactttgcaatgaggaacgaaacaccgcacacgcaaaagagacaaaaaacataacatgctctatcttggggaagagcagcaagcaagaaacaagcaacagattcctaggcactcagaggggccacggcgacgatggggagacgatgtgacgactaagacaggagaaaagggcggcatgcctcgcatagcacaacaggtcgagacaccttggaagagggaagaggaaaaacaggcccgcacgctcgaaggcgatgacgacgactgggagaggcaggaggatccgcaaaaatgacagggcggtcaggccgaaaggggaccaggaggaagcagctggagtggccctgcagctacggcttcgacgacaggaagcgctgcgtgcagaaacccaaaggcgcgaacacaccgccgggggtctttgaggacaaacgaggcaacgacaaggagcagggcaactgcggcgatgttagatagcatatagccagccggcttcaaggatggcctctggagcaacgaggctagggcgcacagcagggccacctgtg

SEQ ID NO: 57847 - DNA, 223 bp, Zea mays
  Clone ID: MRT4577_152755C.1
attactattaacacattttttgctgggttttgaacaatattccacattatcccacaaacaaaaaaacaaaaaactctcactattcatccacacaccttttggctaaatgcagccctcccttacttgccggccaccaaaatgccaacttaagcccacccgttgtatctgacaaacacaacaatatttatagccactacctcaatccaaaccttcctctattacc

SEQ ID NO: 57848 - DNA, 377 bp, Zea mays
  Clone ID: MRT4577_152756C.1
ggcggcgtccgttcttttccttgtcacgctctcggcgcgtggcggtgaagaagtagaaggccggtcgccgaggggggccaccacgcatcggatgcctgcgcttttgaccgttgtcatgtgctgtggttgtggggccaggacgccgcggcctgcgtcaagaggaacggatcaaggcccatcatgcgcttctaggcccacacaatgttgtaactcacaaagaagcttgtgtatatagagcacatccatgttaagtaaccctagttagggttatgtgggcaaatacctgctttatccttagaagtatcacatctatatataagtaatttgtacaccccctcataatacagagaagagaaagagtcgagaggtccaaccct

SEQ ID NO: 57849 - DNA, 381 bp, Zea mays
  Clone ID: MRT4577_152757C.1
gttggttgttcactacaaacatggacaagatcaggcggcggtcttgtcagtggtattgggattgagagatgttctttttttagtcctccaccacaaatgttatcccatcatgtttcttgaaatggtgtgtggtatgatcaacaacctgcaaagccaaaagcagctgtgtgatgcaaatgccacgttctgtgcccaacttccgattacaataaaacggggaattcctcattgtttcaataaacattcaattgcatacgatgaactcaacagtaaggccacagaatttcatttcgtatcataaggatttcacagccttgggagtcgggacacactggtaatccaaaacattctaattagccacaactagcagttttaaacttt

SEQ ID NO: 57850 - DNA, 754 bp, Zea mays
  Clone ID: MRT4577_152758C.1
ttgtatgactgctcagcatttccactattagaccaaagatgtaactctacttctgggatgatagggcacaaaccggctatttcatttaaaaacccccaatctgctcaattcagtatgaaaatggggagtcccaaaagagactcatgtcatgctgttgcagctccatcctctggctctgaagttcaaacttctagtgaatttaaaacagacttttctcaagataatcaagtgaatatttcggatcgtgtttaccaaaacagaaaggctaaagaagtaaatgactccagtattgctgtaagaatacaaggtttgaagaatatggatcggcagaagctcccagacatttcaagtgagcgatcctcctcacttcttgtggatccaactgcaggaaatgatttgtttgatatatttggtgctgaatttcctcatctgtgccgcaatgtggatggcgattcgacctggaacactgcaaaaccggctagctcaggaaaagatgcacttgaatcctcagtttatcttgatacctctccagtatttggtgcactggacgatgagttccccttttctggaatcttctcactaactgatagtgaccaattattggacgcagttatctccagtgtcaatcctggtggcaagcagatctccggtgacagtgcctcttgcaggacttcattgacagacatgcctagcagctcttattgtggttcaaaagtgatgaagcaacacgaatcatctggtgctcctcctttgc

SEQ ID NO: 57851 - DNA, 497 bp, Zea mays
  Clone ID: MRT4577_152759C.1
cgtcacgctcgtcgccgccgttgtcatgttgcttctcttcatctccgagaccagtaagtgactatccggcagccggtagtagtcccatttgttttttcccttttttctattgtgtggccttgttgccggcttggttgtggaattctgagcccctttggggtactgattgctgctgcatgcctgtgattatgtggagaaaaaagatggaatttcgagaagccactatgtgttcgcatggtactgtccagattaatgcggcagacttctgggcgtaagctctagtgctgttggctgcgtgggaggaaagatatcctgttttggtaaaattaccgttaggcatggacgcgaatcctaataatgcataatgcgaacgattatttttacacacactatttgggcatgagactctgagctgctggaatatttcaaaaaagcttggattttcagttgctttcggctttagttcatatggttgccacaatttggtgggggcaatt

SEQ ID NO: 57852 - DNA, 581 bp, Zea mays
  Clone ID: MRT4577_15275C.1
ccctccggccgggctcggatctgactcgcaacaacaaaaacaaccgccaaacttaacgcgcttctgcaatacctgcagagccaaaccgaacccacagacaccgagaccgcaaccctagccaccgacatccagaagctcgacgtgagcgaggagacgacagagcaagacaaagtcaacgcctacgtagccgagttcttgtacattggcggcccagaagtccttgcaggaaagaaatccgacaagcaaaagtgaaaatgcctgaccaccctgttgaagagtctgctcctggtagcatcaccgataagatcgcaaaggagtcttcggactcgacggcttcgtcgcacggcatgcacgacacgggcaatatgcaacatgctgaggctttcaagtcaaagggcccagtcattgcccagaacctgcccgagcccgcgagcaaggaggagctgaagaagagggctgaggagctgaacaaatagatgcatcatggcgttcgagtccccaacatagcatactataaggctacatatgcaagatgaataatacatgtaccatgcgaaaaaaaaaaaaaaaaaagggcccta

SEQ ID NO: 57853 - DNA, 465 bp, Zea mays
  unsure (1)..(465): unsure at all n locations
  Clone ID: MRT4577_152760C.1
caaccnggagaccgcaaagaagttttcgccggcggcncncgggggggaccgaggcananncaccaacacgaaccgccggggccacgccaacgncgacaccnncanagncnncagancccngaccccgcnccgggncgccancgccgacacgacgnnccggaagcagccangcccnnccaagnncacannccngncccggggggggagccngggcggagcggncggcnacgngacgacgganncggcgnncagccccacggcgnacncgngggcgcncgcgnaccnggngaccanaacgacggaganggnngacancaagcacancgncaccagccgggggcncaacaccnggggcnncgngcccnacaacaacnnccncnccaggaggccggcccccgngnncnggnnccncacaggcgagcacaggncggncnncgcagcganggaanccaggggcgaggaagg

SEQ ID NO: 57854 - DNA, 343 bp, Zea mays
  Clone ID: MRT4577_152761C.1
ttgtttccataacaagaccacagggttcatgccccaacctcaaccaagctacttccaaatacgaaggtgtagaagtggaactgagctgagctgagctaagctaccaattaaagaatagcgcgtgcatgcaaggtgttgacgccactccacacctgcactgcacggtgcacgcacacgcttgcatctagcaatagcaaaccaaacaacgcgctagtagtgtattattagctgcggcaaaggctctttctccgtacgtacaggtacaggtgcagcttcactactgctgtcggacctggccggcggcggtggccatgtcttgctcgttcggccagggtatgaggct

SEQ ID NO: 57855 - DNA, 465 bp, Zea mays
  Clone ID: MRT4577_152762C.1
agcgtggtcgcggccgaggtacttttatcggtcgtcctttcatgttcaggccaaaccttactcattcaggattataccacagggtctactcccgggtaagattaaaaaataaacgttgtttcctccccccatttttattacaccaagcaaaatgcctattgtgctcacatctcaacagtacacaacaacttatgggccaatgctagccctagcaaactgtctcaggaccataaattaatgaaacatagatagctagctgggggtagcacttgcgccatatattgttaatgacattcgaaaacaaaacaaaatgcacctctttgttgttgtaatgaaaatttgtgtgtgggacaaacagcaaattttgatgcttccctgggaggaaagcgaggaacacaccaagatatatcaaggaatgccaaatacctgcccgggcggacggtcgtaagccggattctgccaata

SEQ ID NO: 57856 - DNA, 264 bp, Zea mays
  Clone ID: MRT4577_152763C.1
atcctcctcatacagccgccgcccttactaataatttttcctacaaacacactttaatgggggggtttttatataaaatttttggggtgtaaaaacaccaagccatacacacccttttggatactacttttatcactatccttttcccttaactaccacacaaaaactttctcatttatccaacccaacttatacctccaaaacacaattatactatttttatctacaccagcctttattcttaaacagacccctggccaattt

SEQ ID NO: 57857 - DNA, 557 bp, Zea mays
  unsure (1)..(557): unsure at all n locations
  Clone ID: MRT4577_152764C.1
ccggccgggaagatgatccatggacgttctcgcatgatggggacttctcgggattggcgcttctgctcttatttaatgctgggctggtgccatggccaccagaagacgaaggcagctgctacggccaattcccccgaccctaaggacatatacagagctgacggacgatgatactgaaagggatagngatttcagggcgagggagcctcacaggtgtccgtccctcgacggagcgatatccgctacttggggcacgcggctggcgctaccatgttcaacgtccatgccaggaagtaaggacctaccggtagtcgcctgctggaggacgacaaacagagggagttcctctatgtccccatctacgagactcaggacggacactgatgatactgaggtagcacatatctcagctgaccgaaacagggatgatcattgagtctaccctggcggccatgcatgtcaacgagtgcatggagctatggatacataatagcgacgacgggatgctggccgtggcatatgatgtggacgctggcaccgtgaataatgaagatgct

SEQ ID NO: 57858 - DNA, 147 bp, Zea mays
  Clone ID: MRT4577_152765C.1
gatcaccaagcctacacccttcactgtaacatgagcggtgtacaccaacagacgtctacaccgaacagactcgcctactatatcctaccacggcagaggccgtagaataaccacacaccggatcagacggtgtatacgatctcctcc

SEQ ID NO: 57859 - DNA, 215 bp, Zea mays
  Clone ID: MRT4577_152766C.1
cggaataaatagttccggaattccctaaaccgtcctttaatttttccctgccaagagaagggaatggagtcttttcgcaggttccaacccgccggcattctgcttcttctggttattggggccaaccattttgccccagccaagggattccgagaggtccagggagcgattggtggggccatgcatgatcgcaaccacctgcgccaatgtgggcc

SEQ ID NO: 57860 - DNA, 351 bp, Zea mays
  Clone ID: MRT4577_152767C.1
atggcccccaagaaagtgaccaccagagctagcactgctctagatgatgctacagaagcggccatcgctgaaaagaaaggcaaggcaaccctcaccagtgataccctccagactacaactaagaacgaagcaggagcactaaaccgcaagcatccccgaaccaaagacccactcactcccgagggcagcattcatacgtgtagttcagaagaccccccctgggacgatgtcccaccaggtttctcccccacggaggccgaagacaccatggaagaaggcaaagtcatgggtatctcggccgaagatcaactcaaattacgagcacttcgcataaaaaacaatcacctatag

SEQ ID NO: 57861 - DNA, 661 bp, Zea mays
  Clone ID: MRT4577_152768C.1
ccggccggaacaaccatcggccaattccgaagaagaagaagaagcaacaggaatcgtagcagccaaggcaaccgtgagcatgggctccctgggtcctagcgtggtgaccctgcaggaacagcagcagcagcccaagccccgcaaaccggcggcggcgggcggcggctgccacgagctgggcagcagagcagcaactgcggcgggtcgtcgttccggatgccgctgcactacccgcggtacaagaaggcggactacgaggccatgccggagtggcgcgtcgactgcctgctccgcgagtacggcctccccgtcgccggggatctccgcgacaagcgggagttcgccatgggcgccttcctctggcccggtcagtactgatgaactgtacgtttgttggagtcccggatcgaagcagcatatgcataaggagtggagattctccccgccagattcaacatttcatctacacgagacataggatcgagtgattgggtatgcatcagctcgttctcgatcgttccatgaaactactataattcatcagcatctgtacaataccatgtggctgggcagagtatgtatcgtcagtacgagttagttatttcatcaaaaatggaataaacataaatattccagcttctatgtctaaaattcatacgcc

SEQ ID NO: 57862 - DNA, 808 bp, Zea mays
  unsure (1)..(808): unsure at all n locations
  Clone ID: MRT4577_152769C.1
tgggtacctcgaggccggccgggccgggaataacaaccatcggccaattccgaagaagaagaagcaacaggaatcgtagcagccaaggcaaccgtgagcatgggctccctgggtcctagcgtggtgaccctgcaggaacagcagcagcagcccaagccccgcaaaccggcggcggcgggcggcggctgccacgagctggagcagcagagcagcaactgcggcgggtcgtcgttccggatgccgctgcactacccgcggtacaagaaggcggactacgaggccatgccggagtggcgcgtcgactgcctgctccgcgagtacggcctccccgtcgccggggaccttcgcgggaagcgggagttcgccatgggcgccttcctctggcccggtcagtactgatgaactgtacgtttgatggagtcccagatcgaagcagcatatgcataaggagtcgagattctccccgccggattcaccattttacctacactagacataggatccagtgattcggtatgcatcagctcgttctcgatcgttccatgaaactactataattgtcgtcgctctcctcctcacctcgcgtgcatcgttgtggaatcagtaattcatcagcatctgtacaataccatgtggctgggcagagtatgtattgtcagtacgagttagttatttcatcaaaaatggaataaacataaatattccagcttctatgtctgggattcatataaaaaaaaaaaaaaaaaaagcggccaggtgatgaacaaccgagactanaacatcanaaaaaaaaaaaaaaaccgcggcc

SEQ ID NO: 57863 - DNA, 546 bp, Zea mays
  Clone ID: MRT4577_15276C.1
gccggccgggttggggtccttcaagtataaacaggtacattctcgtaaaaatgcccaagcaggtcaccgacatcaaaaagttcctcgagatcgcgcgccgaaaggacgctaccctcgcccggatcaagaagactgctatcaagcaccactcgaccaccgcctcgaccaagtccaagtcggccaagcaaccgaccgcgaccaagttcaagatccgatgctcgcgattcctgtacacgctcgtcctcttcgacgctgagaaggccgagaagctgaagcagtcgctcccgctaggtctcaaggtcgaggaggtcggcaaggccgccccgaagaagaagtagattgtaccataaccctcgctcgacccgactgtttgttacctacctcttcttctcatctcaccaacacggggcatggctggcggcacatgatccgagggcacccggcggcacatgggctgccggacccgagggcctttacgacgatagtgggatataggcatcgatgcatcctgtagaccgcagaaaaaaaaaaaaaaaaaggccccta

SEQ ID NO: 57864 - DNA, 603 bp, Zea mays
  Clone ID: MRT4577_152770C.1
ggctcggggctagatttgggaggttcaggaggactcactcaggagggaagctttttccggtcggccggcgacatggcggaggagaagagcgctctgcagtcggcgagggagtgggtcgtggagcacaagctccgggccgtcgggacgctgtggctcagcgggatcgtcggctccatcgcctacaactggtccaggccgggcatgaagaccagcgtcaagctcatccacgccaggctgcatgctcaggctctcacactggctgccttggctgggtctgggctggtggagtactacgatcaccaacaagggtcaggatccaaagtccaccaatacgcaaagcagttcctatcatctgatgctgatagcagtagcagcccacaaaaagagtagcagccttacgaagtaccatctgtggagtgggtcagtgggtgttattctctgatcaaataattttgcctatggcattctgtggcaacttaggcggagcttcgcctgattttctatgtaatgtaagctgctgaaacctgaattaccgtgtatgaagatggtaccatgcatatgttttcctgaatgtcttgaaatgaaataaatggtttttttttt

SEQ ID NO: 57865 - DNA, 262 bp, Zea mays
  Clone ID: MRT4577_152771C.1
gcttagtgtattaggtttggagaggtttgttaagtacttaggtatgttattttgttttgattgttctctatattattgacaagctccatattttttattagtgtattattttgttttgattgtcctccttgttaggcaatctcctttgttacaaggaataattcatgcaacgacacctagttcagtgaaaaaaaaaatatataaattaaaaaaaaataaaaaaaaaaaaaaaaaaaaaaaaaaaaaataaaattaataaatt

SEQ ID NO: 57866 - DNA, 341 bp, Zea mays
  unsure (1)..(341): unsure at all n locations
  Clone ID: MRT4577_152772C.1
cccactttacccgagccgccnagcgccgcgagccgagcagcccnaggncncgcggagggaggncnggnngannnggnccaangaggcggaggaaaaggnggggcggancnncgncggcgggccggcgnggaacaccacggagcgcacgcncgagcgcaccnncggncagnacggcaaggncagcgaggcncaggccgnagnggaaagggagacaggccgcnccaggggannnggannngncacaaaancagaaccncgggccgnggangcngccanncggggaacgcanaacggagaacggganggccgcaacangncggcgaacaaagcngaacccagga

SEQ ID NO: 57867 - DNA, 481 bp, Zea mays
  Clone ID: MRT4577_152773C.1
gccaacactagagcagttgccacttagggtttcaagttctcaacaatcaagctgcaaaatcgagtacatcaagatggtggagattctgttcgaggatatcttcactgtcacccagctcgatcctgatggaaagaagttcgataaagtgtcgagaattgaggctgtaagtcagcaattcgacatgcagatgcagctggatgttaatactgagatctatccccttagtgtggggaagaagtttactatggttttggctccgacgctgaatttggatggaactcctgataccggatactttattcagggagggagaaaatcgcttgctgataaatttgagtatgtcatgcatggaaagctgtttaaaatctctgaagagtctgccagtggacctaatgtgaaagtggagatgtatgcttccttgggaggtcttctgatgatgctgaggggcgacccgtcaaatgcggccaatttcgagctggat

SEQ ID NO: 57868 - DNA, 329 bp, Zea mays
  Clone ID: MRT4577_152774C.1
cctcgaggccggccggactacccgtgtaccgaagaaatgactgatgcaaaggaactccacgccttcataatcctattcttgcttccgctacccctcaaactccatcgcgcacctatggcgaacgacggtgagggcaataagtgcagaatcgtgcagcgatgctgcgacggtatgaacgtccaaaactggctctgcgcagagatctactgcctgccagtgtgaccagcgcgcggctctgcttccctgctcatggctttcgtcatcatcgacggggatgatgacctcagtctccgcaacgagctgctcgagaaggttgatgaggataacta

SEQ ID NO: 57869 - DNA, 386 bp, Zea mays
  unsure (1)..(386): unsure at all n locations
  Clone ID: MRT4577_152775C.1
attagctatatctactccacagcgcagaagaacccgaccgacaccctcagggtgtcgatcgttgccctcgctcttctggctatcgctgcgagcgccacctgcacgcatacaagcggggggtgacggtgacaaccaccgccgtcggttcatctaccgccgtcggtgcatttgccacctccggatcacctgccacctccagtgcatctcccaccgacggtccatctgacgacggcggtccacctgatcaccgaacggtacatgtgcctgcagncggttcatctagcgccgccaccatgccactaacctacataaccgccgctgccttagcctgatccctagccacacccatgcccgtgccaacagccgcattcaatcccgcgccagct

SEQ ID NO: 57870 - DNA, 253 bp, Zea mays
  Clone ID: MRT4577_152776C.1
atgctataagcgcacctttcgctgtgtctagcattgttcatcgcgcgatactgcggaccgtactctgatgaacacatcaacaatgcgggctacatggtcttcgttggcagggacttgaaatgtaatggtaccacaaatgacgtcatgaacatgggcataaccatgattgaaggacaggacgttgatgcaaatcttgcggccgtcggtgagacccctacttatgtgccttcttgctgtggacaacatccagctg

SEQ ID NO: 57871 - DNA, 245 bp, Zea mays
  Clone ID: MRT4577_152777C.1
agccgacgcgtccggttcagtgcagagggagacatcctcgccgccatctgaacttgccgcggccgtctctacaggcgcaacatgccagccgcatctagtgatgctgatgaagttgattctgtgaggcgtctccgacgacaccacctgcatcatgtcgccggacgccgacgcgatcgtgacgtcctccactataggctcgctcaccgtcgtcttgtaatgcatcatggacgtcgtgcacttgttca

SEQ ID NO: 57872 - DNA, 1323 bp, Zea mays
  Clone ID: MRT4577_152778C.1
ccggggtaaaattatgtccaaacccaccctactcccgcgagcgcatttataaaataaagggcactgatgcctgctgtcttgttctgcccccctgttttccttttattctgctccgctctgttctcctgcgggcctggctgcgccggggaggcaaatgcttagcacaggacttggccttctggtatcccccgctaaaccataggcgtgttctattggaagttggaacaaaaccatggagagtgaaatcatggcctcctatgaaacaaagcagaattgcgaaattagggtatttgagagttcagacgagatggcaacagatctggcagagtttatttcacaagcttcagaaatttcagttaaggaaagaggatgctttgctattgccctttctggaggtcctcttgttagacatatgcggaagctctgtgaagcaccatacaacaagacccttgattggtctaaatggtacatcttctgggctgaagaacgtgcagttgcaaagaaccatgcagagagtaactacagattaacaaaggaagaatttctctccaaggtgcctatccttaacggccacgtctactccatcaacgacaacgcgacggtggaagaggcagcgagcgactacgagttcgtgatgcggcagctggtgaaggtccggacggtgggagtctcggagagcaacgactgccccagattcgacctggtccttctgaacatcgggcccgacgggcacgtagcctcgctgttccccaaccacccagcgctggagctgaaaggcgactgggtgacctacatcaccgactccccggagcctccgcccgagaggatcaccttcacccttcccgtcataaactcggcgtccagcgtcgccattgttgccaccggagaggacagggcgagagccgtgtccttctccgtctctgcctgccaggaccaggaggaggaaggcccagcagacgacgacgctggaacgacgatgataccgccggctagcatggttcagccaaccgatgggaagttggtatggttcctggacgaggcggctgcttcgtctcttgaggcttcgaatggcgcttgcgagcatcaagaagggtactgagaacaaactggatgctacctctgcgaacgccgcctactctctggtttcttcagagtcgaaagtttgcatgcagttggatgtgggcaattaagagtgaagcggtttgtgtgtttttatgtcaagacctcacgcatatcgcgcggagtagctaagctcgaccgtatattggttgcgacgtatgatccttgttttatttaagtgtgttggcggttttatcctacccg

SEQ ID NO: 57873 - DNA, 612 bp, Zea mays
  Clone ID: MRT4577_152779C.1
ggcgattgggatcctcgaggccggccgggacctccacacattcaagcacctcctcctcccccgccggccgacgttgagcatcagaaggctaatgaggtggtcgctccagaggcggccgtcgccgagcccgatcacaaggaggaggaagccgtggagaagaccgtcgtcgaggaggagaagccagcggcagccgccaatgcagaggaaaaggtcgccaccgccgccgagaccacgacgacggtggaggcgaagaagaaggacgtcgaggaggccaggaaggagaagcaggcgcagcaaagctgaccgactgtccgtgcatgcgcgtgccaactaatataattattggctgatgatacctgatgatcagtgtgtgatcgagcaaggagacgacacttgaattctctacagttggcatagcggcataggtcgggagagacactctcgactggccacaccatgtaacaaactaaccttcttcgatgtctcccattattttcctccacggagttcttctgatgaaacaacatgttctaattggggaaaaaaaaaaaaatgtctccattattaattaatcgctttgccacgaaaaaaaaaaaaaaaaaatttgcggcc

SEQ ID NO: 57874 - DNA, 388 bp, Zea mays
  Clone ID: MRT4577_15277C.1
aatgatttatcttttttaattttttttttgggggggttttttaaaaatatcctcggtttttaaccaaacttatgtatttacaaatatatatgccactataacggtgacataaaaaaaaagatcgtgggaaaaaaattgtataagaagagcaaaaaaaaaaggggaagcaagaaaggatgaaaaaaaaacgggggggggcccaaacaagggtgctcccctaaaaaagacccccccccccaaaggggcaaaaaaagtggtgcaacaccacaccccccccagggggggggggagcaaaggtccttctaacgaagagaaaaaaaaaaaacacacgaggggggggaaaggacaagccccaaataatataggcacccccgagaaattttctgag

SEQ ID NO: 57875 - DNA, 1342 bp, Zea mays
  Clone ID: MRT4577_152780C.1
aaaataaagggcactgatgcctgctgtcttgttcggagcccctgttttccttttagtggtgctccgctctgttctcctgcgggcctggctgcgccggggaggcaaatgcttagcacagattcttcattttaagatatttgaaaaccgaaatgtcggtaggacttggccttctggaatcccccgctaaaccataggcgtgttctattggaagttggaacaaaaccatggagagtgaaatcatggcctcctatgaaacaaagcagaattgcgaaattagggtatttgagagttcagacgagatggcaacagatctggcagagtttatttcacaagcttcagaaatttcagttaaggaaagaggatgctttgctattgccctttctggaggtcctcttgttagacatatgcggaagctctgtgaagcaccatacaacaagacccttgattggtctaaatggtacatcttctgggctgaagaacgtgcagttgcaaagaaccatgcagagagtaactacagattaacaaaggaagaatttctctccaaggtgcctatccttaacggccacgtctactccatcaacgacaacgcgacggtggaagaggcagcgagcgactacgagttcgtgatgcggcagctggtgaaggtccggacggtgggagtctcggagagcaacgactgccccagattcgacctggtccttctgaacatcgggcctgacgggcacgtagcctcgctgttccccaaccacccagcgctggagctgaaaggcgactgggtgacctacatcaccgactccccggagcctccgcccgagaggatcaccttcacccttcccgtcataaactcggcgtccagcgtcgccattgttgccaccggagaggacagggcgagagccgtgtccttctccgtctctgcctgccaggaccaggaggaggaaggcccagcagacgacgacgctggaacgacgatgataccgccggctagcatggttcagccaaccgatgggaagttggtatggttcctggacgaggcggctgcttcgtctcttgaggcttcgaatggcgcttgcgagcatcaagaagggtactgagaacagactggatgctacctctgcgaacgccgcctacagtactctctggtttcttcagagtcgaaagtttgcatgcagttggatgtgggcaattaagagtgaagcggtttgtgtgtttttatgtcaagacctcacgcatatcgcgcggagtagctaagctcgaccgtatattggttgcgacgtatgatccttgttttatttaagtgtgttggcggttttatcctacctgaaactagattccttcttgtgag

SEQ ID NO: 57876 - DNA, 2139 bp, Zea mays
  unsure (1)..(2139): unsure at all n locations
  Clone ID: MRT4577_152781C.1
gtcgtcgtctcactcaccccgccttcacgcctccctcaccaaataaggtcccgcccttttccgacattcacaggggggacaggaaatcagcggccatggcctcgattccggcgacgaccttcgccgtcatcttatccgtcctcttctgtgccgcggctggcaccgccgtcgacaacgacctccccgactacgtcatccagggccgcgtctactgcgacacctgccgcgccgggttcgtgaccaatgtcaccgagtacatcgcgggcgccaaggtgaggctggagtgcaagcacttcggcaccggcaagctcgaccgctccatcgacggggggggccggaaaaaaaaaaaaaaaaaaaaaaaaaaaaaaaaaaaaaaaaaaaaaaaaaaccccaactccttagggcgattgggtccctcgagcccggccgggacctccacacattcaagcacctcctcctcccccgccggccaacaactcagccgccgcaaccgccacatcagccatgggcgcctgcgcaaccaagcccaagacgcttgaggggcaggccccagctgaggccgccgtctccacacccaaggttgcgcccgaggccactccaatctccgttgaggttgcggctgatgaacaggtagctgagaaggtggtggtggaggagccggctgcggcggccgacgttgagcatcagaaggctaatgaggtggtcgctccagaggcggccgtcgccgagcccgatcacaaggaggaggaagccgtggagaagaccgtcgtcgaggaggagaagccagcggcagccgccaatgcagaggaaaaggtcgccaccgccgccgagaccacgacgacggtggaggcgaagaagaaggacgtcgaggaggccaggaaggagaagcaggcgcagcaaagctgaccgactgtccgtgcatgcgcgtgccaactaatataattattggctgatgatacctgatgatcagtgtgtgatcgagcaaggagacgacacttgaattctctacagttggcatagcggcataggtcgggagagacactctcgactggccacaccatgtaacaaactaaccttcttcgatgtctcccattattttcctccacggagttcttctgatgaaacaacatgttctaattgggcttaaaaaaaaaaaaaaatccattataaatttgaatcgctttgccatgaattattattcaaaaaaaaaaaaaagaaaaaatttaaaaggggcctctaatgttgcgccccacacgcccgaggccactccaatctccgttgaggttgcggctgatgaacagggagcggtagaaggggcggtggaggaacctattgtctgactccagacgaaagaaaccaatgctaacgatgtgagcctttattaggatctcgctttcctgtttgattactcttcgctttttctctggctcggttgtcatctgatatttttttacccctaaaaatgatgcgcgagggtaggatttgctttgctgatgggatgataagccttgacagaaacttcagtgttgacccaaatatcagactacaattatctgatcgactccaaattcttgccttttgaacttgttcgtagtatttattttgctcttgaagtcgaacgttgccgtttgttttttgtttcaacctggtatgtgtttgtgtgttgtccgtgcacaataagccgatgctctggatgatgaacacaggaaggaagcatggtagtgtgcacggagaaggaggaggtctgcatgtctgctcgctttgatgccctcgggctctgatctcgcgggcctggattcgacctacacgcgcgctagcttagattctcttgcgaactgtgacgtctttttgaatggattttaatgagcgacgattcaggcagcccctttgtccgatctcaatgtcaatggaggtgttgcgttgctcggagaagaaaatcttttggtcttcagatcggttgaggtggggaggtcacttccnccccgttgaggctggtctagtaaatcttaagaacataccctaacattatcaatgttgctgagccctgttagctgttttgttgttcgctggatccttttgtgctggttttcgttgtggctgaggagagctgtttggattgagattttgtgccgatggatc

SEQ ID NO: 57877 - DNA, 253 bp, Zea mays
  Clone ID: MRT4577_152782C.1
ggggttagttaaacacaaaaacagtatatcaccttataaaaccctttcccccaccatggcattcacgtccaccgttcacacggcacctccccaaaacaaaaaagagcaacttctctcacccacgctcacatactgatcgatcaatacaaccaaaaattaacaaccaacaactatcttctgctccctatcctgacatacccgtttacaagttttatttttttttccacttatttcctcccttcccccctattcc

SEQ ID NO: 57878 - DNA, 856 bp, Zea mays
  Clone ID: MRT4577_152783C.1
gaggccggccggggaaaaaaaaaaataaaaaaaaaaaaaaaaaaaaaaaaaaaaaaaaaaagaaaaaaaaaaaaaaggacctccacacattcaagcacctcctcctcccccgccggccaacaactcagccgccgcaaccgccacatcagccatgggcgcctgcgcaaccaagcccaagacgcttgaggggcaggccccagctgaggccgccgtctccacacccaaggttgcgcccgaggccactccaatctccgttgaggttgcggctgatgaacaggtagctgagaaggtggtggtggaggagccggctgcggcggccgacgttgagcatcagaaggctaatgaggtggtcgctccagaggcggccgtcgccgagcccgatcacaaggaggaggaagccgtggagaagaccgtcgtcgaggaggagaagccagcggcagccgcccatgcagaggaaaaggtcgccaccgccgccgagaccacgacgacggtggaggcgaagaagaacgccgaggaggccgggaaggagaagctggcgcagcaaagctgatcgactgtccgtgcatgcgtgccaattaatataattggctgatgatgcctgatgttcagtgtgtgatactgtgatcaagcaaggagacgacacttgaattctctacagtttgccggagagacactctcgaccggccacaccatgtaacaaactaaccttcgatgtctcccattattttcctccacggagttcttctgatgaaacaacatgttctaattgggcttacaaaaaaaaaaaaaaggattattaattaatcgctttgccatgaattattattcatcaaaaaaaaaaaaaaaaggggcggcc

SEQ ID NO: 57879 - DNA, 1402 bp, Zea mays
  Clone ID: MRT4577_152784C.1
ccccgcgtccgcccacgcgtccgcccacccggccggggaaaaaacgatacacgccgcgatagaaacactcagacacaccctctccatccgcccctcctcttcctcctcccgtcgcggcttcccccgattggcatccggggcgggcccatcccccacccggccgccgcgcgcgtccatggacggcctgcacggtacggacgcctgcttctcccccgcgagggccgtctcgccgcaggtgaggctcccggggccgccggacgtgggcagtcagtacctggcggagctgctgcaggagcaccagaagctgggacccttcatgcaggtgctcccaatctgcagcaggctgctgaatcaagaaataatgcgggtgttgaatatacggcgccagcatggtgctgctgtggactttgagaagtttgcagccgcaagccccaaccagatacatccgtcaccccccatgccgaacttttgtggaaacggttttagtccatggaatgggatgcattcagagagagtaggtgttccgcaaggagctatgggttggcaaggacccccacagagccctgcttcttatatcgtcaagaagattttgcggttggaagtaccgacagaaacataccctaatttcaattttatcggtcgtcttcttggaccaaggggaaattctttaaagaggattgaagcctgtacaggctgtcgtgtattcatcagagggaaaggctcaattaaagattctggcaaggaggaacaactcaagggaagacctggctatgaacacttgagtgaacccctccatatcttgattgaagctgagttacctgctaatgtgattgatgcaagacttgcaaaggcacaagagatccttgaagagttgttgaaaccagtggacgagtcacaagactactacaagagacagcaactccgagaacttgccatgttgaattcgccactccgagaggagagtccacgttcaggcggtgctcctccaagtcccttcagtaagactgtctccggtaggccgaataaaacaggggacacagaattgtagatgacactatttatcactgtttgaagagagaagtttgaaataggggatctactggagatagcctaacggcggcatgaaaagagtgaaacaatgacacccattcctccatcttgatcctccggcaaccccacttagtccatgccttcacatcctattttccatgagcaaagctttcatgatggtgttggtagtgtgtgacatcctttaatgtactagcaggtgaattttgatctcccatcccatgtgacattaaccttgagtgacagatgactatgcgtagtgtatcctctatggctgtataattagaacatttgatttatttgttactggtaatgctgagatatagtactgtgt

SEQ ID NO: 57880 - DNA, 502 bp, Zea mays
  Clone ID: MRT4577_152785C.1
cctcgagttttttttttttttttttttttatttttttttttttttttttttttttttttttttttttttttttttttttttttttttttttggggggcgaaccattttggtttaatatataataactaaacataaatttacacatttcacgggcatatgtcccacaaaacccacccttttgggtgatgtttggttatatgacaaaaaaattttccgcacaagctaatcaaaccttgggactgggggccccccccaaaaaaatcgcattcgaaaaacctctttcataatttgggcgataaaagccggcagccccccgcgccacgggaaagggcaacagcccttttacgccccgctttgtgccccctgcggccccttgtctggagaaacaaaccaactcttggaatgccctctctgtagatagctgcaagcgcatcacgtttggtaacctctcctgcaggggcctcaccagggatcactgtaaccctcgagtcagattcgggcg

SEQ ID NO: 57881 - DNA, 1013 bp, Zea mays
  Clone ID: MRT4577_152786C.1
gagataaataccggcacactagttcaccgtaactcagaatctgcacagtactatatctcagcattaccagtaacaaataaatcaaatgttctagttatactgccatagaggatacactacgcatagtcatctgtcactcaaggttaatgtaacatgggatgggagatcaaaattcacctgctagtacagtgaagaatgtcacacactaccaacaccgtcatgaaagcttgctcattgaaaaatagggtgtgaaggtatggactgcattggggttgctggggagtcaagatggaggaacgagcctcggcggtgtcattgtttcactcttttcatgccgccgttactgaagggactaggaggagcaccacctggatgtggactctcctctcggagtggcgaatttagcattgcaagttctcgcagttgctgtctcttgtagtagtcttgtgattcgtccactggtttcaacagctcttcaaggatctcttgtgcctttgcaagccttgcatcaatcacattagcaggtaactcagcttcaatcaagatatggaggggttcactcaagtgttcatagccaggtcttcccttgagttgttcctccttgccagaatctttaattgagcctttccctctgatgaaaacacggcagcctgtggaggcttcaatcctctttaaagagtttccccttggtccaagaagacgaccgataaaattgaaattagggtatgcttctgtcggtacttccaaccgcaaaatcttcttgacaatataagaagaggggctctgtgggggtccttgccaacccatagctccttgcggaacacctactctctctgaatgcatcccattccatggactaaaaccgtttccacaaaagtttgtcatggggggtgccggatgtatctggttggggcttgcggctggaaacctctcaaagtcgccagcaacaccatgtggcgccgtatattcgacacccgcactatttcttgattcagcagcctctgcagattgga

SEQ ID NO: 57882 - DNA, 297 bp, Zea mays
  Clone ID: MRT4577_152787C.1
ttttaatgatttcttttttgcgattttttgttttagaatggatttttttgtggtatttgtgcaagggcccgacaaggaccgcacaataacacccctgggggagaaacctaaactgcccaaataatttcttgacccggccaacaatatcaatagcacccaggggaacctgcagcccaagaagaaaattcttctgggcgagcagggggaggaggttatgctgtcgccccaaaacgaaacccaaggggcctccaaaagacgtccccaaggccgtcagacccttggaggggttttcccacc

SEQ ID NO: 57883 - DNA, 437 bp, Zea mays
  unsure (1)..(437): unsure at all n locations
  Clone ID: MRT4577_152788C.1
tgcacgcgtacgnnaattcgtggnatcctctagaagcggcgcggcgtggggggggggttttttttttatatttttttttgtttttttttttttttttttctatatccaaacaagattattggggcatataaaccagcatatagctccatggggccacttccaacgaatacagaaaaaaaaaacatgaacagatatttggggtcgtcgggggcaaaacatattcacaaaaatacttattcagcaacatgaatgggctggaaaaataggatatcattgcccctggctcctaatataccatgccttgcaatataccggcaatgcttgggtactatgtacaagagctttaaggagagagctttcctgacttggggtttgggtncnangcactaatttttagcccctatatttttattccatttaaggccctaaattgccaa

SEQ ID NO: 57884 - DNA, 468 bp, Zea mays
  Clone ID: MRT4577_152789C.1
ggcggagagcccgcgcgtgagcgcgtccggacgcgtggtgttccgcggtctggagcgctactcgagcacgctagcgtcagcagacgtcgaaccgcacccgatgggcatggagcggtcctactcgaccaatctgcatgtggatccggtgatcaatgtcttcggtttcggccacctgttcatgccgtcgtagccggccaaggagaggggcgtcatcggccgcaagaacaggcctgacaatccacatgttatcttggcaaaataattagaaactgttggagaatacaataatgtttgctagtccaaaaacttttgaggagatcccaatctaaacatattgggaggttacatattggctacccttggagatgcttgaaatattgtaatactaggtgagtgcccgtgcgttgcgaccggatttaaaaaattggatggaacatattaccggacgacaaatatcactatggtatt

SEQ ID NO: 57885 - DNA, 880 bp, Zea mays
  Clone ID: MRT4577_15278C.1
ccggccgggactcttagtcgttcttgttgctcttcctgttgtgttgctccgttttcgttaggagtcatcgttttgcaagattatcataaaggatcacaaaagaatttacagcgatgttgaagaatatcatctttaataacgataagaacaagactttcaagcctaagaagagcttttctaaaggaacaaagcgatatgagcttcacaaacatgctaaagctacactcggaagcggaaatttgagacaagctgttgttctacctgaaagagaggacatcaatgaatggttggcagttaatactgtggatttcttcaatcagattaatctcctttatggaagtatcacagagttctgcacacctaagacatgtgaagttatgtccgctggacccaaatatgagtatttgtgggctgatggtgagacaatcaagaagccaatcaaagtatcagctcccgaatatgtagactatcttatgacatgggtacaaagcatccttgatgacgaaagcgtcttcccatctcgagttgatgttcctttccctaagaacttcagagatatcatcaagcagatcttcaaacgactattcagagtctacgctcacatctactactcacatttccacaagatcgtcagtcttggagaggaggctcatctcaatacttgcttcaagcacttctattacttcatctgtgaatttaacttagtggataagaaggaaatgtcacctcttcaagagcttatcgataaccttactcgaaatgacaagtaattgagtaatattgacaataactacgattacgatcatttgtataatccagatcatcgtgctctttacagatcatctgattgttcatttgtaaaataaacacaacaacaagg

SEQ ID NO: 57886 - DNA, 2198 bp, Zea mays
  Clone ID: MRT4577_152790C.1
gggaaacaaacgtcattgcatcagttttttccctcaacaaatcatacgctagcaactgccaatacaatgtagaataagcccacctgaaccttttcaagaatttataggcctggtcgtttaggtttaatttataccgacttctactggttctacaatgtttggctctataaattacagctgcaacaatctaaacaaccgactttaatctgacccgaacagcccgtatgagatgatcacactgaggaaccgttaccttccaggccacatgtttacgcatcggcctgcagcagctcctgcactgtctgaccaagcttgggctcactcctaatgctctcgatccatctcgcgctgatccgcaccctctccaggctctgcttcagtgctctctcgaatgatggcttaacttggccagcaaagaactcggtaacctcgacagctttctcctcggaggtaaaccgtgggacaatggactcaatgaagtctgatatgagtgaactcgatttccatgtcttcaacacgtgatcccagttttccttacaaacaactacaggagcaatgtcattgacaccactcccatttaaccatctatccatagccgtcctaccagcaagattgaggagccaagccttccaattaggaagtcgaaccctctcaacccaaaccataaggtcaatccttcttagcttcttgtctgctccctgtccaggtagaagtctggtgccgacacgtggccggggacgcctgtcgtaagcctttgacatggggcccgccagcattaagttcggacgagatgcgtgcttgcccgcgccagtgtcaggtggtgtgcgccccacattaaatgcacgcgatgtgcgaagtccgcaaggtctgggcttcaaccaggtccatgcaatttctcgtccttctaagctaatgccaccaaggatgtaaaatgaatcttgattccgcacccgaacgtcaccaacagcgacatgctcacggacatagtgcaggtcaatctccacgtgcttcgtgtgctgatggtacacgggattggtggagaggtagaccgcgttgatgttgtcgtagtaggcgagggcggcgcgctggagggggctgtggagctcctggagaagctggcgtagccaggaggcctcgatgacgtcgttggccacaacgtggtactcggcctcagcgctagagcgagaaatgacaggctggcgcttggcagcccagcagacgaggttggcgcccaggaacacggtgtaacaggaagtggagcggcacgtgtcgggacagccagaccagtcagcgtcggtgtagactacgagcttcgacgttggggagggtcggagtaggaggccgtagtcgagggagccgcggaggtagtgtagaatccgcttgagagcagtgatgtggggctctcgcggggtgtgcatatgcaggcacaccttctgaacggcgtaggcgatgtcgggcctagagaaggtcaggtactggagggcaccggtcaagctccgataggacgtcgtgtcggtgatcgggggcccgtcatcctcagagagcttcgcatgagtgtcgacaagcgtggagcagggggtggcgaacttaacgacggggctaaaggtctcgtcatggtccactccgaggcgttgggtgaagccccgaaggacccaacgggccttgtagcggtcgagagagctgtccgaggtcagcttgtggcgaaagagacacatgtcagtgaccatgttggtgcctggtggacgcggcacgaggtcccgggtgtggttggttagcagggccgcgtactccatagcgcaacgccagtgggggtcggcgagggcggcgagaacgtaggaggggaccggggaggcgcccggaggggtggcagtcgtgtcagccgccaggatcaaccgaatgacggggcgaagaacgtcgactgcgtggcgagtcaccatcaggtggacatgccctgggtcgcaacggatgtcgatcgggtggtacacaggaagctcggtgcgggccggtggggcatcgagaggcgagggtgtggcccacttgcggcagtggtagacgagggcggggtcggcgaagcaaatcatgctcgtcgacggggttgggtcaacgggacccgagggattggcccgcccgcagtgatggtagacgagggtggggtcggtgaagcgagccgcgctcgtcgacggggccgcgcatgacat

SEQ ID NO: 57887 - DNA, 818 bp, Zea mays
  unsure (1)..(818): unsure at all n locations
  Clone ID: MRT4577_152791C.1
ccggccgggacactgcggcctaaaccgacccgtaaccgacgctatggaagacgacgacatggatgagtcgcccgatcggggcatgtctaagcgcgcatgcgatagctgtcgcacgcgtaagatacgctgtgaccgtgccgtaccttgctctaactgcaaggcaagcaaactagcttgcaaaacgactgctccccaacagaaagctcaacgccaaagagtccacatttctgagcaatatgaaaggaagattgaccgaatagaagatcgattagcaggaatcgagaatgttcttgctaacctttcgtcaaaactcggcaatatggatcttgccaaagacagccccgaaacaggcagtcagtcacgttcgagtcgagtaggaagaagtccaggtagtggcttacaggaagcccctacaccggcgccattcgagggcgaaagctcaatcagcattcaatccgtctatgctcgtgagatgctagctcaggtaattgacagcacaccgtcaattggccagaatgaagaagtcaagatggcacttactgctctttccgagatggtatcgcaaccaagccagactatggctccaagcaaccgattgatcaatcgctcccttgccgaagtggatcccactagacttgagcagcctccatgnggtggaggtctgcaatgcgttggacacagctatgaagtattcaacaatgacatttgcccgtgatcttttccgttcctcaagatgccaaacctgagggaaattttcgatgacgcgtaccacaaccctggcacctgtagcgctgcccgacgcgtgcttacctatggca

SEQ ID NO: 57888 - DNA, 426 bp, Zea mays
  Clone ID: MRT4577_152792C.1
gagcttattagtcggcggccgcccttggctctttggaaagctaatcacgagccatggcgctcatatccgctcaaaatcggttacggaggacaggccatgaacggaaagcatgccggacacaaggtccatgtgtaacaattagatcgtgtacctgtacacacatgtggagagcgagaactttgctggagaaaaaaccaaataactactaggggatcttggcgtcaaacttacaactgaagtcatagtacacatccctgactcccgcaagaggaaaagtacctatatgctcgcccaacaaataccaacaggacggaagcgatagtcgccctaaaggacccgctaagtaacccaaagcagcttactgactgcgtcaccagatattgcagactgagtggcagctcacagcactgaagcggcgacaacacc

SEQ ID NO: 57889 - DNA, 916 bp, Zea mays
  Clone ID: MRT4577_152793C.1
ctgagagagccttcaaataaaaattagagggcattttgggggctattgctagagatgctcttagcttgtaggctaaacacatgttcatctcacatgaaactcattagtccacctaaggttgtcattcgattacaaaaatcaaactaggattttagctagcacaaaggcacatcatatatctctacacatacaactatcttagattgttcatttatggcctccttattgaataatgctcatagagtttagatgaactatatgtttttgaactctaaccaaaatataacttacccatcacttttacaattattggagtgtgcattataatttcccacaatatacatgtcatgaagggatctctacctaaacatctaccattaactcaacccctttgaaagtcgcctagaggacgaaccgaccgagctccccctcgatcgtctctcgcttgatgatctttgtcacctcatccccttcgtgcgcggttttgagcatgtcccaaatctctttggcacttttcaacccttgcaccttattatactcctctcgacttagagaggcgaggagtatagtagtggcttgggagttgaagtgctggatttggtcgacctcctccgaatcgtagtccttgtcccctaccttcgacaaagaccgggtctctttcaaccctttccctctctcaaacggtccctcggaccgagtgagcttttattctcaatcaattagaacacaaagttcccacaaggaccaccacacgattggtgtctcttgcatcaattacaagtgagtttgatctcaagaaagaatgagaaagaaagcaatccaagcgcaagagctcaaaagaacacaacaaatctctctcactaatcactaaagctttgtgtggaatcgggagaggatttgaacacttggggtggtg

SEQ ID NO: 57890 - DNA, 462 bp, Zea mays
  unsure (1)..(462): unsure at all n locations
  Clone ID: MRT4577_152794C.1
gcgctctgctgtgngagcaaaacctcgctctggcacgggaagtacaaggtgcaaggtatctctccgcaggacggacgttcggcacgttctcttttatttgattctggccgaggtacgaaatgccctggggtggatggcgtgaccgccgccaagttcggcaccgtccaagcccttcgcgggggatgggatctcgcagtctctccacatgaccatccagaccgccgtcctcatcgagaccctcaccgcgctcggcgcccaggaccactggtgctcctgcaacatcttctacactcaagaccacgccgacgccgccatcgggcgcgactagaccgccgtgttcggctggcaagggggagaccctctatgagtactgggggagcaccgagtcgctgcctaaactggggcgaagcgggcggcccccacctgctagtcgtcgacggcggagactccacgctgcttata

SEQ ID NO: 57891 - DNA, 989 bp, Zea mays
  unsure (1)..(989): unsure at all n locations
  Clone ID: MRT4577_152795C.1
ggtcaacggcagaaacactntgtttggaacagataattggatcgatggccaaagtctatgtcagctggcccctcatttggtccagatggtctcttctagggctagaatgaggaatgtccacgatgccctcatctcaaggagctgggtccatgatattagaggagctatcactgtaaatgttttgtctgacttcctcaaggtttgggacctcactacagactgggtcttaacaccagatcaggaggataagcatagctggaggctttcaagctcaggtttatattcggccaaatcggcatataccggtttctttcttggagcaacaacttttaaaccctgggaaaggatttggaaatcatgggctccaagtaaatgcaagttcttcatgtggctcgtggcccacgatcgctgctggacagcagaccgactagcaaaaagaggactgcctcaccctcaattttgtatactttgtgatcaagaggaagaaacgataaaccacttgctggtttcctgcgttttctctcgggctgtctggtttcagatgatgaaatctgttgggttgcagcatcttgctcctaaccctgcgtgctcctcctttgaagattggtgggaaggggttgctgcattttctgctggtctagtaaacacagggctgcacaagggcttgaattctttgatcattattggtgcttgggccatctggaatcaccgcaatagctgtgtttttaatggtgtgcagcctagtcaaagcatggtcatcaattgggtcaaggaggaggctcatctctggtatagggctggagccagagatttatctaacatccttatgctccagtaatttcagtgggtattctttaatttgagtctccatggtcacgggagtagatgtcttttgttgttgttgatgttaattctctccttctccctatagcctagtgtttgtgggttcgggtggagttgtacgaggttccttgcctcaccctttcttc

SEQ ID NO: 57892 - DNA, 347 bp, Zea mays
  Clone ID: MRT4577_152796C.1
ccctggaggccaaaatttgatgggtttctggggggggggggttatggggttttgaaaaaacgggggctggttaaaatttggggggggggcccaattttaaaccactggggggggaaaaaaccagggatgtaaacccttttgtccgggggagccccaaagaattttttttgaccctgccccaggtggggggaaagcctttccttgggggccaagtcaaaaaaggccaaatttgaaaaaatgccgggggggtaaacccctttgttgggggaaaggaaaaaaaccttggccaaggaaattggcctgtttataaactccgggggaaactgggggtaaaaaaggaggttggg

SEQ ID NO: 57893 - DNA, 199 bp, Zea mays
  Clone ID: MRT4577_152797C.1
gcccgacgggcacaacagaacggggggcacagacctgttcattggaaacagattggactctacgaccccctcctcgctaacgaaaagagcaaataaaaaggcgtctgcacttgacactagggacctgctggcggatgagcttagcgggggaaaccatgatgcacacggcgggctagactcttcgagctccttggtcagg

SEQ ID NO: 57894 - DNA, 1711 bp, Zea mays
  Clone ID: MRT4577_152798C.1
gcgcgggccgcccagacccgcggtcctccccttaacgcacctcatcgagtaggggtcctatcatcgagtcatcgttcagagacagaggctggtcgatcgtcggtgactgatggcgatggcggcggcgcaattggaggcggaggaggagctgcggctggaactggaggcggtggcggcggtgtacggagacgacgtccgcgtgctccgcgacctcccaccgcacctcttcgtccacgtgcggccccgcaccgccgacgacacctcgcagcagttcgtggagctctttcttggcattaaagcatcttcacagtatccgaaggaaccaccacatatttatgctgtggaaagtaagggccttgatgagaaccgacagatatatcttatcaccagcatccagaacaaggcaaacgaactttcaaactgtccaatgcttgtgacgttatgtgaggaagctggagagatcctctcgaacatgaatcatccagcaggggattgtccattgtgtctatatcctttaatgggagaggataaggttggctcggagttgccatttatgaagttgatgtcatgctaccattgcttccacagtgactgcattatgagatggtgggaatggctccaacatggtgacacaaacccaaaggagcccaatactggagacaagcattataatgtgaatcagccaagaggattttgtcctgtttgccgcaaagtgttcgatgagaaggatattgagcatgttcgtgatttgttgggtgacaatacttccaggctggcatcactaacagttgaccttggtgaagatgaaaaggaattgctccattccgaggctgagcaaaacaggagaaaaagaatcgagtcacttgttaatctgcagcaagaactaaacggcctgattgaaccaaagaaagaccttgccatacaaccaggaatgtacgtttccgttcctcccagcacgccagacacagctgaagaagagaatgctgatcccagccaaggcacggctacttcgacctcagaaactgagcaacgtggccaggcaagcaacgccagcagcaacaagccgaagaatccaggccatcgaaggagaaacagagctaatgcatcaagacgacagcctcatggccagggccagccagctaggcagcagtggcagaggaaagaagcaggcacttcacaccaataaaagaacatcgaagcaacgaggaggatgtgacctgtgagttgtttttgtcggctatgtacatcaatgtcgtgccttgctttcgtctcataataattgcgagccatggtatgacaatgttttggcgtatgacaatgttttggcgctgctatggaagttccatgcaagtgatactctggaaagaaccctgcaccggattctatgggagtagtaagtatcaagcacatgcatgcttggctagtacatacaatatctgatttttttttttgtgtgtcattgccaggtactatgttcaaactgattgtccgtagtcagaaaagcaactgattacactgtttgttactctttgagttgcatcatgtgtttgaaatacatacattacagcttaggtcatgtgggacattacaatataaagcactgcatgcagaatttgcaggggtcggctatgttggtaacccaataacaatgcatatctgtaaggtgctattgttttgtccgctactaaatcatagcactccaaattacctc

SEQ ID NO: 57895 - DNA, 267 bp, Zea mays
  Clone ID: MRT4577_152799C.1
atggagcaccggacactatctggtgcacaccggacagtccggtgccccctgccgaccgttggtgtgggccacgggtcgcccgcggattgcgctgccgaccgttggctcaccggacagtccggtgcaccaccggacagtccgagcgagctcgcgcgcgtgctccgcgccacccgcctccacctgggccccgacgtcgccaccctgcgctgcaggcccagggtcggacgctctccatcttcggctgcttcgacgtcgcataatctatga

SEQ ID NO: 57896 - DNA, 286 bp, Zea mays
  Clone ID: MRT4577_15279C.1
cccacgcgtccgacccctctttcgagggcgcgtgggggccgccatgccacctgctaggtcgtactaacactgccccgttacgccggcgcacaccaccggctgcactctgcttcctcactcccaaggcaacaattgataaatggcagacccatgtgggaggaatggacacggcgcttttacccgcgtgctattctgccaatcatattgccctggctctactaactacaccagggtgtactcgcagggctatccattcattcaagtacgctgacttcagacattcgag

SEQ ID NO: 57897 - DNA, 450 bp, Zea mays
  unsure (1)..(450): unsure at all n locations
  Clone ID: MRT4577_1527C.1
gcacgagctccctctctctagctccccatgcagtagcagccccccccctcccatggagctggcgaccgagccctcccaagctccactcccaccttggcaagaacttgtgtgctgaaatttcagaatcttgcactttcttctaaaatctataactcgagtttgggagctcctaaaatagaccgagagatgatgatcgagctagtggtgtggtgctaaccacaagatgcagtcggtggacgacccaaggaaggatggacttaaccagtggatgctcgccaagcgagtacctccccagcaaacactctctaagtgttaaattgaaggtactctgnaggatgattggttgctggtgtgactnggccttcatccctgccaccgggataaatggtcgagagggttattgcttccgcaggagaggatcaggaggagtagngtggccaggcttcgcca

SEQ ID NO: 57898 - DNA, 541 bp, Zea mays
  unsure (1)..(541): unsure at all n locations
  Clone ID: MRT4577_152800C.1
gcggccgcccgggcaggggcaagcttttttttttttttatttttttttttttttttttttttttttttttttttttttttattttttttttntttttttttttttttttaaaaaaaaaccaaaacttaataaaacccccccaaaaaaaatgggccaacccaaagggggagttggggggcaaaccccggccccgccccccctaagggcaaatcccaacaaactggcggccgtaacaaggggaccccaccccggacccaaactgggggaaaaaagggcaaaaactgttccctgggaaaaaatgtaacccccccacaatcccaaaaaaaaaacaacccgaaaacaaaaagggaaaaccccgggggccccaaggggggaccaaacccacaaaaattgcgtggcccccactcccccctttccaagcgaaaaacccgtccgcccacctgcataaaaaaaccgcccaacccccgggaaaaggcggtttgcgaattgggcccttttccccttcctcgttaacaaactcnttncccccggtctttcggct

SEQ ID NO: 57899 - DNA, 380 bp, Zea mays
  Clone ID: MRT4577_152801C.1
cattttcgttcattatgcttggtgttgatcttcatctgtcctacatttacatttaccgaacatcagatatgcctatccatatgatgaacttattgtgagaatatcatgatgtgacttaacaaaagggatccgtacatgtatatcacacccctacaactaccttaccgacgcatgtacaagacaacgagttggacttagtagaaaccctgttcactagtggatggatggaccatcactctttaatgtaacccgatggtgatcagcgaccgtgagctaccatgttattgcgttctgatctgagagacttatattatgactatgcatgagatattgtctcttattagtactggatgagcagatgtgtcttatatatgactatg

SEQ ID NO: 57900 - DNA, 808 bp, Zea mays
  unsure (1)..(808): unsure at all n locations
  Clone ID: MRT4577_152802C.1
gccggcctggtccaaaaacgaacaaaagcagcgagaaagtgccccgggcagggcgggaggagaagctgtgggtcgatcacttgggtcttgggtggcacgcgctacaagctagggcttctgctccgtcctccgcgaatccgcggcgagcttgctagctgcgtggcttccctgtgcccgggagcggcgcggcggtagtgctggtgctgcccggaccagaccagaccagaccagccccgaaagcggagacgcccccgtgcaaccggagccgtgcgttggaggtggacaggtggtggcacctgtgggcaacggccaacggcacggcagattctggtcgatcttctangtggccgccgccggagacaagcacgcggcggccgcagctgcgtcgccgtcgtccagtgccattggtgacggtggccgtgtctttggcgctcatctcgctggcgtgccttcctgtcttcgcggatgcaagcagagcgctgcaccgcgaccgggaggagcaccggaggcagcaccaccgcacggaggacaagaagagccgcgtctcgctccctcccgacgctgacggcgactctccgcccgagcctccggactccggcggcgcgccgccgcctgccgacgacagcgactgcggcaacgtgttcgacgtgagggcgttcggcgcgtcgggcgacggctcgtgcgtcgacgacgacacggccgcgttccgcgcggcgtggaaagcggcgtgctcctccgactccgccgcggccacgctgctggtgccgtcggacggcgtgttcaccatcgcctccaccatcttctccgg

SEQ ID NO: 57901 - DNA, 138 bp, Zea mays
  Clone ID: MRT4577_152803C.1
acgggacggaattcggtcctgcggatattcaagggccttctgtggcgcatccgacaccgctcgaggtgcggtgctattacagacggtggaccctactttcagctgaaccgattccagggttggcgttccgttaagcat

SEQ ID NO: 57902 - DNA, 725 bp, Zea mays
  unsure (1)..(725): unsure at all n locations
  Clone ID: MRT4577_152804C.1
atctatcgccgctgctgcctaccccgcctcctaccggtgcgccaccactcccgcctccttccggcgcaccgccaccccgctgcctcctaccggcgcgccgccggaccctccttcttccctggagcgccgccaccccgctgcccccgccatctcccaccatggggtaaccctagatggcgccggcccgccgccgccgatgtcgcctccttctcccttggccctcagccaccaaacagccgctgcatcacgccgattaggtcctaccccaggacagccacgggtgtcgtcatctccagaagcctgcccccaaatcgttgccacctgcacctccgattcagccaacgtcggtcatctccctcttcgtcctccatgggtgttgctctgcctcggcctataattaacgtccatgccccaacgccttctcgccgttcctcccttgagcgcgccccgcggctaaccctagggactgagtcaggcttgccggcgcggccgcgtcatgtgatgttggcaccccactccacctgctctgctacgccccggtctccaacagccattctgaggaacccatctcgccgccaccatcgtctgctatcctccagcaagtgtgctgcggtacgccaatgtcctcncatcggcaagctccgcccctgccggcatcgtccacccacaccttgtcctcctctttgccaagcagcgttaagcggtgattatcagaaagtcaagac

SEQ ID NO: 57903 - DNA, 606 bp, Zea mays
  Clone ID: MRT4577_152805C.1
tcggaaccaaaagacttgcaacccacttttcactgacactgtgccgcgctatgttcactcgaatctcactaccacacagaacaaacatggccgtatctgcgcatgaccacaccaccaaattcttctggtaggccctggtcgcccgcgccgccggcgtcacatgcctggcggccgcataacacatgcgccggagcgcctagagagttccctaaacaatatgacacggccctgaccgccccaaggaccttggcccgttgtcctagcagacgccgtcgtacctgaccggcgagtaccccggccactatgggtgtgacaccgatggactctcggacgacccggagaccttcgcacgcaaccgtgagcatagaggtgatccactcccactgggcgatgctgttcgcgctggactgcgcgttcccggacatcctggctaagaacgtggtcaagatcaccgaggtgtagatgttgaaggacgacgcgcagatcttctccgaggacgtgatggactacctggggaaccccaacctggtgcacgatgcagagcatcctggtcatgtgggcgtgccaggagtggctcatgtgcttgctctagggctaccgcgactg

SEQ ID NO: 57904 - DNA, 371 bp, Zea mays
  unsure (1)..(371): unsure at all n locations
  Clone ID: MRT4577_152806C.1
tttaaatgacaangtacagtgtttatttttattttgcaggtcagcactttactgattaacacaaacggcaaattttaaaaatcactatcttttttgctcaaccaaatcccgcatcaattacagcttaagctacacagaagttttaaagaatacccccattttatatcttacaaaaaaaactttaggcgggagacaaaatttatccctaataactaaagtgctaacattatacatactggctatcagcaaaactcttgctcttattagaagtatgccaatgtttctaaaaataaacgatgtactgttatttttagcaatatgatacagcccctaaaaaggcctctcaatttcatatatccctttttacacag

SEQ ID NO: 57905 - DNA, 428 bp, Zea mays
  Clone ID: MRT4577_152807C.1
cgtcctttttttttttttttttttttttttttttttgttttgggtttttttttttttttttttttttttttttttttttttttggaaacgggaaaacaaaaggaaccttttggggggtggtttcccggccaagcaacaaaattccaaaaatgtttttggccttgacaaaaaaagggggggggggttagatttttaaatccaccccccaaaagggaaccccttcaaacccggtttccaagggaactggtcaaaaacatacgggtaatcaaacgggggcaaacatttagcaatactgggggggggggttttaattttttccaggaaccccctttttagctgcctgttttggttaccctttcagggactataattatttttttttggggggggggcgcaccataaaaactctagagacttttggggcccac

SEQ ID NO: 57906 - DNA, 630 bp, Zea mays
  Clone ID: MRT4577_152808C.1
catttatagctacaaatgagagctttaagtgctatgaaaaagttaggagcactttacagaaactgttggagacaattttttgtgttttttcaaaaaaaacttgatttgaaagaattatggggaactcttggagatgttcttactaaacagggcctctacctgactacctcagtcacactcctccaatcaaggtatgtttgccggtatgtgtggataggacaatctattctcctaaagactcctccaatcaccggcttagtacagcatcacgcgaaaaccagagtcaagggacatagggattatgatctagcctgctattggacaggagtagcactcatgctttatgctctccggatccagtgctgatgcttccactggccaggggccactaccgaagatcagagagatgccgtgaggcatggcggtggcggccaccacacgcccacacggtttcgacgcgcaagctttctcctttttccgctggtgggcaggaccgctggagtaccatgcacacaccatcatcatcacgactcacgaaacctttcgtttccgccgcccccatctcatccaattcctaccccaccaccagaggtccaatcggtttcggcatgtagctccgatccccaacca

SEQ ID NO: 57907 - DNA, 437 bp, Zea mays
  unsure (1)..(437): unsure at all n locations
  Clone ID: MRT4577_152809C.1
ggggggggggaaaaaaaaaaaatttttttttgggggaaagganntttnttatttttgggggaaggcaaaaaaatgaggaaaaaaaattgattggggaagtataagttatttttatttaaatgaggggannannaaagatgggttggggggggggggggggtgggtttggnaaagnaaggtggttgaatgggagaaattgttggagttgtaagagggggnnagggttaggggnaaggggttggtagaaagggaaaaattgggggtgggttaagaagggggnaggggttaaaaaagttaggtggntgaatgggaggaggtgttggtggtgtnaataagnaggagagtgtaaaggtgtnaggggggggaatggaagaaatgggggggggagggagnagataggtgggtgaaagggaggtggtggtggggaaaataagaag

SEQ ID NO: 57908 - DNA, 233 bp, Zea mays
  Clone ID: MRT4577_15280C.1
tagcaggtggcttcatattgggtactttcttcctaaactatttctccttaatcctactctggaacacattacacatctcctttccactctgaaattctctccacccatactctcaacacctaactccttttctcattaggctaaactgtaatgtgacccccaaagatctatccctgagctttttttcttataatgctttctcaagataattcttcgttgatcaatgcgtcctg

SEQ ID NO: 57909 - DNA, 249 bp, Zea mays
  Clone ID: MRT4577_152810C.1
gcacgaggtggagctgacacgtgatatcggccctttactttttagtctgattagaagagtgcgtgcgtgcgtgccgtgggcagtggagtgagctgtgatccaggaggacagacatggtggtggcggtggcgctgattcgcccgctccggggaacccgggcaaatggagctcttgacccggcaggggagatcagggtcctgactcccgacgaacttgtcagggccgaccggcggcagggaggcatggaca

SEQ ID NO: 57910 - DNA, 267 bp, Zea mays
  unsure (1)..(267): unsure at all n locations
  Clone ID: MRT4577_152811C.1
tccactcgtcctactccctcctctcctctcccgtcctatccatcctgcacgctcagcatccatccactcctcccctgctccggctcctgctcctgctccgccattggcctttcaacagtttactccccgtccggaccgctcctcgttccggcccctctcggccgctgccgctctgcccagccccgctgcccgctccgagccccgctcgctaccgtccggagctccgtcgacgccaccaagcaggctcatgatgtcgnggcgactgcg

SEQ ID NO: 57911 - DNA, 1519 bp, Zea mays
  Clone ID: MRT4577_152812C.1
gttcattgcccacttcacctcctacttctgcaacaagaagttaccttgagatgtctaaacagtggaaggcctcacccttgccaactgaacctgttgaactttttattgggatcctgtcatctgctaaccatttcgccgagcgtatggcagttcggaaatcatggatgatttctaccaggagatcatctgatgttgttgcgcgcttctttgttgctctgaatggaagaaacgaggtcaatgaagagctgaagaaggaagcagattactttggggacattgttatagttccattcatggataactatgaccttgttattctaaaaactatcgccatcgttgagtatggggtgatggttgttcctgcaaagcacataatgaaatgtgacgatgatacgtttgtcagaattgaatctgtattggatcaagtaaacaaggtcccacgtggaaagagcatttatatgggaaatataaactactaccacagacccttaagatctgggaaatggtctgtcacatatgaggaatggccagacgaagtgtatcctccttatgctaatgggcctggctatgtcatttcatcggatattgctcaatatattttatccgagtttgataataagacattaagattattcaagatggaagatgttagtatgggcacgtgggttgagaagttccatacgactcgtcagcctgtagagtatttgcatgatgtcaggttctaccaacctggttgctttgatggttatttcaccgcacactaccagtcaccacaacacatgatctgtctgtggagaaagttgcaagctgggagcgctcaatgctgcaacgtaagatgacagtggacagcaccgggataagtataacggagaactcactaatcatcgagacataacacagaggatactgcacttgtactgtctgctggaccttgcgaccattcgttcattctttggtcagtagttgattcagctgctgatgctaacactggagatccatgttcttagggtactgtctatcatatttacaagagaaattcattgttttcgttcatctgagtcctgagtcttgacccttggagcatctgagttctgagtcttattatcaaactcggataaaatatattgagcaatatattttatgctaatgagtactgtctctgtacaagtgataggccatctgagttgagtcttgacccttggagaacatggctgttgaaatgttacatgaaaagtcttcagcgaccgggtgcatcgcgaagtcgtcgtagcttgtcgtcggcagaaaactcaaatcgttattcagcagtgaatctgacttttattctaaccatcatatatccaccgactattctcatccatatttgaggctatagagtaaagcaatatacaataatgagtgttttatattgtccatagataatgatatattctaaactcactcaagagtaggggcggtgatggactctagattatgtactataaaatttaagtattggatttgattaggattgaaaaaa

SEQ ID NO: 57912 - DNA, 539 bp, Zea mays
  Clone ID: MRT4577_152813C.1
tcaatgcacgacgtactgcgcatgggggccgaaagcagcgaccggcagcaagccaaccaaggctgccattgtcgcggcggcaaaaaaggctaacctatgggcacgcgaggtgacctaccaggatgcaaaaggagtaccaagaccatgtaagcctgaacgtgctcaagctgcggtgaacaaaggtctgcgacagcgtgtgaccacactacaaagaaacatggcacgtgcaccaggctggcataaacgcctactagtgcatgcaagaagaaagcaacgcgcgtaagagaatccgctgcactaggctaaaacataccacgccaagattgggccacacaaaccacccaatatcacacaccataagacgatgaaactgctgactccgctgctggtaacgagctaacggcagacctagtaagcatgcacgcatcactgacccgaggtcaacaacctgaacaaggagatgcggggggacgcgcctgaaacatccggaggtcaccaatcagaacccaacgatgcaggtgacggatctgaccccaaac

SEQ ID NO: 57913 - DNA, 309 bp, Zea mays
  Clone ID: MRT4577_152814C.1
ggaaaaaaaaacccgggggcctgccccaaattgccccttttttttaaggggaaacccctttccccactgggcttgccaaataatgcattctccgagggaaaaaccttgcaaagcaaattccatgcgaaattatgggtgaacccaacagagcacgtgaagccccccaaacccaattttaaggaatttgatttcccaacctggaacaaattttaaaaaactggccctgggttcaccatgtcccaccaaagatttttgcccgaaaccccccaaagtttgggggggggaccctgccaaccccccggggacggg

SEQ ID NO: 57914 - DNA, 442 bp, Zea mays
  Clone ID: MRT4577_152815C.1
gcataatccctaccgccatggccgcgggatacatggatatagctatttatttctatctactagaaaataaagtcatattttttcttaatttaatattggtcattgctaatcagaacacactattgccaggaacacagtagttattgttaaaatcagctgcactagatacaatttgaaaatatccagcaccaggttaattccaataacgaacccaatagattagttaatgctatgagaagactaaagagaaagagaaaagagacgcagacccaggcctggctccacatgctactaactaccagctctcagatgtgtcactgggaacaatacacactccatgcgttttgctacatctccagaagaggtaaggacttgagtccacacggggatgctcgcttgcaagtccttgaggcccacagcctggtgtgtttcacgcacagat

SEQ ID NO: 57915 - DNA, 286 bp, Zea mays
  Clone ID: MRT4577_152816C.1
gcaaagactactagtactggtgctagtgtgtatttatggaacatttcaaaagcacatcccccgactcgatttttctgatgacaaaagatgcacaaggggggaaatgtaaagcttttgcgcgatgacaccacaacggaaacagccctaattattttcaacaacccggacgaaatgccgggggattaacaactcttaccacatctgggggtgtgaaccacacaattctttaaaacaggcccaccttacacggtagccggggccacttttgggagatcaaggggttagg

SEQ ID NO: 57916 - DNA, 614 bp, Zea mays
  Clone ID: MRT4577_152817C.1
gctccattccgtgatttccatcccatcccacaccatcagcagccttagcttctctctctctctctctctctctctctctctctctctctctctctctctcttgccgtcccggccctccccaagcgcaagtgaagcaaaagcaagccacggtgctccgcgcgccggccgggggcggcagcatatggagccggggctcggcaaacgcctcatgaccgtgctccatgccgtctaccacatgatgcgacgtggcctgtgccgcaagcgcctcatgatggacctccacctcctgctcggccggggcaagctcgcgggcaaggcgctccgcgacctcctcgccgccgcctcacaccaccagcaccaccaccacatggtcgtgccgcgtccgccctcccgcgcgccccccaccgccgccgcgggcctctcgctcccgtccgtgataatcactcattttaaatctattataaataaaataatatatactcctgctactgtcatgcgggtacccatgtaacagcgtgcattgcatatttgcatatgggcgcggagcacggggggctataaataaaataatatatactcctgcaaaaaaaaaaaaaaaaaaggcccctagggcc

SEQ ID NO: 57917 - DNA, 544 bp, Zea mays
  Clone ID: MRT4577_152818C.1
acccatttctagaaaaaaaaaaaaaaaaaaaaaaaaaaaaaaaaaaaaaaaaaaaaaaaaaaaaaaaaaaaaaaaaaaaaaaaaaaaaaaaaaaaaaaaaaaaaaaaaaaaaaaaatttaaaaaaaaaaaaaaaaaaaaaaaaaaaaaggttttttccttggcccgccccccccttggggggaatttttgaaattttccttaacctggggggcggttgaactttctttttaggggccccatttcccctttttgggggggttttaaaaattaagggcccgggttttaaaaccccgggactgggaaaaacctggggttccccaaattaattggtttggaaaaaaacccctttttcccaggtggggttaaaaaaaaaaggcccccccccgtccccttttccaaaaatttgccccccctaatgggaaaagggcccccccttttaggggcctttaaacccggggggggggggggtttcctcccaaggggcccctttattttttcagggcccttagcccccctttttttggtttttttcctttctttttt

SEQ ID NO: 57918 - DNA, 991 bp, Zea mays
  Clone ID: MRT4577_152819C.1
cctcgaggccggccgggcgacctgagcagtgccaatctcgccgcgggcttgcacgatgctttgccctatgcactttacgccgccccccggactggaaaattgcttccccgcggacctccactccaacggtgcccgtatctcctttgtcctggctggatccgtataatctcctttgtcctccccctcccctcgttcccgtctccctcgcgttcctctcgaccgtacgccgccgcctggctcgcaccgtcgacagtacctcagtccagatcgaccctccctctacccagatcgggttccagttggcctaccgcccccgccgccctactacaggtgccgaggccttcaccggcgaagagcgcccgccagacaaatggaactgggtgataaggcggtcggttttctgctgactctgacaagcttaaccttatttacatactacacattctgggtcatcattttgccatttgtcgacagcgaccactttgtgcacaagtacttcctgcctcaagagtatgcgattttgataccggtactggccggcgtggttctcctttcgttcttgagcgtgtttgtgggccttgtgatgctcaaatcgaagaagaagaagacggcttaatcgggtttgccatgtacactgctgtgtcattcacttagtgtgatgaaatgcatgagttcgcagtatctaattgctagaagctcggttctgtaatcagttccgtcatactttaaaggtctttactttgtcatctggatgtgtgttttttttattctggtggtcaattaaaagcagtgttcatcaaaactctagttagaggtcacatatcgttagccattattcggaccgaacagcattttgaagagtgaacgattgacagtggctaaaagacgaccgctcactcatcctcttcacagctgtcgggttggtatccaagcgctgatgatgcagaggcaagattctggcgtgcaaaaaaaaactgagagttgttctgtt

SEQ ID NO: 57919 - DNA, 1297 bp, Zea mays
  unsure (1)..(1297): unsure at all n locations
  Clone ID: MRT4577_15281C.1
gatccagagcccccattaaggcaggctcgctgcagcacgtctcgcgctccatcgccgcctgtcctcttcctgtaatgtcactcccccgatgcctgtgcgcagctcagtggccatgacgacgacggccgcccgtgctctcgccgccctcgtgctcgtcaccgccgccgccgccgccgccgccgtcgccgacgatggggcggcgctggtggagatcaagaagtccttccgcaacgtcggcaacgtactgtacgattgggccggcgacgactactgctcctggcgcggcgtcctgtgcgacaacgtcacgttcgccgtcgccgcgctcaacctctctggcctcaaccttgagggtgagatctctccagccgtcggcagcctcaagagcctcgtctccatcgacctcaagtcaaatggcctatccgggcagatccctgatgagattggcgattgttcatcacttaggacgctggacttttcattcaacaacttggacggcgacataccattttcaatatcaaagctgaagcacctggagaacttgatattgaagaacaaccagctgattggtgcgatcccctcaacattgtcacagctcccaaatttgaagattctggacccacgcgtccgcttggctcaaaacaagttaagtggtgaaattccgaatctaatatattggaatgaggttcttcaatacttgggattgcgaagcaatagtttagaaggaagcctctctcccgatatgtgccagttaactggtctgtggtactttgatgtgaagaacaatagcttgacgggtgcaataccagaaaccatagggaactgtacgagctttcaggtcttagatttgtcaaacaatcatcttactggagaaatcccgttcaatattggtttcctgcaagtggctacgttatctttgcaagggaacaagttctctggtcctataccatcagtgattggccttatgcaggcgcttgcagtgctagatctgagtttcaatgagctatctggcccaataccctctatactgggcaacttgacatacactgagaaattatacctgcaaggcaataggttaactggattgataccgccagagcttggtaatatgtcgacactgcattacctggaactgaacgacaatctgatgactgggtttcattcctcctgatcttggaaaacttacagaattgtttgaattgaaccttgcaaacaacaaccttataagacctatccctgagaatttaagttcatgtgcaaatctcattagtttcaatgcttatggncataaattgatgga

SEQ ID NO: 57920 - DNA, 322 bp, Zea mays
  Clone ID: MRT4577_152820C.1
cacaaaacatcccagtcccctttgatccaagtaaaatacaaataaccgaaaaagacccaatctgatcacgctaccgggaccttatttgatcacccttgacaggatgaaacaaaggcaccactgatacttgaatttgatttgtcaagaaattaacagaacaaaaaaaatttgacataaagggtctactacaggcttagaaacgctgctgcctctcagtcaggccatcagtggtggaccgttcgggcacacttctgttgacatattgtgaacaaaaagggccaggcatgcaaaattttggaggcgccaagatagtcggtgggac

SEQ ID NO: 57921 - DNA, 456 bp, Zea mays
  unsure (1)..(456): unsure at all n locations
  Clone ID: MRT4577_152821C.1
cagagaaaaaccagggnnacggggggggngcacccnnngagaaggggccngggagacnncaaccaganngagaannnnacacccaagaaccagagagggaccaccnagaggcngcnatcaggacggnnacgcaaacacacagggggggaccggcnggngananccnngnannccnnacaggagaagaggagaaagaggangcangccggaaaancaacaaggaaacnaanaanangggagaacaggagggcccagagaaagacgagccnnggaacaccacacngcccccagccangcaggagaagaaagaggaaccngcagcngccccaaggaaggaaggagggacaacaggaaggaaaacggggggaggcaccaacaaggcagaaacaggcggaacngagganggggggggggganggggggggccggggggggggggaggcgacccgggggcgg

SEQ ID NO: 57922 - DNA, 515 bp, Zea mays
  Clone ID: MRT4577_152822C.1
caagaacagacaacacacacccacggatgtactgctgtatatctcattaccaaacaacaccttcggtgaaacatttccataatacagaaatacaaacaagcgggacgttacctagtactacaatacacagggttgcacagtgtttcttccaaacaagtcctcttgtttacaagttacacagggttgtattgtacagttgcctgcttcgagtacacagcggcagttttttggcctatctcctcctgcatgcatgcgtccatcaacctgccgctacccaggggacaaatgacaaatcatgccgcctcaagtttcagtctggcagctggaagcagcagttacagtttatgatgcccaagggcatgcacgaatgccacaattcaggcttgcagtagactccaaatgggagagaactggccatccgtctgtctatgctgcgaccgcaaatgaaccgcgaactagctggcggggcagcaaaccatgacaacccttcaataatcaatctttatcagagtcga

SEQ ID NO: 57923 - DNA, 609 bp, Zea mays
  Clone ID: MRT4577_152823C.1
ttttttttttttttttttttttttagaactagttcaaatatacttgataactaaatacaacgaagcacacctcgcatcactggtatttctaacttaaacttcatacacaaactacgcgtcttatttcacgatcataaaatctatagtaaaaatagtgatttagctcaccgttatcaacttgattcagtgtttgcgggaacgatgacagtcttcgattgaagtcttcgatcaaacaactgacgagtatggaatggagcttcactttcttttccatccacaactcttggaatctctctatattaagtagaactccgcataaacgacgatgattctggttctggcctttcaccgagcacttgggcatcgaccaggagcttgcttctctatattttcttgggattcttttgtcgacgcgaacacaagtcggagacagcacgtagggactggcgtcgaagcgaggcgacggaacaacgacgacggggtggggcagtgttgaaggagtttggcgggatgacgaatatgagttcgacggagacggaaccgattgtcgaataggaactgcgcagatcaacaaccaaagcatggcgcgatagacggggatgtcgggga

SEQ ID NO: 57924 - DNA, 734 bp, Zea mays
  Clone ID: MRT4577_152824C.1
gccggccggtccgggattccactcgataaactaccatacccttctctttcatttctgcttccagacaatgtccacgagctggtgcactggtgtccctcgccaccaaattaacgactgattcatggaatccaaaggtgacgtcttcttggatctcaacctcctggtctttacagtaggcaacgactgtgacaactgtccgaccgcgactaccacagcttaggcattgatgaagctctaatgatacgcgctaccgccctttactactacacagcgacaaacatggcacccatagcacatctctactctaaaagtgctgtcgaagtagctgtcaaatagacgctcatagctactatacctatagtgcattgcttgtctagatagtaactcatattagaatccatagttgccaatcatacatgaagactgcctctgcagcacttgcgatattctgccggactgccgtctgcacggtacactactgaggatcactgcttcgaataacaacattcaagggccctattgcaagatatgtgtcctcttgaactactatgatttgcgacaatgctgaatatatcgtgcatgtcttgagtctcaaaaagaatacacaatcgtcacctaggtccgtgcgcaatcaagaattaacctgtatgccacacttgaatagtgcgacatgctgatctactccatacctcattatctcaacttaggttctacaaccctataaccctaatcca

SEQ ID NO: 57925 - DNA, 196 bp, Zea mays
  Clone ID: MRT4577_152825C.1
gttataacaaggtgaaaggtggccaaaagcactgcaaaaccaaaccccaacatcccgtgtatacactggaaaacagagtgcacgaacggcgtatagagcaacaccatctgacaacagggatagtaggaattacttcaaaaatacttatgcctaccattacgaaaatccgaaattatacaatcaagaatgacaatac

SEQ ID NO: 57926 - DNA, 268 bp, Zea mays
  Clone ID: MRT4577_152826C.1
cgcctctagcagggttaaccggctgcgctggatcacattgaattgcctgagacaattcgtcggtggatccaggcagacatgctgtcgtctgccaccatcgcggcacccttctttgcaatgtcaacgttctcagttgtcgttggctgcactaacaccactccagagcagtacatatggtgtacatccgcatcagaaaagttgttctgtgagctgggtgcctactaacgcttcaggcagaagcaatgcggcgatgccttcgcatgatcct

SEQ ID NO: 57927 - DNA, 414 bp, Zea mays
  Clone ID: MRT4577_152827C.1
attcggctcgaggtcaggcctcttctttcgtgcgcgctcacaaccccgcacgtggtgccggccaatgacaccggacgaaccgtggacgacgggacaccaccgtgaccgagacagtattagtactacatgcatagaataacctcgtggtagtagcagaagtttagttttgatggctaccacaccgcaccgtcgttgccttttttatatcccagcagatgcacctgcctctgcctaggggtcggggcagatggtgacatcggattgggatcaggccgagatcgaactgatccgagccggcgcttaatttctgtctatgtctgtggggctagctgcccgggcaaatggacaccaagtggagcggcgacgagagcaagactggcgctgcgggcggagtttcgtcggctgattgcccag

SEQ ID NO: 57928 - DNA, 286 bp, Zea mays
  Clone ID: MRT4577_152828C.1
cagaccctgcaataccaatccaaaattcccaaatcaacccacacatccaccaaatataacacaagagccgagaaagtactaacttactacttgatgtaccgcagtgatattattcctaagaatatcaacgctacaattacaaccatcaagaccaaaagaactgtccaatttatggactaataccccactagattcaaatatagcatcaactatcagacaccctctaatatccctgaaagtaacctaagcaaaatccaacgtgccgtatgcataatgcacaacaaca

SEQ ID NO: 57929 - DNA, 462 bp, Zea mays
  Clone ID: MRT4577_152829C.1
tttttttttttttttttccgcgaaaaaaaccacgttagtagtttctattaacatccgcgtgatctttacaaggagaagtcagtagccttgcgcccttgccttacgcaagaggcaagcaaacaaggagcattcatataccatgtcatccgcccaccaaagtggcaaggtgaaaaggatgggaaaaagaggggaaaaatcattatggaaaaaaaaaagagcacaggtttatcatgcatgcttgagatggatcagtcactccagcagaggagcatgacgacgcatcggcggatgacgtagagccgagccttctgctcccttagcaccctctgcagcttccccctctgctgctgcttcttctcctgctgctgcgccatggctgctgcggatgatcaggggcagggaccggatgtggttgcccagaaggttcaggtgctcatatcagcagtagtggtgcagtgctcg

SEQ ID NO: 57930 - DNA, 298 bp, Zea mays
  Clone ID: MRT4577_15282C.1
tattcctaatagcttattctcattcaacccatgtgaaccagaaactgagtagggccaacctcactatagtagccgacactaacatcaaccttctacaacgtccaccctatccaaacatgaccacatccaaaacctcaacatcaatactatcatactctaccatgcagacctaaaactcaccaatatcaaaactcaacctatactaacttataacaataccagatgattaacttcttgattaaactctcacactggatcacaacaattctccaacagacctacctcatcattttatact

SEQ ID NO: 57931 - DNA, 350 bp, Zea mays
  Clone ID: MRT4577_152830C.1
gttgagaagaaaaacccttaagttctgacggcaagaaagagccatgggaagagaaaaccaccggccagaaacaaaaggggggaggcccgaaggagccggggaagaagaaaagggggacgggacaaaaaggccgggacaggggcagacaacaggggcggggggggggggaaaaagggaacagggaaggaaaaaacacaaaggacaagcaagacaccaaacacaaagcggacactagaaaaaaaaaggaacaaccacggctgtgaactaaaaccaaacaggaacctccccagaaaagggaagaccttgggcaagggagagggagaagaggagtctccgcaccaccacccaaa

SEQ ID NO: 57932 - DNA, 555 bp, Zea mays
  Clone ID: MRT4577_152831C.1
acaactaattcatgatttttcacgttaaaaaacagaggacatccttttagagaaaagaaacgtagaagctatatatacagtcggcacacgggcacagaatatacacggtgggatgagatcaccaagctatttgattcctgagctagtttcctaccaaccacgtggctgcacaatcccgccatggccggcgcctccgcttcggctgccgtccccggcggtccacggcgcacttccaagcggccggaaactgtacgcaccgccgccgtcgaagctgctgctgcttcctcggctttgtgccatggccgcccgctggaaaccaccccctctcctgtagctgtagctgctgctcttccattgcgtctcggcggcggcggcggcggcaagggcgttccctctcccccgcccgatccagcccgtgccggcgttcttgtgctcttcccgcggcgacgccggcgtgctcggcttccacacggtgtccggcctctgaacgatgcgcggcggccttgatcccgggtacgtgtgccagagtggcctcttggagatgtcagctcccgt

SEQ ID NO: 57933 - DNA, 783 bp, Zea mays
  Clone ID: MRT4577_152832C.1
gccaaccggaacaatgacgccctgcgccaggcaaagcaggagtccactgagtaccggagacaggtgcagtccctcacctgtgaagtggatgcccttaaaggaaccaatgagtccctggaacgccagatgcgtgaaatggaagagaactttgccgttgaagctgctaactaccaagacactattggccgcctgcaggatgagattcagaatatgaaggaggaaatggctcgtcaccttcgtgaataccaagacctgctcaatgttaagatggcccttgccattgagattgccacctacaggaagctgctggaaggcgaggagagcaggatttctctgcctcttccaaacttttcctccctgaacctgacggacactaatctggattcactccctctggttgatacccactcaaaaaggacacttctgattaagacggttgaaactagagatggacaggttatcaacgaaacttctcagcatcacgatgaccttgaataaaaattgcacacactcagtgcagcaatatattaccagcaagaataaaaaagaaatccatatcttaaagaaacagctttcaagtgcctttctgcagtttttcaggagcgcaagatagatttggaataggaataagctctagttcttaacaaccgacactcctacaagatttagaaaaaagtttacaacataatctagtttacagataaatcttgtgctagaatactttttaaaaggtattttgaataccattaaaactgcttttttttttccagcaagtatccaacc

SEQ ID NO: 57934 - DNA, 251 bp, Zea mays
  Clone ID: MRT4577_152833C.1
tatactcctgttcaacttattctcccacgtagccctctcgtgataccgtctacacgcactagacctctgcaacaattcctgcaacagaccgtaccagcttttactcagaatgtaacactcaaaccctactaactacttgcaacagctgatatcattcatccaatagactgtgacgaactatactgcgtacctacatcaactatactactcatacatgtgactacctctgtctatctctcttttcactttct

SEQ ID NO: 57935 - DNA, 192 bp, Zea mays
  Clone ID: MRT4577_152834C.1
ccggacctgccgtcccggcccagcccacgcgtctggttactcggggtgtggggcacctcatgaccgggcgagggtcgctgctcagtacgattgtcactggcccaggggaggcgatcgtgctgatcacagactcagagcctgtgcagctgcaggatacgtctgtggtgataagggtgcatgctaatgaccatt

SEQ ID NO: 57936 - DNA, 792 bp, Zea mays
  Clone ID: MRT4577_152835C.1
gggacgtaagtcttctacgcctgattttttttctccagccgtcttcatcctctcgcagtcgctagcctccacaccgcgctcctctgctcggccaacggctgcccaagtccgaccagccgagtgcttcatctgccagccaagccccctccagccacctccctcggcttcttccttctctccgcacgcgcgaagcttctctgcaggtcgcgcccaccacgctccagcaccccgccgccggctttagctccagctccagctcggtccttcccatggcgcgcccccttgcttctctctccctccatctctcctccagcgccgcgcccagctcgcccaactcggattgcgccctgctcggccttgccctgtgccatggcgctcggtcgcctagtctccagctcgcccggacgcttcaccgccggcgctcctccctgtttcagttcggcgcccctctctctggttgctctctgcgccggatcttcttctctggtgggcgccggctccccagcttgcccctgctccagctcgcctgggcgcggtcttgtcttgctgctccagcgcgccaatctccctgctcggacctctgccttttccaaccgtgcgcgctgtcgggtggccgtcaaccatgcctttcctgctcgccagcacttatttagtcatctcagctcgccggcgtcgtgttctagtcagcaccatgttctgcgcgacgcgcgctccagtgtcgtttgtcacgttttgcgcgtcctcttctccgcaggttctctagagctcgcgccgtgatctctcagctcgccg

SEQ ID NO: 57937 - DNA, 108 bp, Zea mays
  Clone ID: MRT4577_152836C.1
atggccgccccacgagagcagaggcccagtcatggtgagtccgggtgcggctacccacggcagtgcccgcggcaggagtggcatggctgcgaggcgcgacgaatttag

SEQ ID NO: 57938 - DNA, 544 bp, Zea mays
  Clone ID: MRT4577_152837C.1
aacaaaaaaaaacctgggtcccccttgcggttaaattaggggggttaacatcaagtttattgggcatgactcacatttgaaatagcttttgaacgggggaaccctaccaaaaagacgagagcttgggccctacccccctacttgaaggggttctcgagggggattacaaagcggttttttacatttcgataaacaagcctcggaagagcctcgttgataaaatctatcttaaggaccccaatccccggaaaaaaattgggggctgcacaaaagataaccattttttggaggtcttttatacctccaacaacactggcaaacaagggccgcccaccaagaataagggttgcaggaggcattttgacctcacttgaaaaacccaccagtggcctcccccccccccccttagggagagaaaaatccggaacaaagggagtggccaccgggaaacaggggtaattatgaagggcaggggggtctttagggaccccttttgggggggggcggaggaaaaaaaaaattatctgctccaaggggggggggg

SEQ ID NO: 57939 - DNA, 494 bp, Zea mays
  Clone ID: MRT4577_152838C.1
gttccatctccgttgcataccggggggtggggggggggggagaggcctccctggccaacatgggccccccttcgccctacccgggggaggctaccctacctcctgaggaccaggctgcctccgtaggaacaccaatgggatgcgcacagatatgttattcctaatttgcccactcaagagagggaggcgtgtgagcctagcgcgcccaaaaaaaaagatcctgagcctctacaggcgaacgatgagaaaatatatccgtgaccttatggacctccaccatctcaagcaaatcgacgtgagccaaacaccttcgccccggagcatcggttccagaacaaactgaggggggcgatatcgagaatctcccgtcctgcgtatgagaacaagatgcgagagcctaatggatctggtgggtgctagatgtggtactgggaccaccctgccaaagagttctcctcgtggatggggttgaccctcagtggcataaatccgga

SEQ ID NO: 57940 - DNA, 333 bp, Zea mays
  Clone ID: MRT4577_152839C.1
tttgtgctggtggataaacagtggagtgcgaggggagaactaaaggtggctgctgggttccataaggagacaggggcaggcagcacactgagtctgcatttatcatggacacaggcgaatgattacggaaaacctctttatccatatggaagctgaatggaaatttatgtggaacaagaataatcaatggcaaggcacaggttatgtacgaccgggcaatgaaacgcacacgaaaccctgcaccactgcggtcggggtgcttgcgggcaccacatgcctgaggatcgaggagagcgtacactgtcactacaaggatctacgagcttgaagagc

SEQ ID NO: 57941 - DNA, 258 bp, Zea mays
  Clone ID: MRT4577_15283C.1
ggtagtagcctcattaggcgtcttattaaaattgaatgggccttaacatattgggttcaaaaaatcacaggtgaaaagcatagggtgcgatcctcattgcagccttgatgaataggggaggaaagcggcgggccattaaccgggacaaaattttggttgggctaaagaaaaaacggcaactaaaacgggggccggaaaggctggtgggggtaacgggttccccacgggttgtacccaagcgtccgcccaacccttcgt

SEQ ID NO: 57942 - DNA, 328 bp, Zea mays
  Clone ID: MRT4577_152840C.1
aggacgcatggctgacgacgagcatgctgcacatgaagtagagggcattgcacaagcgggttcagaccataccgagtataggactatgacctgcgcagttgaacaagagcgatatgtccaggtcagctactgaccatatacatacggataggttgagcagatacagaatcgaattggcactactgatgatacattagcaggaacattactgcgcctaggtgacagggctgctgtgttacataatccgagcacactaatctctcacgagactagcaaaggatagaggactaaggttgacataggcacgagctcgatacatcctctggga

SEQ ID NO: 57943 - DNA, 303 bp, Zea mays
  Clone ID: MRT4577_152841C.1
atcactcagtgcacaccaaccggctcagggggctcttgacaggacagtcagcacttacccagctctatcgccggaacagcgccgctgatctagcagaggctcagagaccaaggacacctttctcggcttggagctcaggcacgcgtggcccttggttcgacgcctcgtgcggagctgtccttgccactcatgagacgacgtgcgcgggggcggcggtccactgaccggagcgtggactacggcttttgcgtgtagaggctgatccaccaccacgacaggcccgacgcggacacctggggcctg

SEQ ID NO: 57944 - DNA, 448 bp, Zea mays
  Clone ID: MRT4577_152842C.1
gccggcctggccaggatcggtgctgtcaaccgtgagccaccctcatcgtcgcgaggacattggaagccgctaccaaattcaatcccgtagacccatcatcgtcacgcaatcggtgtcgtgctcaggatcttcgccagttgcaaggaagacacctgtggcctcaccaggtgtggaggagccttggggaatggcggatttctcaccggacatagaaaagagccaccagccgctcctttacgtggtcgggcctcgacacatctccatcgctagccgctttcagtcacgttcttagtgcttcgtatggggctttgggtcaccagggccgtggatatgtccgccagcgttttttccactgtgatggccggcggcgccacctcggaccaacactgtcaaaggaggaaggctcctagccatcgacccgtagatgaagggctgtgattagattcca

SEQ ID NO: 57945 - DNA, 284 bp, Zea mays
  Clone ID: MRT4577_152843C.1
ggaccagctaaagcttattttatgaagtccgacattccgatggctacatgggatctcaagctgcataacaaaccggaagcacacccaaaaacaggtgacacctgcactgatgtctaccgcataccatggaggaactacaatgtacaacaacttctcactttaaaagaaggcgtcaaggcgccacatgttataacctgccactgataaggaaaccccacgggagaggaaccctcaccaagccatccttgagatcgctcgtatgtgaacaccctgcatactctgtt

SEQ ID NO: 57946 - DNA, 275 bp, Zea mays
  unsure (1)..(275): unsure at all n locations
  Clone ID: MRT4577_152844C.1
cgaagaannggganggaacaacaaaaaaaggggcaaaaccanggacacacccacnccaaggaggagaggacacaaagagaaanaccagccgcacaacagancccgggagaccacaagaacgccccaccgnaccggacacaaaccacnggggagaaaaaaagggccacaccccacccaagcccaccggnagagnnngncccnccaaacgcaccnggnnccccaaacgaaacagangccaangacccggaggcccaagcggaagcgaacacagcccc

SEQ ID NO: 57947 - DNA, 317 bp, Zea mays
  Clone ID: MRT4577_152845C.1
aaggttgttctatttttacgccccaagagttcattatcttgctttaaagatatcatgacgggggttgactccgcctttttcgactggccgggccgcaagaaaaaacaaccggtttggcaaccccgtgattttcccctacgtttacttttggataaaaacacagacgccatgggcgatgtttaaaaagccatggatccaccggaataggccaccccaaatcggaaattccacaaagctaacactgaccgaaccctgcgggtgccgctgctacctctactaaaaaacaatttggagcccacgggtccccggactcggag

SEQ ID NO: 57948 - DNA, 826 bp, Zea mays
  Clone ID: MRT4577_152846C.1
cccacgcgtccgggtgaatgtccttacatctggatattcattcttactcaaaatatttcatgaaagaggtttagtgatgcaaaagccagttggagatgacaagacacaaagtgttctatcagaagataagatgctttttcagcggagccagcactctagtatgatcaatggtttgcatggccgttaccaggtgtatggaccagtagttaggctagcaaaaagatggatttctgcacatctattttcttcatttatctcagaggaggcagttgagctggtagttgcacatatatttttgaagccattcccattccatgccccatcttctcgggttgctgggtttctcaggtttttgcggttgttatccagttttgactggatcttttcacccatggttattgacataaataatgacttcaacctgatggatgagaaggagatcaatgataactttatgctgagcagaaaatcttatgagcgaaacccccatgatatagagcctgcaatgtttcttgctacgtcatatgataaaacatctgaagcatggacaaaacagtcaccaagcaagtcggtatgtgttatattgttttacagctgaaaatgactcttgctgttgaacaagtgtgcatcaaggcttcggtagtgaagtagaattgttgaaaatacagtctatttccatttctcatgcataacagacatctttcccagtgttgtagtgttggatgcagcacaagcagatggtatgaagtgtgtggggcatggacaattttttttctgtccagggagatactactgggcccgtatggttgtatcaagggatgggatg

SEQ ID NO: 57949 - DNA, 767 bp, Zea mays
  Clone ID: MRT4577_152847C.1
gggccgggctgctcggcagcccttccctgtgcttgttcttcatgccgcgcgctcctcaaattcccagctcctgctcatcttccgctaacgcgcgctgctccagcctttagctccctggtcgccgcgcagaggagctccctcagctcgctcctcctgtgccgcgccccagcccctggttcggctctgctcctccctctgcccagtccttggccgcgcccagctcgggttttgtcgagcgtctctgtccagtctctgtccccagcgactccctgctcgtgcctgtgcaccgcgctcggactgaagctcgccgcgcgcagctccctgtcgagtccccatggcacgccctcgctccatcttccctgcttgccggttctccttgccgagctcccctacgcgctgagctctctgccatggcgtccctctccctggtgtgtccgtcgccagtaaatgctcgcgcgggaccatgtcccacacgccggtgctcgcggtagacactcccgtgtcctcatcccctgcagtgcttggattttgccgagctcaatttctggccgtggcctccctgttgggatgcgcaccctggtgcctagctcggccgctcgtgccttctctggtgtttgttccggctgtgggcgctgtcgcgccattgaccctgccgggactcgtcagccgcgatgccactcctagctctctgctcgcaatagcatgtcgagattccgcgtcaagcacctctcttgcatgctgttcgactccgagccgtatttttagct

SEQ ID NO: 57950 - DNA, 234 bp, Zea mays
  unsure (1)..(234): unsure at all n locations
  Clone ID: MRT4577_152848C.1
actacagcaccacacagctctcctccgagatcatccagcagcagcgatggcgttcaaccctacccctccaggacgtggctgcccctacctacgtccgaacccttaccttccaagaccaccacagcaggccttcccgccaccgcgacgcgctccaccaccgnccaacctaccaaaaacggcttcttcgcgccgtggctccccaacaacgggtttgggaccgccaccacccacaat

SEQ ID NO: 57951 - DNA, 752 bp, Zea mays
  Clone ID: MRT4577_152849C.1
cggcaaggtgctcaacgtgggttcggcatggggctcgtggacgaagcgatacagaggtacgggcccgaggagcacaccattgtcgaggcccacccggaggtgtacgagcggatgctcaagctcggatggggcgagaagaagaacgtcaggatcgtgttcgggcgatggcaggacgtgatgccgcagctcggatcttatgacggaatattcttcgacacatacggggaatactacgaggacatgagagagttccaccagcaccttcctaagctgctgaagcccggaggcatctactcgtacttcaacggcctctgcggcgacaacgcgttcttccacgccgtgtattgccagctcgtggcgctggagctcgcgaaccttgggtactcgacgcagttcatccctctgccggtcaaagattgcctggcggaggaggtctggaagggcgtgaagcggaagtactggcaactggacacctactacctccctgcttgccagtcagaatcagaatctaccatcagttagtgatgagttatttctagtctgcgtctgaagttggttgtagctaagtacatttttgttcagacatgctgtgttatgaatgttaaccgtttcactttcgggagctgaactttcttttgggcgtgtggtgatttgccctcaaaaaaaaaaaaaaaaaaactcgtatgctcctgacgcgtgcgtgcattcgtggttcgaaaaatagaattgtcatggaaaaatttggttccctg

SEQ ID NO: 57952 - DNA, 239 bp, Zea mays
  Clone ID: MRT4577_15284C.1
ctgttggaaagggaattgtgctggtagcaaacaattttggtgatgacctctttcctggcagcaatgagatcaaacaaccatggcctccacctctggagttagcgtgcttggattggaacatcatggtcttctctgtgtttcgtgcttccacgaccctcttcatcgaccttgactcagctggctttggcactggtctcgagctgtggtctagcagggccagcgacaagaacaagttcatg

SEQ ID NO: 57953 - DNA, 520 bp, Zea mays
  Clone ID: MRT4577_152850C.1
tttttggtttccttttgggggtaaggccgtaaaggcagaggagatgagccggattagagtgaataatgtgaaatacacacacacacacacacacatacacacatcaataagaagtttgtaaaactcatgctgaacaaagtacatggaaaaataaaatcagctcttcccatagcgcgcataggaagttcaagaaaacccactgattcattcaaagcccacaccttgttgatatccatgtcaaggagaaggctgaggtcaacaactgtctctttaaggacagctgaagtccacgcaaaagcttgacttatgtccaatgaatcccaacataactgaccgcttaagacatggcccgagaatgtttttgaacccttggaacctcagggacttttaggcatcctgccccagccgccaagtgccgatatccccctgtgttaacactccatcgaaagactgaggggatgcattccttcgtgcaaacacaaacctcccctttcccttccccaccctcctccactgcaag

SEQ ID NO: 57954 - DNA, 1290 bp, Zea mays
  Clone ID: MRT4577_152851C.1
ccggccgggtttcacggtcattgggtaaatcgtggtgtgcatgttcggagcaagcgacgcggatggcatcttgttgcagaatgctggtggagcagggatagttgatgtggattcttacgagtggtctcgtgatggttccgcgctttattccttcacccttccgggtctcacgctcagctacaccgccggcgagaagctcagggcgtacatggtctcggtgccctatccggtggcgtccttgagcttcggctgtgagacggtcatcagccgcaagaatcgggcgccggtggtggcgggattctcgtcgcgtggccccaatcctgccgcacccgagctcctcaagcccgatgtcgtcgcgccgggagtgaacattcttgcggcctggtcaggcgacgcaccactagcgggggtcttcgttcccgatgggaggagagcgaactacaacatcatatcggggacttccatggcgtgcccgcacgtcgctggcatcgcggcactgatcaagaagaagcacccaagctggacgccggccatggtacggtcggcgctgatgacgaccgccgggacggtcgacaacagaggcggacacatcctcgacaacggtcacacggacacccttggccgcaccgacaacgtcagggtcgcgacgccgctggtggccggtgccgggcacgtccacccggacctcgctctggacccgggcctcgtctacgacgccggcgagcgcgactatgtcgacttcctgtgcgccctgaactacaccgcggaacagatgcggcggttcgttccggacttcgtcaagtgcacgggaacgctcgccggcggccccgccggcctgaactacccgtcattcgtcgtggccttcgacagccgcaccgacgtcgtccgcacactgacgcggaccgtgaccaaagtgtccgaggaggcggaggtgtacaccgcgactgtcgtcgcgccggagcacgtgaaggtgactgtcacgccgacgaccttggagttcaaggagcatatggagacgaggagctactcggtggagttcagaaatgaagccggatggcaccgagaggcagggtgggacttcgggcagatcatctgggcgaacgggaagcataaagtcaggagcccggtggcgttccagtggaagaactgacgacttctagtagtattggagtagaagatgcacaagaataagcaatatgttgagctgccgtgcttaaatctgtcagatgttgtcatgaaaaaaaaaaaaaaaaaaagagggcggccaatcagtaattccgattctcgggg

SEQ ID NO: 57955 - DNA, 559 bp, Zea mays
  Clone ID: MRT4577_152852C.1
agacatattcatcatttgccttggtgacatactgagatcaagatttatatatgtacgtacatcggtatggtgtatgtgattatgctatgctatacagaggtgaactagcatgttatattagaattcttagtcattttcagttgggccgtgtaatgggtatcgcccatcttcccagatgggccgtgtaattcgtgcatctgacgacgcctcttcctctcggcccgtctgggaaatcgatcacactgacgctgccttcgtccaggtggaaagaagacagatactccatcggcaaaccaaggcaccggcagattagagctaggtgaatggcaggatgacctacggccacaacaacacgctccgatgtgtcatctggcaactccttgagcagtgcctgccatgcatcctcggaccgagcccatactcgctccagtgatttgtactccgtgccgccgccgcctatgtccccaaatctcttctgctttgcttgaaaggcgtcttcaaactcaaggtctatcaaccttttcttttccacgtaacggggcacgcaatcagcacctaa

SEQ ID NO: 57956 - DNA, 1184 bp, Zea mays
  Clone ID: MRT4577_152853C.1
gggcgcggatgccgtactggaaccgctccgccggggccgaccatgtcttcgtcgcgtcccacgacttcggcgcctgcttccatcccatggaggacgtagccatcgccgacggcataccagagttcctggggccatcacacatgtcaggaggtggagcatgtcgtgatcccacctcatgtgccgccggaggtggagcatgaactaccagagccagagaaggctcaaagagacatatttgccttctttcgaggcaaaatggaggtgcaccccaagaatattagtggccgcttctacagcaagaaggtgaggactgagcttctacaacattatggtcgcaaccgcaagttctaccttaagagaaagcggttcgacaactaccgatcagagatggctcggtcattgttctgtctatgtccgctgggatgggcgccttggagtcctcggctcgtggagtcagtcctcctaggctgcattcctgttataattgctgataacatacgtatgccgttcccttcagtcctccagtggccggagatctcattgcaggtggctgagaaggacgtagccaaccttgaggtggtgcttgaccatgttgtggcaaccaatttgagtgtgatacagaagaatctgtgggatccagtgaagcgaaaggctctggttttcaaccgtcccatggaagtgggagatgctacatggcaagtgttgagggagcttgaggttttgctggaccagtctcaaaggaggagatacggtggatcctggagggcgtgagaaaccagaaaagatcagttttgtataatctgttgcagctgtgcagttgacattgagtctgaggcttgagcctgagatccaccggaaactcaggttattgttctcatgccagagatcccaatctcagttagtcaatgggaatatgggatgctagctcaacctttattggcttgttgcccggttagtgcctaactagagatcccgctcttgtacgtatagagaaattttatttgttctttggagaactggtgggatgagtttgattttctagccatagaaagaaatgtattacaggctgcaggcatattagtgtatatttctttttcctggttgcacacttgtatagttatttatatgtccgaaccttggacttaaataggaggaatgcttagaaaagagttatttatatgtcc

SEQ ID NO: 57957 - DNA, 466 bp, Zea mays
  Clone ID: MRT4577_152854C.1
gccacgcgttcgcgcagagaaggcggcttacgtgctacgactacctgcgaggttcagaccttttccacttctcacaattcccgccggcgcttcatcccgttacgcgacaccgtgagggagtgcattgcgatgcacatggggcaggccggtctccatgtaggaaacgcgtgctgggagctgtactggcttgagcatggaattgacgctgacgggcacatgcccggagacaagaccattgggggaggtgatgatgctttcaacaccttcttcagtgagactggagctgggaagcacgtgccccgtgctgtttttgttggccttgaacccactggcatcgtttaagggagaaccggcaacttccggcagttgtttcaacctgaggaagttattagtgggaaagagggtgcaggccacaactttggccgggggtccttatccattggccaaggataatggtggcctgggg

SEQ ID NO: 57958 - DNA, 300 bp, Zea mays
  Clone ID: MRT4577_152855C.1
atatattaatatagtgttttattttttacacatactttttttttttctggtggtttgaaggccaaaaaaccaggggtttttccaagaactgggaaggccccgaagggctctttctattaaatttacaccccgcccaaactgggttcgaataaccaattaaatgaaaagggggttcccttgggttcccaaacccaaacttaggggggtaaactcaatttctgaagaatccttttaccgcccaaaggggggctttctttggggcggcttgggattttgcacacattcctaccggaaggatta

SEQ ID NO: 57959 - DNA, 174 bp, Zea mays
  Clone ID: MRT4577_152856C.1
tgggttttttttaaagttgttttcggtttattcgttcgccggaaacaaataaatgcatctttccagcggggaaaagacttcctggtttcagccatttaacagccggcccctcattctcacgttcttggttctcatatggaggaaagaatacactacaaactataagttttggaa

SEQ ID NO: 57960 - DNA, 305 bp, Zea mays
  Clone ID: MRT4577_152857C.1
gcaggctgaagaaactgacacagttggacctttcagataaccatctcagtgggaacattcctgaggagcttggggagatcgtcgagataaacacgcttgatctgtcacacaatgagctttccggtcagttgcccgtgcagttggggaatctcagactggctcgtttcaacatatcctataacaagctctcagggcctatacccagtttcttcaatggcttggagtaccgagacagcttcttgggcaaccctggcctgtgctatgggttctgccgtagcaatggcaattctgatggcagacagagc

SEQ ID NO: 57961 - DNA, 515 bp, Zea mays
  unsure (1)..(515): unsure at all n locations
  Clone ID: MRT4577_152858C.1
caacgcgtctcgctcaatattctaaannagttaaggctagganngaaggctataacnnttcttggcttaccaagacacctattgctcgaggtaaagcattgtgctcatgatnaatatggcacacttgtttgagcgaaggtagaaagaaagcttctcgaggaagggctgcgtgcctgcttttcctgggtatcattgncctgtcaaagatattcggaaagatctgaagaggtctttgcgaaaagattcnntggttcctccagaagctatatagatttgacctcaactgggaccccttaccttctggaagtgaaccgcactgagagaaggtctataatatgatanntcaatggaggaaggaagcttngcgcccttaatttttgcacctatcccaaaggttattgtgattggccttcttcaacttcttgcaccaaataagctttttgggaagttacctgggttgacacctgcagattgggcttggcttccgatcttggcacaagttgatgtcaaaattt

SEQ ID NO: 57962 - DNA, 175 bp, Zea mays
  Clone ID: MRT4577_152859C.1
aaacagtaaaatgggccaatggaagaccatcgtcgcagcaggcctcgggggtggtctcgggggttcgacgatcccagccagcgccgatacgaacctgggacctgcaggagggtctacggagggcagtggccgcacctccggcatggagaaggaagagacccgagggcaacaagaa

SEQ ID NO: 57963 - DNA, 134 bp, Zea mays
  Clone ID: MRT4577_15285C.1
ggaggaccaagcaacatataaaggggaatcacaaggcaaccagagagcaccaatggctacggaaaaagaccccctcctgagggtacggggactgtctagcatgcagagcaaacggcgacaggaatgcgaacaat

SEQ ID NO: 57964 - DNA, 287 bp, Zea mays
  Clone ID: MRT4577_152860C.1
ttttaataatattctttttctatcaatcttattaaagggggcaatttagattgtttttggggttttaccacacccaaggttaggacagaaggaaactatgcccgggcaaggcggggggaaaaaaaaaggggcgctgggggggccaactaaactgacccacggaccgtatcaaccggtcattcgtgaaacccccactaccgccccccccctggccaggggggggaccatcctcctaaccaaggccggggggcacccccaaggaccaaaaaggcccctgccacaagggg

SEQ ID NO: 57965 - DNA, 338 bp, Zea mays
  unsure (1)..(338): unsure at all n locations
  Clone ID: MRT4577_152861C.1
cccactctacccactcatccaatccttcttctccatcattatcctttcttttccactcattctctctctctctctgtcggtctcctatcatctttcccatcctctaatcaccaaacataccaaccatcataaataacctctccccaatctacacttccatcactacaattaattcctctaaacattattaccactcaaccatcacatcaaatcccaacatccatactcttaacctcattaatctcatcaatcttcatttcatcatcaattaacacatctacctcaccccatctacnactctccttcatcctcttaccattctttcaactaacactacc

SEQ ID NO: 57966 - DNA, 276 bp, Zea mays
  unsure (1)..(276): unsure at all n locations
  Clone ID: MRT4577_152862C.1
ctaggatgtagccattgggggatctttgtggcttcagcaaattctcttgttaaaccggagtgaaaacttcaggggaagggtggggagtcagccaagtgcctcagtgtgccctgttgaaacgtaggtttttccacgcaatgtacgggcgcggtcctangcagaggtttcttttcctctggatgtttgttcctcctgtacaagaggtgtctttccttggtttggtggggctgcggcacttttagacctcccgatctctttgtgagtcctttattataa

SEQ ID NO: 57967 - DNA, 335 bp, Zea mays
  Clone ID: MRT4577_152863C.1
gcggacgcgtgggttcatatttgaaacagttaagaattcatatataagaggcatatatatatatataatttgccaagacaaaggaatggagtcgtacgcatgtttcagccggccaacatcctgggggtctgctcattgggaccaccgattggcgcaggcggcggggaatgcgagaaggacagctagcgattccttggggcatgcatggggtcggacaactgcaccaacgtgtgccggagagggctctcccggagagtgcagtacctttcgccgccgctgttttgcgctaggccggctaataaactctcccggagctctttgaggacgttattcta

SEQ ID NO: 57968 - DNA, 179 bp, Zea mays
  Clone ID: MRT4577_152864C.1
cgcgccgtcacccccttcaggtaaggaagacgaggagggcaggatgtcgcaccgtaagttcgagcacccgatgcacgggtccctcggcttccttcgcaggaagcgcttctcccgccaccgcggcagggcgaagtcatattgcagggatgaccgcatgaagccttgccatgtcactagct

SEQ ID NO: 57969 - DNA, 161 bp, Zea mays
  Clone ID: MRT4577_152865C.1
gccgggccgggagtctgacctctcgactgactacaagcgtcgttctcctcctcaggaggccagcgctgtaggagggagaccggacactgtcgacgcctgcgcacccaggagaggatccatgacctctggcaatctcccgcgacgaatcatcaaggacacgc

SEQ ID NO: 57970 - DNA, 841 bp, Zea mays
  Clone ID: MRT4577_152866C.1
ggggtaccctcgggttcggccgtctgcaaacaagctcgccggactccgacagttattcggttgctacagccgtgagcaatggcaatggggcgcctcctcaaaacaaagacctagcctcagagagctccttcggtgctgatgctccaagcaccgagcatggcagcaacggggcagggagcggcgaaaatggtggtggcatgctggctgtgcagaacgctgtggtggtggctcacgacgctgagaacaaggaaaaccacactgtggaacagcctacggagaattcagagacttgccgagcagtaagtggacacgatgatgatacagaacgccgcttgaacgcctctgagatcaaaacggtttcttctgagatgagcaaggcagccgtcagtgcgcaagatcccgagcagaaggaagaaggcggaggcgaacatgcagcaaacaagaaggggtatcttgtgagggtactgtctcggtcctgtgatcttcgatcgtcacgagactcgactgatttccaatctgcacgtacttctctccagtcgaaaagcttcagtgccagtgagccccttcagtcgaagatcatgaacacagtggacgagatgaagggcgacctttctgagctgttcagtaataaacctgcagatgactgcaagccgaaggcgcaccaacctccacgaccttccaattccaagcaagatggccgcacgactcgtgcagccatcgcgtccagtgcacctctcgcggcataccatcctgccgccaagcattctggctacgtgtctcgcccgagcaagtctggccaggttgctgctgcttctcgtggactgccgtcgctgcggtatcg

SEQ ID NO: 57971 - DNA, 281 bp, Zea mays
  Clone ID: MRT4577_152867C.1
tattttttttttttttttgtcttaacaagggagcctttatgtaaccgggcgttgccaatcggggtctcagggaccaaaaaagaaagtaccccggccgaccattgaataaccagcttggcttgatgggagctaacgtcagccttaaaacaagcaagacagtgttcttacacgcaacattaggttacgcacataaggaagggcctcaaagaaacatgcttaaactaaatacttgcaatgcacatactcgcattagctaacccccattttgccccttttgagac

SEQ ID NO: 57972 - DNA, 395 bp, Zea mays
  Clone ID: MRT4577_152868C.1
gtcaaccaaaaaaagagggttcaccattgctaagaaaaggaggggccccctgggccaacaaaaccggaataaccagaggccaacaaacgggaagagggagggggcactaaccggctggagaaaacaccaccaaaccggggcaaaaaaacaacaaaaaaacgggtttgtcccccaacaagacaacgaaaacaccacgaatggggcccaccacacaaaaaagaaagccacccacccaacaaatcagagacagaacaaagcggaggtccgaaagccgggaaaagaaaagaagcgaaaggaagaacaaacaaaggcgggaaaaggacataccccccgggacaaggaaaaagcaatggccgggcaaaccaaggccagaggagaaagggacgccacaggca

SEQ ID NO: 57973 - DNA, 505 bp, Zea mays
  Clone ID: MRT4577_152869C.1
agtcagttcttcacttacgcaacagattctacactccactactgcccaatcttcaggaacctcaaagttttgcaaaagaaagaagagagagatcatggcgggtgcggcgaaggcgtcatggacggtggcgatgagtgtgggcgcggtggaggcgctcaaggaccaggcggggctctgccgctggaactatgcgctcaagtccatccaccgagctgccaaggccaaggccaccatccgcggtggcgtctcgcagggcagcaagcagcttcaggcctccgcgtcggccgtggcggagaggcggcgagcagagaaagcagaggaggggctgaggacggcgatgtacctcagttgctggggtcccagttagtggtagctagcatgaggtgtttctgcagttctgctagctctatcctccagcaacaactatgccgtgtggcttggctggttaattccttcccggttgtaaatatgtctcaccatgatgatgatgatgatgatgatgacg

SEQ ID NO: 57974 - DNA, 604 bp, Zea mays
  unsure (1)..(604): unsure at all n locations
  Clone ID: MRT4577_15286C.1
cggaagtcccgtctcacggttgccctggcagcgcgcgaggctggtgagtcggcagccctgtggcagccggcgggctggtttccatggttgcacgattaggaaccaccagctgctgcatcccatggccaggggtggcgtccaggtggcagagcagctaggaacgcaaggcctgaacctggggccagacaccctgctctcccggccatggtcaacgaccctccagtacctgccttactgtgggcccaggaggtgggccaagtcttggcaggccgtgcccgcaggctgctgctgcagtttggggtgctcttctgcaccatcctccttttgctctgggtgtctgtcttcctctatggctccttctactattcctatatgccgacagtcagccacctcagccctgtgcatttctactacaggaccgactgtgattcctccaccacctcactctgctccttccctgttgccaatgtctcgctgactaagggtggacgtgatcgggtgctgatgtatggacagccgtatcgtgttaccttagagcttgagctgccagagtcccctgtgaatcaagatttgngcatgttcttggtcaccatttcctgctaca

SEQ ID NO: 57975 - DNA, 566 bp, Zea mays
  Clone ID: MRT4577_152870C.1
attacgtgcacctccctctccgaaatcagggatttacaccgctgtagtttctagagacctctctgccactcgtgatcccagtagtcacatatggctgccatcaccaagaccgcctctgggaccgccaatgccggcgcggcatccaaagccgaagcctgccgtcgacaattagaaagcgtccatcgatgtcggctcccactcgccttacttccagatgaacaaagaggctatcacggaactaaaagagagaaccgagtccagctcgctagctatagtcaagtatgtgaagaaagaagcacgatgcgactctgatggtcaacttcaatcaatatggttttcattcatctcggcgtcatcgcagtcaaggttaagctcgtgaaagctgaggcttctcataagctctcggacgccgtacaagaagggatcccccaagagcaaggctaagtcgactaaagtgcggcgctgccaagagcaccgcccgcaggccgcgcaaggccgactgcgccaagtgaaagaagggagcggctgccaagccaaagaaggtcgctgctgctgggaccaagcgc

SEQ ID NO: 57976 - DNA, 208 bp, Zea mays
  Clone ID: MRT4577_152871C.1
ttctcctctctgcttgctccaattccaagcaccaaccaattaaggggggggggaaccaaaggaatcccattttttccccccttggttgaattaaatctttgtcagcccgccttgaacttcccccgtaaaaaaccaagttaaccttgcaaccccttatcccgccccaagccgatcgggatccattggtggggaagcccccgaacccaag

SEQ ID NO: 57977 - DNA, 266 bp, Zea mays
  Clone ID: MRT4577_152872C.1
atgacccggtcaatttcccggaaatatcggaaccgaacctctaagcgaaacaaattaaccgaaaccaaccgaaaacaaacaatggcagacagcaggcgaaaactgcgacccggcggaaaaagacagccggtaaaaagccaacaaagaaaacacggaggaacccaaaacggaaacgacggccgggaacacggccgaggaggcgctgatgggggcgggcgcccgaacctccccagctaggaccacgaaacctgaagcggcagcggcaa

SEQ ID NO: 57978 - DNA, 542 bp, Zea mays
  unsure (1)..(542): unsure at all n locations
  Clone ID: MRT4577_152873C.1
attttagaaggttccaaacaggnagcctaaaacacaaataaagctataaataggtatattttgtacattgtcagtcgtcttgggccctgccataaataggtgtttgtgtcatataaaactaaatatatgagatgtgactttggcactacacatgatgaaggagatgttagtttggaagctcaagagtgcccacgaagaataccttgtagtatttaggattaatgcgatatagagacaaggatattgatgatgatgttagtcatagatcaaagtagggtggatgaagtggcgtcaagcatcttgtgttctatatgacaagacggtaccgtagaagctaaaaagcaagttttatagaacggcaattagacttgctctgttgtatggtgcagaatgttagcttaaaaacgacatgttcaatagataagtgttgcggaagcgcatgttgtgttggatttgtggccatataagagggttcaagtctggaataatgatatacatgataggctagcggtagcaccaatttaagaaaagcttgtccaaca

SEQ ID NO: 57979 - DNA, 435 bp, Zea mays
  Clone ID: MRT4577_152874C.1
attcggctcgagaagcaactttggtgctgagaccaccaggtagcaattggtgcctgctgggtctgagaggagcatattgtgcctgcaagcccacaagaggtcaggcacctcattgcacactaacgacgactctccattcgctaggacaccctgtgtgcgctggagggaatggacaactgccttctttatttctactgaggtacccaaagtctggagccactacaagactgcaatatcgacgaataaaagctaccagttgcctttcggaagttatttatttcctacggtttgttataaaagctgtaggaagttaaaaaaccgtaggaagtgtatgtttttggtgtagtgtctaacgctacctcggggtttgaagttgtgcttaaatttgtaaattttgtatttcgcctattcaccccttctaggtaattttcacgt

SEQ ID NO: 57980 - DNA, 489 bp, Zea mays
  Clone ID: MRT4577_152875C.1
tttttttttttttttttttttttttttttttttttttttttttttttttttttttttttttttttttttccacaacaaggggttttttttcccataaacaagcccctccggttgcagttttttttcccccctccagtattttgatccactttttttttgtaaaacctgggagggacccctttttgtttttttacaaggggcgttttaacccaaaaaccgcgaccaatttttgggtttcaaaactcaagggggggttaaaaaaaagggggcctgtgttttttggactaaacccccagccccaaaactgtttttgggttaaactaaccctcaaaaatgtttccttgggactggaaaatccttgccacctttttcaggtttgctagaacattttttggcccaaggttttcagccccaattgaattaaaaagttgctcgatttcctttgtaaaaaaaaataatccatttaaagatcttgttggcccccggctg

SEQ ID NO: 57981 - DNA, 777 bp, Zea mays
  unsure (1)..(777): unsure at all n locations
  Clone ID: MRT4577_152876C.1
cttcttgcttctccatcgagttggattgggttcaaagttgggcttttggacagctgtggtgtgcacggcagctctgtgacttgtgaggaggaagggaggaagaaagcggatccatggcgtcgaagcggatcctcaaggagctcaaggacctgcagaaggatcctcccacctcttgcagcgcaggtgattcagattccgcccgcactgctacttcttttaattttccatgatgggatacgactttctcccgcgcgctcggctattagcggtgcgatgcgattcttagtgcgtagttgctagatctgtgcgtatacatgtacaggggacgcttgtaattggacttcaatatgcggtgtaggttgttgatgccatggtgggataaagagcatgtgtcatgtaaaattgggaaaaaaggatcgtagctttcctatatggttcattggtacatagcgggttttcattctttgtcatgttcggttattagatccgcagaggggcctgcctccagctaatcattctttgtcatgtttaggcttatagatagatagatacatagatcagagtcgcacacagcagttaacattgccctcccactaagacatacattntacctgttctgttcatgcgggtccgagtaatttttttcagcatcaagcaagggagataaggatagtgctcatgcaccatggtagactagtcatgtacttgagcatacaagcctgctgagtgctttcagagncatcaggggcttacagtgggacactaagcaaatctagt

SEQ ID NO: 57982 - DNA, 621 bp, Zea mays
  Clone ID: MRT4577_152877C.1
ccgtccgaaaaaaaaaaaaaaaaaaaaaaaaaaaaaaaaaaaaaaaaaaaaaaaaaaaaaaaaaaaaaaaaaaaaaaaaaaaaaaaaaaaaaaaaaaaaaaaaaaaaaaaaaaaggaaaagaaaaaaaaaaaagggggcggccttttttaggggtccaagctcttggtctggcgtctttcctagggcattacctttttttttggggtccctcaaaattaattctaggtgggccgcctgttttaaaccgtggtgggttgggaaaaacctggggtttccccaatttattcttttgtgcaactgtccccttttgcccggtgggggtattagcaaaggggcccacccttttggcctttccaaagggttgtgaaccctgactggaaaggggccctccccctgggggggccctttagtcccgcgggttttgggggttccccttggggggcccttatcacttgcaagtcccttaatcccccttccttttgctgtcttcctttcctttttcccccgtttcgcggtttttcccgggaaacctttaaagggggggttcctttttgggccccaatttagcccttaaaggctctttacccccaaaaacttttttggggggagtccccattttg

SEQ ID NO: 57983 - DNA, 609 bp, Zea mays
  Clone ID: MRT4577_152878C.1
ctgcaatacatcatccagatctctcttttccttgggcgcgcgtaatcgcggattcctacataagtacgctctgatcttcttccagcgagcgagctctgatcttcttccagctcgctcgctcgctcgatcgcgcgcctgtagataaatttatatatctatacacacgccacgccatcatggggcctcagaaagaccggtcgtcgtccatggcgaacggcacggcggcagcgaggagcaaggacgcgaagaaggtggtgcactaccgggagtgccagcgcaaccgcgcggcgtccatcggcgggcacgccgtggacgggtgccgcgagttcatggcgtcgggtgccgagggcacggcgtgcgcggcctgcgggtgccaccgcagcttccacaggcgcgaggtggaggccggcgaagaccgcgactgctcctctacctccggttgatgagccatcaccggcggcctccctcttgttcttggatgatatttatgcgtgatgtgatgtaacatgcatgtgtgttcatagttggtactgtacatatatggtgcttgtaactgatgcgtgcttgtgacacatggtttccctactaggacagttaagtctacccaac

SEQ ID NO: 57984 - DNA, 571 bp, Zea mays
  Clone ID: MRT4577_152879C.1
gccggccggtctcgggattactactaccatatatgcgacgtcctgttcccattcttcgactgtcgtctcgtctctgcgaaggatatattcgatcagcaccatctgcgctgcgatctggaacagaatctactttgaggccttgccgtacctgctgctggactcacctaccactatctacaacgccgctcaagtccacattcgggcccatgcttaccgctgaatggcatctcgtggcctttcgaccacttaaccacatatgtggtgaataccgtcctgcagaaacttctatgcgacgactgcacctacacctgtctggctcaccatactgaccgactcacttcatggacaactcctacgcaatgaattctcacagtccctcccctccagcgttttcagagtacgacctgccgtaccaaccttcaacatctttgaaagtctgttcttccttccctcacttcatgggttatgtgaattgtaaaatgatatacactgactatgtgcatggaaccatgctgctcatgctgtgtatgcctgaagaaatgatgacaatgctctattgctctggaccctc

SEQ ID NO: 57985 - DNA, 646 bp, Zea mays
  Clone ID: MRT4577_15287C.1
tttctccccccccccccccccccctccccccccccccccccccccccccccccccttcctttttttttttttttaaagggaaaaaaagttttttgaaaaacaaccaacaatttttggggaaaccagaaattaaaaaaaaaaacttttggggggggaataaaaagggggaaaaaaacccaaccctaatttagggaacctttgtcccccaataattttaaaaaaatttttttgttggggggccccttttaaaaagggggggaaaaaaagggcacagcctttgaattttggaactttaaaaggggggtttttttaaaaagttgtaaaaaaaaagggccaaaaagggccaaaaggggaaaaccccccaaaaaaaatatttgttaaaaaaatcaaaatttttaaaataaaattttcaaaaaagtcccttgggaaccgcccaaaaaaaaaaattgcatttgacccgaaaaaaaaaagggattttaatttttcaaaggaaaggaggttttgccccaaaaatgttttttttgaaaaagccaaacttaataaaatttttaaaaaaccaaacctaaaagggaatggtccctaaaaggctgttttggaaaagttcaaggacctgaaaatcctcaattttccaaagttaaggcccaaa

SEQ ID NO: 57986 - DNA, 1095 bp, Zea mays
  Clone ID: MRT4577_152880C.1
ctcagtctcaaactccccgctctcccccgcccgtccagctcgtgctccgcctccgctgctctgtcctcttccctcctctgcgtttctcctcagagctgtttgacttgaccggacagtgctgttcggtggctcggccgcgatgccggactccgacaacgagtccggcgggccgagcaacgcggagttctcgtcgccgcgggagcaggaccggttcctgccgatcgcgaacgtgagccggatcatgaagaaggcgctcccggccaacgccaagatctccaaggacgccaaggagacggtgcaggagtgcgtgtccgagttcatctccttcatcaccggcgaggcctccgacaagtgccagcgcgagaagcgcaagaccatcaacggcgacgacctgctctgggccatgaccacgctcggcttcgaggactacgtcgagccgctcaagctctacctgcacaagttccgcgagctcgagggcgagaaggcggccacgacgagcgcctcctccggcccgcagccgccgctgcacagggagacgacgccgtcgtcgtcaacgcacaatggcgcgggcgggcccgtcgggggatacggcatgtacggcggcgcgggcgggggaagcggtatgatcatgatgatggggcagcccatgtacggcggctccccgccggccgcgtcgtccgggtcgtacccgcaccaccagatggccatgggcggaaaaggtggcgcctatggctacggcggaggctcgtcgtcgtcgccgtcagggctcggcaggtaggacaggttgtgaccgtcgccgtccatgcttgcatggccatggcatggctcagtcccgccgccggcttcttgcttggtgtcggtaattagcgctggtggcctgcgctggttaagttaaccttcggtttttccccccttttcttttcgtggtaactggtaagtaatgttgtgctgaatggagacagtgatatggttaagatagctccataacctctcggtaattaatcctgtgatttgtactcctaagctgctgctaaactgagctatgacacaatacaaatgctgccattaacccaaaaacaaaaaaaaaaaaggagg

SEQ ID NO: 57987 - DNA, 170 bp, Zea mays
  Clone ID: MRT4577_152881C.1
catcgagatagctatgcgggagttaagggcctggttcgaggggttccagtccttgacctacggtggcggtaccttcggggatgacaagggtgccagggccattgtcaaagccttccaacccttaaaaggcactgggctggcccttcccaaaatcatggccaccaaaccgg

SEQ ID NO: 57988 - DNA, 359 bp, Zea mays
  Clone ID: MRT4577_152882C.1
caaacatcatacttattcatgatttgtcatagttctgggtagcccccacacacaacccacccgggcctttattaaaccaacactgacacgactcatggctgacacaattcagacattgacaacctccatctggagagaggcatgatcaagagaaagcccaccgcgtagtttaaccaacccaggacttactgaccaccacggagacgggctaaatctccaaaaaggatacccttttaggcgttaaaaaccccttaggaccagcccttctccaactgtttgcccggcgaaaatcacaccctcctggaccggggggatgccctccttggcctggaagtccccccccatgttcacccaacttc

SEQ ID NO: 57989 - DNA, 367 bp, Zea mays
  Clone ID: MRT4577_152883C.1
cctatgcgaccggccgcgcagagcctcggcgccatctggggcgtatttgctagtcaagggcgttcatagcgacaactacgcgcgctacggccgaggttccaatgaggccagcgccgggtacttcaccggcacggggctggccgccgagatgatcggctccttccggcagctccaaaccgacccgaacgtcagcggacctatccgcgccgttggtgattcccacggtccggtgcgggcgaccgttccgaacgggttagatgtgttcatggtgcacctggcgacgaacccgatcactggcactgggctcaacccggagaggagcctcggcgccgccgccgtgtacaacaacagtaaagcctggagcgac

SEQ ID NO: 57990 - DNA, 212 bp, Zea mays
  Clone ID: MRT4577_152884C.1
ggttcggctctccggcgcttgctctcatgctctcccggcacgcgacacgcgagggcgcagggtttatggcggtgacacccgcggacgcgaataccgagggcgccaagatggacctccccgaggacgacgacgaggtcgaagagctcgacatccaccacgcatgggatgagaaggaagagggccatgaagcttttttttttgggaggatgatt

SEQ ID NO: 57991 - DNA, 261 bp, Zea mays
  Clone ID: MRT4577_152885C.1
ggaagcgcaacccatgccttccgccgccgctgctcgaggaccgaagaaccggccaaagaggccaaagtctgtgaagcagggagctgagttacgggagcagaatctccaactgccggaacacgattacgaaattatagatactgaatctggagcagcggagaccgttcaacgtgataaaaaagcaaatgggatctttcaagacacatcacagagtgatgaagaagaaatagaagacgagtatgatgctcctagtaatgacac

SEQ ID NO: 57992 - DNA, 982 bp, Zea mays
  Clone ID: MRT4577_152886C.1
actcctatgggcgattgggttcatcgaggccggccggggatttttggaaagcaaagaaaactttcgattgtatttgtggccgtcaggtcgcgtggccggggcggctccgatcctatcacatcgcgcactaccttccagcgaatccatcacggaagaaattgttccccacccaccctagactcgccgccgtcgcaactcccacccgatccccaaattctccggcggtgatggccagcctgtggcgcgccgtgatggatagcgtcagcggctcctccccctcggcgctggacgcggccccaggtagcggcgtcgagttctggcacggcgcagagcgcgctgggtggctaaataagcagggcgagtacatcaagacgtggaggcggcggtggttcgtgctgaagcaggggaggcttttctggttcaaggaccctgcggtgacacgggcctcggtgccccgcggcgtcatccccgtcgccacctgcctcacagtcaagggcgccgaggacgtgctcaaccgccagttcgccttcgagctctccacgcctgccgagaccatgtatttcattgcggactccgagaaggacaaggaggagtggattaactccatcggtcgctccatcgtccagcactcccgctccgtcaccgacgcagaggtcgttgactacgacagccgcccccagccccccgccgcagcttatgaccagcgaagagagtgcaccagcagcttaatggcgtggtgattcctgtgaactctctcgatatggatctgacttgtagcatatgtatttccaattccatgtgattgtggccttgtgccgacgttcctcactcttgattatgtagcagtatattaactatcaacgacatggtctggtatggtaataagcgagttaataagctgtgctttcgtttatagtttgttttatatgtatatactatactacgatttgatcttggtataccctaatttacaaggtggttt

SEQ ID NO: 57993 - DNA, 134 bp, Zea mays
  Clone ID: MRT4577_152887C.1
cggtactcttgccattgctctatcactgactcctttcgctttgttgttttgctttgtcgagcggtatgaggtcattcaaaggcgagaattcagttatgcactgaattataggataacacataaaagaacatgtg

SEQ ID NO: 57994 - DNA, 188 bp, Zea mays
  Clone ID: MRT4577_152888C.1
agctgtctcagttgtcaatgggccccaacagggtgttcaggtcgttagcaagaagatttcctgcattgctccagaccagcagcagtaaggagcaatgcaggaaatcatcttgccaacgactaacccacgtgtacctgaccttgccgagaagctgtctcagttgtcaatgggccccaacagggtgtcgg

SEQ ID NO: 57995 - DNA, 364 bp, Zea mays
  Clone ID: MRT4577_152889C.1
gacccgtctggtgctaaccagcgcggggcgctgatcctttatagggcgttgctgtctgacttcgggcggagcgaccatccgccgggcaggtactatgacggacagatcgctctcctggaagggatctatgtaagcggccggagacgatggtgggcgtgccggtgacgagctcctccgggaggcactcggcgtttaccggtatgtgcccatgacacagctgcaaggaccggcttgacggaacacactgccggactgagtcgactcatatggtggtgtacgcatgggactacaattgccctgtcgtcccttttcctgcgattgttcgatttgactgtcagatggctgccgttctgctgataacgcc

SEQ ID NO: 57996 - DNA, 460 bp, Zea mays
  Clone ID: MRT4577_15288C.1
ttttttttttttttttttttttttttttttgttttcttttatggttgttgttgatcttttttatgatcatttctttgttggggggggaaaaagaaaaaattttgggcggggggtggcaaccctctaccccattagagggaaaacccctgtttgttgaaggggggctggcccaagatcaaaaagagaaatcccattctccgaaaaacaaggggggaaaaaccgaggggaaaaaccaccctgcgattccgaaaatgaaaccgcatagcccaaaatgagccagggggaaaaaaagctttgtttccccgctgcaaaaaatgtataaaacacccccctaggggggaaagctgggttctctttacactgaaaaaaaaagggggtgtgctccaaaaaagggggccgggaaaacgaatactgggggaaaagccccctgaagcgattgtgttttccctgcttatggaag

SEQ ID NO: 57997 - DNA, 468 bp, Zea mays
  Clone ID: MRT4577_152890C.1
tccgggcggacccacccgtccgcccacccgtccgacgattttacaaatcatcctgtttcttggtaggccgaggggttttccagagtggtccattggtggaaaaaattaaggggctggggggatgctccctagtggctcgttaatttccccgggtcccggacctttcgtggccttcggggttctggcgattttcgggccaggttcttttttggcgagttttttcgcttttccggccaattagctgaattagggtcccgggtggatttttggtgggccaattttttatcccctggaaaggaggtggtttattttttaaagcaggggttagggttggcctttattttaatttaatttattttctttcgtttttacatttattttattttattcttttgtttattggttttttttttttcttcttcttttactttttctacgttttttgttttcttcttttctttcttcctt

SEQ ID NO: 57998 - DNA, 875 bp, Zea mays
  Clone ID: MRT4577_152891C.1
attcggctcgaggaggatttggtcgtctgctgctactacattgactgtgctatgaaggccttcgcgatatctcctgcgcagctatattccaacacaccttcggattttgacttcaaacttgaaagtttagcccaagaatttgattccctatctgacttcgcggagcatctcgccacaaatgttgacattgtcttcccagtgatccatgggaaatttggtgaagatggaggcattcaggagcttttggagaaagcaaatgttccatttgttgggacaccctctaaggaatgccagcgtgcttttgacaagcataatgcgtcgctcgagctcaacgcacaaggtttcttaacagtgcccaactttcttgtggagaaggacaagttggctaagccggagttagaggcatggcgacaagtggcggacgcgtgggaagaaaatggcaaaacgattgtcaaacctacaagggctgggtcaagcattggcgtagttgttgcttatggtgtgaatgatgctgcccagaaagctgaggaaattatttcagagggaattgatgataaagttatcatagaggttttcattgaagggggcactgagtttacagccatcgtggttgatgttgggattgctaacaacagtgagcctgttgttctgcttccaacagaagttgagcttcagtactccaacaatagtgataccaaggaggacacaatatttaactaccgcaagaagtaccttccaagtcgacaggttgcttatcattctcctccacgttttccggcagaggtgatcgattgtataagacaaggaatttctcgtttatttttgttcttttccctgcatgacatttgatgagtggatggttggtttttaccttc

SEQ ID NO: 57999 - DNA, 2315 bp, Zea mays
  Clone ID: MRT4577_152892C.1
cccacgcgtccgcccacgcgtccggctcattctgatcaagcgggcgaccacgatgggttcgtcgttgcaatccaacggcggatgctgcgccgcaaggcgcaacttggcttatcagatatctccagcccgcgcgggcgctgcagtggcgcagcacagccacgccgcggcaacagcaacaccgcgcaccatggcgcttcttctccatccccgcctcccctcccatcctttccgcgcggcagcccaccaccaccacgccatcacggacgcctcttgcttccttaccctccgcggccccggaaggaagcgccgcatgatgctcgcggcggtcacgtgccgcgcagccagggtcaaggagcccgctccgagcccaggcgcctcgcctgcgccgccgccgcaggcgctgacgaaggaggcgcacaagtacttcgaccacgccgtggtcaccgtccgcgcgggcgacggcgggcacggcgccgtgctcgccatgccgccggcgccctccgcggacgccgccaagccccgcggcaggttcaaccggcgcgagaagaagagcaagaaggtgtcgtacaagcgcaactacgacgggtccgtggcgctgccgacgggtgggcacggcggcgacgttgtggtgtacgccgacgaggccgaggagacgctgctgcggttccacgagaaggcgcggtactgcgccaaacggggagggaacgtgggcgccgctggcggcacgctcagctcgcggatgcacagcgggttcgccggggagacgctcaggatacccgtgcctgtaggtctgtggactcggtgccgtgaatttcgagttttttttttgtgcggggattggcctttttgatggatgcattcgcatcgaattgcaggaactgttgtgaaacgcaagaagggggctgttctggcggatttgactcatcactgtgatgaagtgctcgttgctagaggtggacagggcggaatcagcttgattgatgtgcctgagtacaagaggaggaaagccatggctttatccccaaacatcatgcgagatactagtgacaaagtattaacgcatggccaacctggtgaggaagtaagcttggagttgatcttaagggtagttgctgatgttggccttgtgggacttccaaatgctggaaagtcaacacttctatcagctataacacttgcaagaccagacattgctgattatccattcactacattaatgcccaatcttggccgacttggtggagatcctgctttaggggcgttacagttttcctcagaagcaacattggcagatttgccaggtctaattgagggcgctcatctaggaaagggccttggccgcaatttcttaagacatttaaggagaactagagtaatcgtccatgttgtcgatgctgctgcagatgaccctgtcaatgattataagattgttagagaagaattaaggatgtataacccccaatacctggagcgaccttatgttgaggacctcaacaaaattgatcttcctaaggcccaagatagactatctgcactggtcttagagatatcttcaattggatgtgaagaagggcatgagcaaagtggcagcaaagataacctaaatggacgagtaagtgatcatcaggtcttatcagaggctaaagctgaaggtgttgaaaaggagctcggggactatccaagacctgaagctgtcgtggctgctagcgtattgaggcatatcgggatcgacgagatgctgaaggagataagggcagccctgagaaaatgctttgatcacaagttaccagaacattgagcaaagtaagttagcataaatataggctaaatagtaccatagtccagttccagtagcagaaaagggaatgaactggatgcccccctggcacatactgaagaatccccaacggcagttaaatccatggagagttttctgaagcaacggcaccagcggtttctgaagggtgaaaacactaatgctggagcacagcggtttttcaggcgtcgtttgtaacacgggttctccagtgaaatttctgcgaaaattgaatttgttgtcgtccacagctgccgtttgtaggtgacagtacaacgtatgtgaatagattagtttgagttatgtcggcgctgtcattgtatcaattcgtctccaatctgcgcagatttgcagtgtagcattcatctcttgtctgcacaggtgcacgatgcggcatttgtcttctgtggtttcagtcctgtgtactacaagagatacactttgatggaactatcgcaaaaaaaagcggacaacaaaacacgaataaaagtgatgtgcc

SEQ ID NO: 58000 - DNA, 554 bp, Zea mays
  Clone ID: MRT4577_152893C.1
cccctcacccgccgaagccaatgccttcgcacatccgccgtcgcgcccgatgccggcgcgaccggcgacacccccgtgcgcacgtcgcatcatgtcaaactcttcatggaagacccttgcggaagaacacgatcaggctgcttgctgcatactaatacaccatactacaactatgaatgccctgattcaaggcctggagggcctccctgcggaccagaagctggtaatttttaccggcgagcactttgaggaccggcgggccctgaacgactacaacatccagaagaatgcaccctgcacctgtcgctacgcctccgagaggctcctttaagcacatggagaagacatgcaccaaccccaataagatcaagcacattctcatcatagtgaagctgggcatgatttatatctacaaggtggacaacacccccgggaatgtgacccgcctacatacggagtgccccaacaccctttgcggagcgtgtgtcttcatgggcaaccacttgaaccgtccctactgcggtaagcgcagtctcacctacctataccatcag

SEQ ID NO: 58001 - DNA, 405 bp, Zea mays
  Clone ID: MRT4577_152894C.1
tacctcgaggccggccgggccgggatttccctacgcctcgcgcgcgcgctccgttctcgttgtacaccggctgacgcgatacagaagaaatgttcttgacgtcgctgacacacaagatctggaatactactctctagcatggtcgagagcgtgccaccatctagccgctagtagtggcttaagacaagctgagcgaggcactcagggtattgattcccgtgtcaagaggaagttcctgggatgctccttgatgccctacattgcccatgagtgtgacaagactgccaggtactacctccccaggagataaatgagttcggggtgcacaaggtatctgatctggagttgctcatgatgcacaacaggacctactgcggtgaaattggtcacaacgtgtccactaag

SEQ ID NO: 58002 - DNA, 824 bp, Zea mays
  unsure (1)..(824): unsure at all n locations
  Clone ID: MRT4577_152895C.1
taaaactatcagcacgatggctgacatccacgcataattcaacggcacgatggccggcaatcaacaatactacatattaacctaatcatgcacgtatataattaacttaatattaaaactaatcatttcatataaatcatacacgtataacataaatcaagcaatcaccttggaggtttcgtcgcgggcgagccgacggggcgcgggcgagacgacggggcgcgggcgagacgacggggcgcgggcgagacgacgggtcgcgggcgaggcgccgggcgggcgagggcacggcggggaaacggcggggtcacggcgaggagtgcggcgggggcggtgggcgggggcggtttcatgtgtagtcctcttaggtttctacacatagtgtctcacaactttctccaaacattgtaaaatttttatcacagcctctacgtatgatatcatgacacgtggacaagtttcatgattttctgactttgtttgtgttttatacaatttttaaacatgtgcatgccaagttgacggtcatgtttagtgagcatgttgctcgaagtttccggtacgcttctgaaatcggtcgtaacttatgctaattaacatgaatatcattttttcatgcacggttttccaagtttcgagtgacctcccagcagccacatgtgtacgtgtcggggcaagttgcactatcttgcaggctggcttgcattggcacgtactaatgttaatgagcattatcctccagcaatataatgcatatgcctccgtggtacacgtacatatgttttcnacgtggtcaagagcgtgtggtcacagggtagcagaac

SEQ ID NO: 58003 - DNA, 259 bp, Zea mays
  Clone ID: MRT4577_152896C.1
tcggtcaaacacgtcaatagtagagattttggactagatttgtgcaaaacacttgaaaagaaaagggcatcgtaaacgccgccggcggctttgatgcttttcgccgtgcgatgtggtgcccttcggcggtggggcccggctacgtaacttcttccacgcattctttactgcttctttggtacattttccgcgcgaccacctgggggggctcttgtggagctccccgagggggaggaggtactttgcgaattacgagctg

SEQ ID NO: 58004 - DNA, 254 bp, Zea mays
  Clone ID: MRT4577_152897C.1
ataataaatgtcaggtgcacaaaatttttttttagtcctatgacaatgtgcggggcaagaaaacctcgaatctacacctaggtcagtgaaggatgacaacccaatatatggcttcaatgtctgctgcaggcacctcaagcgatacagctttttggggctgcctgagtgtgatgatatcagcgatttaggtgccttgttcaaaagaactacctccttttgatcctagactgttactacatcagggtttggtccat

SEQ ID NO: 58005 - DNA, 752 bp, Zea mays
  unsure (1)..(752): unsure at all n locations
  Clone ID: MRT4577_152898C.1
acgcctgcaggttccggtccggaattcccgggtcgacccacgcgtccgcgcgtgcggttgggaacgcggagcggacgaattcgattcaacggggttccgggccaggctatggagcaggtgaatgagctaaaggagaagggcaataaggccctgagtgctgggaacattgatgatgccttacagtgctactctgaggcaattaaactagatccccagaaccatgtgctctacagcaatcgctctgcagcctacgccaagaaaggagactaccagaaggcctatgaggacggctgcaagactgttgacctgaagcctgactggggcaagggttattcaagaaaagcagcagcccttgaattcctaaaccggtttgaggaagccaaacgaacctatgaagaaggtttaaaacatgaagccaataatctccagcttaaggagggcttgcagaacatggaggccaggttggcagagaggaaattcattaatccattcaacttgcctaatctataccaaaagttggaaaacgaccccaggacaaggtcgctgctcagtgaccccacctacagggagctcatagaacagctgcagaacaagccgtcagacctgggcacgaaactacaggatccccgggtgatgactactctgagtgtcctccttgnggttgatctnggcagcatggatgaagaggaagaggcagnaacacccccacccccacctcctcccanaaaggagcccaagccagaaccaatgga

SEQ ID NO: 58006 - DNA, 307 bp, Zea mays
  Clone ID: MRT4577_152899C.1
tcgcgatctagaactagtccgtgatgcggaagacgagccaagttgacctcaagatggtgctaggagtggacctctgccgcaaaacgacgtcgtcagtcggacgaacctgaagatggataatctgacgaatgtcaagacaaaagatggtcgtcaagcggacgtcgtctaacaacactaacctagtgttatccaagcaagccccggtgcatttgccacctccttctgttttaaaaagttttatcaccttcaatcatgcattaggtgataggagttgtgtgatcaaaaaaaaaaaaaacggacgcgtggg

SEQ ID NO: 58007 - DNA, 819 bp, Zea mays
  unsure (1)..(819): unsure at all n locations
  Clone ID: MRT4577_15289C.1
cctcgaggccggccgggattctcctcttcttcagactagtcgcgggctcgcggtcgcggccgaggatatcgaagctgcgagcaacgcgatcgagcgcgacgcgggtgagacccgagagagccgtgagggagccagggagggaaccccgaacccccgtcgtcgtctcgtgctcggtctctccggctggcggcatggagagtgccgtgctcgcctgcgaggcgccaaccgccgccgccgccgccgccgccgtctcctccgcgacgccgccaccatcaccgagtgtctccacaccttttgcaggaagtgcatatcagaggagtttgtaaataaggaagtgtgctgctgccctgtttgtagcattgacttgggctgtgctccactggagaaactcagaattgatcatagcctacagtatgtaaggtcaaaggtatttccttctaaaaaacgaaaggttgaggatccagaagtcacatcgccaattacatcacctataaagacgaaagtacggtctttatcttctttgacaaaacatgctcctcaaatgtctatgcaaaaatgcttgagaaagaggagaacaaaagcttcatgcttacaaaacctccctttgcactcaaccttgcggngcagtagtaatatcacaaaaaaatctggnngggtggagacctttagggtgtcactttcgagcagctaaaaaagaaaggtctcttagacnctaatcagacgatataaagacagctggaaaaaggactgatgatccagntgatgtaactcttgccagtncagcaaagactangaagcagattaccagacgtggaaatc

SEQ ID NO: 58008 - DNA, 1310 bp, Zea mays
  Clone ID: MRT4577_1528C.1
ttccccaccttccacccttcgatcccacgtcttctcaacctttcttcttctctcctcgagaaccccaatccaaacccccaaccgccaaaattcctacgagatatatcacagaaatatcgtcttggctcagatcgtgcccgaggatcatggcgtcgtcgctggccgaggaggaggaggccttcgagcacacgcttctggtggtgcgcgaggtgtcagtgtacaagatcccgccgcgcaccaccagcggcggctacaagtgcggcgagtggctgcagtcggacaagatctggtccgggcgcctccgcgtggtgtcctgcggtgaccgctgcgagatccggctcgaggacccggccacgggggagctcttcgccgcctgcttcgtgctgccggggcagcgggagagcgccgtcgagaccgtgctcgactcctcccgctacttcgtgctccgcatcgaggacggcagggggaagcatgccttcgtcgggctcggcttcaacgagcgcaacgaagcattcgacttcaacgtcgccctctctgaccacgagaagtacgtcaagagggagcaggagaaggagaccacgggcgctggcggcgaggagactggcggcggtgagattgatatacatccggctgtcaatcgccgactcaaggaaggtgaaaccattaggataactgtaaaaaacaagccatcaactggaagtggtatgctttcagctgctggtttatctggagggaccactgcaaaacccaagacaagcatgcttctcgcgccacctccaggtgcagctgggaagcttcgatctcctcttccaccaccacctaacgaccctgcagctgcaaggatgaattctggacatactgcaggaatcagggctccaaaagagcccaccaagagaaataacgaccctttttcagatctttctgctataaagcaaaatctaccttcatctgctgaacccggacaaacaaagagcacaggagctggatgggcagcattctgacgatggatgcatgatctactgctactattggcatttgtttatctgaagaaggggaatgggtagttgaagcaccgaacaaggatctggaactgctggatgcctctacccctttcgaaactgaatggttaaaatgattgatcaacctaccagttccagttgtcacttgtcagtcgagaaataaacctttcccagagttgtattacccgtctcaccacatgaatggatgctcacattttctggatttagatacagcgtcccatcttgtttttatgttattcgtgctatgtttcacaaagcaataccagaatc

SEQ ID NO: 58009 - DNA, 1106 bp, Zea mays
  Clone ID: MRT4577_152900C.1
ctcgcaacttgcagtaggtgacaggtgttaacaggagctggctgagcttctcttgcttctgcaagtagtagctgtagccgccctgtaggcagagagaggagagacgacgtacgtgagggagcgagcgagcgacgacagcatcaggcaggcgttgacggccatggcttcctccggcagcggtggcggctcgccggggtccccgtgtggcgcctgcaagttcctgcggcgcaagtgcgcggcggagtgcgtgttcgctccccacttctgcgccgaggacggggcggcgcagttcgcggccatccacaaggtgttcggcgccagcaacgcggccaagctgctgcagcaggtggcccccgccgaccggagcgaggcggcggccaccgtcacctacgaggcgcaggccaggctgcgcgaccccatctacggctgcgtcgcccacatcttcgcgctgcagcaacaggtggcgagcttgcagatgcaggtgctgcaggcgaaggcgcaggtggcgcagacgatggcggcggccgggccgcaggggggcagcagccctctcctgcagcggtggccgctggagcctgagtcgctgtcgacgcagagctccgggtgctacagcgacatgtactgcggcttcggcgaccaggaggaaggcagctacacgagatgaataatgaatggatcattcgcgcgcgcgcgcgcacgcatcgacacagatactttcttctattagcgccaagagacaacaacaaccgagggcctcaactttcttgttggtttgcagtgcgttttgttcagttcagcagctagctctccggtttggggaggagcttaatttcgatgagatttcgtgcgatccataaacttgtatttcttgccggttcgagctgtaaaatggaagtgcagctcatcatcatgtgtgtggttattaaacggaggcacaaatcgaggataatttcatattccctaaaccctaaatggatttcattgattagttggggcgatagtgccgggtgttaattagctatcaaaatttttttgatgcatatacatgtgggggagaaagaacaggcggtacgtacggaaatcaaataaggtagaattggaagctt

SEQ ID NO: 58010 - DNA, 219 bp, Zea mays
  unsure (1)..(219): unsure at all n locations
  Clone ID: MRT4577_152901C.1
actattccgtattccctataggtcgggtagcttcaccttccacactccctgttaggatctctcgatcattcatgcctgatgtagttggtcgtcctggatagcagtaaagactaagcatgccgtgttcataagatttatttagcatgctgatgtgttgaaaaaaaaacaataaaataaaaatttatttaatatcctttangtctttattatgaaaaataa

SEQ ID NO: 58011 - DNA, 295 bp, Zea mays
  Clone ID: MRT4577_152902C.1
gcagcttactggaactgctcaagtgcattttatttgaactactctcgtactctggagtagcccggatcattaacgcctatcactacagatcatcagcgctcatatgtgcctagctcaatctgctgtcgctctctatacgatctctacctcaagcaactggtttcagagcatcttgtggtatccacagatccatctgcttatctggtgctccagatagaacaattgagtgatgacctttatcctggcttcacaatctctcacctggatcatgaatagcaccattctgctacgtaca

SEQ ID NO: 58012 - DNA, 343 bp, Zea mays
  Clone ID: MRT4577_152903C.1
gtttatatacctacacatggggctagtgacatgctttaaatgcttggggagtctgaccctaccatggtgtcatacactgaatttttagagatgttcaatgacccatattgtagatttggtatcctgaccactttgatgaatcttgacgagagtgatcacactcgtcacggcctccacacatgctacatcagcctgtaccctataattgattcacggagtttggaaacaaaacactttttcagcctgtgcaaccggtgctacactgaaggtaaggttccgtcagcgttcaagttggaggagttcagtttcaacgaatacggtaactaatccgatgccctcatcg

SEQ ID NO: 58013 - DNA, 3243 bp, Zea mays
  Clone ID: MRT4577_152904C.1
gctctcgccgccttttgttagtctcggcacgggatctccgaccgagggcacatagctcaccagtcgccggaatacttggtagaagcaggagctcgggatgacttatgggctctggcgggtgggctgacccgccgatgcatgatgcgctcactcgtcgtactttctccttcggtagccaccgtcttcgcccggtcctggcagttaaggaggagaagacaggcaggaggaggggaggagttagtgttaagccaatgggggctattggaggcaatgagtcggtgcagtgggataaagtggctggagctgatgctgttaatggcggcggaacaagtgtgggcaggatggacaggatacaggtgctggtcaggctgaggccactgagcgagaaggaggttgcgaggggagagcctgcagaatgggagtgcatcaatgacaccactgtcatgttccggagcacgttccctgatcgacccaccgctccgacggcatacacatttgatcgggtttttcattctgactgtcgttagtccacagtctacgactttttggttagggaagttgccctctctgtagttagtggcattaactcaagtgttcttccatatggacaaacgagtagtggaaagacttataccatgaatggagtaacagaatatacagtagcagacatatatgattacattaataagcatgaagagagagcatttgttctgaaattctcagcaattgaaatatacaatgaagctgtaagggatcttctgagtgcagaaaacactcctcttagactctgggacgatgcagagaagggcacctatgtggagaaccttacagaggttgtgttaagggactggaaccacctcaaggggcttatttctgtatgtgaagctcaaagaaggacaggggagaccttcttgaatgaaaaaagctccagatctcatcagatactgagattgacaattgaaagttctgcacgggagttcctagggaaggacaagtcaactacacttgtcgctagtgctaactttgttgatctagcaggaagtgagcgtgcatctcaggcgttgtctgctggcacgaggctaaaagaaggctgccatattaacagaagtttacttgcccttggcactgtcattaggaaactaagcatggggagtaatgcacacataccatacagagattcaaagctcacacgcatattacaaccttctttaggaggtaatgcaagaacggctattatctgtacactgagcccgcgacagcaacgtattgagcattcaagaaatactttattatttggaagttgtgcaaaggaagtagttacaaatgctcaggtaaatgtggtcatgtctgataaagcactagtaaagcatttgcaaaaggaagttgctaggttggagagtgagttgcggcaaccagcttcaaattccagtcttgaagcattagtaaaggaaaaggataaccaaattagaaagatggagaaagaaattaaagaactcaagtcacagcgtgatttggctcagtctagattgcagaatttgctggagactgttggggaccaagtgaagcactcgggctcagggaagcgttcagcccgcagtcctccatcaattggaatatccccaggcatcagcagggatgatagttctcagatctctcacgatgattcagatctttacaaggacgtgcgatgcattgggaccagtgggacaggaggaaatgaacagttggacctgtcagctggtgaaagcagtagccttcaaggtttaaacatgaattctagtttgcatggaagcggttcaaatgcatcagtgaattctaggcgctcaaggctccttagtgaatctcctatcacattggagcagcatttggagaatatcaaaaggccttttgttagtcttggcagagatctaggatcgtcgacacataactcatcaggctccagaatacttggtagaagcaggagctgtagatcacttatgggttctaccatgtttgatggcatggagatggatgatggcacccctctgcatagaagtttggttggtttccctggaaggcctgaagggaatcatagaaggggatcaacaccgaaccatgacgcagaaagtgaaactctttcaagagcaggatccgtagtttcaaccaagacaaatgctgcatgcgatgcagagtttactggtataggtgaatttgttgctgaactgaaagagatggctcaggttcattaccagaaacagttaggcaatcagattacaaatggagaatttgtagacataaagaacattggtttggacccgattgctgatgcttcacaatcaccttctcgctggccattagaattcgagaagaaacagcaagagatcatcgggctttggcacgcgtgctgtatttccttagtccacaggacctactttttcttgctattcaagggagaacaagctgattcaatctacatggaagtggagctccggaggctatcattcctcagagatacctactctcggggaaacacccctagcaatgcggtggtaggcagcttgaactcttcccccgctgcgagcgccaagaagctgcagcgtgaacgggagatgcttgcgaggcagatgcagaagcggctcacggcagaggaaagggagcgcctgtacaccaaatggggcatttcgctggactccaagaagaggaagctccaggtcgctcgccggctctggaccgaggccgaggacctagaacatgtcagggagagcgcctcccttgtcgccaagctgatcgggctccaggagccagggcaagtcctcagggagatgttcgggctcagctttgcgccgcagcagcagccgccccctcgccggcgatcctccaatggctggagatacgggatcccttcgttcggctgatcggatcggatgaacggtgcgagcgactgaccaaagagatgtaactaccctccccccacttttttttttaatcttggtgtggtgtacggtaccttctgatttctgtagttttttagtaggatacctaccggggccatcatttgtttgtgcggctggcttcgtgcatgcttttctgcctagccgccgccgatcaggcctcaattgctgacgacatcgtcctatcctacgaccgtaattgtaattcctgactcttctgtgttatcgtgttgacgtgcgctgcaacagcgcaatagtaacgtgatgttccattccatcaggaaaaaaatcactgggactggttcctatagct

SEQ ID NO: 58014 - DNA, 350 bp, Zea mays
  Clone ID: MRT4577_152905C.1
tattaatgcagacaattgaaagttctgcacgggagttcctagggaaggacaggtcaactacacttgtcgctagtgctaactttgttgatctagcaggaagtgagcgtgcatctcaggcgttgtctgctggcacgaggctaaaagaaggctgccatattaacagaagtttgcttgcccttggcactgtcattaggaaactaagcatggggagtaatgcacacataccatacagagattcaaagctcacacgcatattacaaccatctttaggaggtaaatgtggtcatgtctgataaagcactagtaaagcatttgcaaaaggaagttgctaggttggagagtgagttgcg

SEQ ID NO: 58015 - DNA, 759 bp, Zea mays
  Clone ID: MRT4577_152906C.1
tgtccggggcaggcggtgaggcggcgctatcagagcggacttcgccctccccccacccccacgtccccctacaggtagccctgcaaccatggccgcggcggccgggctcagccgccggtgcaccgtccgctgacaagtcgacctttctcctacgacagcaaccgtcttcgtccggtcctggctgtttaaaaagagaggaaaggcaggaggaggggaggatttagtgttaagccaatgggggctattggaggcgatgagtcggtgcagtgggataaagtggctggagctgatgctgttaatggcggcggagcaagtgtgggcagaatggacaggatacaggtgctggtcaggctgaggccactgagcgagaaagaggttgcgaggggagagcctgcagaatgggagtgcatcaatgacaccactgtcatgttccggagcacgttccctgatcgacccaccgctccgacggcatacacatttgatcgggtttttcattctgactgtagtacgaaagaagtctacgaggaaggggttagggaagttgccctctctgtagttagtggcattaactgtgagcataggccattcaacaaacaaatttctatttctgtaatgacaaagtgttttccctaaattagagcttttttttctctgacagcaagtgtttttgcatatggacaaacgagtagtggaaagacttataccatgaatggagtaacagaatatacagtagcagacatatatgattaccttaataag

SEQ ID NO: 58016 - DNA, 331 bp, Zea mays
  Clone ID: MRT4577_152907C.1
gggggggctttatatattaacttaagggttttttagggacagggacctccgcgttttgcacgaatcttcactttttaaaagggtttaactaaccaaagttctcaatatgcgtcacaacacaggactgctaatttaaccggataagtcataatcgccagctgctgctgcaccggatgccaagggatcggccgcagcagaattttgccgtcggttggatggggaaccggtactggttggcaaacccgcgggaatgttggagtgtctgggccaaggcctggtacttggggatgtcggggtcccccacgctgggacgggtgggcttcatggactc

SEQ ID NO: 58017 - DNA, 224 bp, Zea mays
  Clone ID: MRT4577_152908C.1
ggctccgttaacaggaccttggcggccgaaaccgaggccttgcggaattcggccacttgccggccaaagggcgccgtcgcggaggtcaaggacaagggaacctgcggaatttgctgggcttcctcaccattaccggctgtggaaggcatcaaccagattgtaattgccgacatgacctcctggcctgacaaggaccttgttaactgtgacacttcatacaacca

SEQ ID NO: 58018 - DNA, 925 bp, Zea mays
  unsure (1)..(925): unsure at all n locations
  Clone ID: MRT4577_152909C.1
ctcgaatttttttttttttttttttttttaaaggaaagggccaccagggaaaatttactttaccatttttaaccttgtcactttccccctgatttctttttttaaaacagcatttctttttaaacaacattggggttccccaaaaaattggggggcaaaaatcaaaaaaaaaattttaaaaaaaaaaaaaaaaaaaaaaagggggtcgttttccctagggccccccaataaaccctttggccccaccctcctaaacctgttttttggattcctgggcctttcctttgttgagggcctttttaactttttgggaaaggccctcacctttaaaggccctgacccaaagggaaggggccaacctggaaaattttcttccaaaaagggccccaaaacttagccctaatttaaagggggccttttgggaaaaacccggggaaaacccttcttttgggccctttttcaaaaaggcgggcctgaataactttttttgcccccttttaagggtcccatttttaggttacttgcacttaaggtctttgtttaaggctccctcctctttgccaaccaatttccctcttcttgggggatttggtataaaaccttttttttccaaacccctcctttggaaacctttctgttagccgggttcaataaaacttacatccccttcccctttttttttcccatccttgaaaattttacaaactttccttgtttcaaaactttttttttaattcctccccatatatcgttaaaaaaaaaaaaaaaaaaattcgggggggggcccgcccacatttccctttagaaaggggaaacaaccccccccggggggggccgcttctttttttttttctacgtggcgcccctcccctttntccacccgcaccaccaccaactttcccccccttttcccccattgttataa

SEQ ID NO: 58019 - DNA, 1595 bp, Zea mays
  Clone ID: MRT4577_15290C.1
ttttttttttttttttggagcaggtttaaaaccggttcagccaggattcataccagctgaaccagtgcaacttgaaatttgactctatctcgacatctcatccagttttaattacacagcctagatactacacactttgtcagtaaaaatataagcggtaaaaatgcactgaactagggggatatatataacagtaagcccatgggagcttctaatccgtgacactaacatctatgtacatgttactaagataccattaatcaattggtcctacgagtcaaacgatacactgctggttctgaaacgaagggaagctcgaagctctccatcagtcttggttgctttcagtttttggaaggggcgctcctgacctggcgtaaaataccttcagcacgaattcagcggcgggcgtgcccacagatgaccgcactcggcccttcgatcgtttgccaatccagtggtctgctaggtcgtgcagggtgatccctgggctcactggtctgccaccgcagaatatctccacctcagtttcacttgaaagattaagtttctgcgcgaggtatttctgtatgaaggaagcaggcaaatttacatccttgatcctcagaaattttgatggtatctgcggcagaggaggatgtcctttctggtcaaaagcagcaagaaggtagaaccataatgctggcaatctcctcttattaggcgtattctttgtcttcctatttttctgttttccctttaaaatcaatactttcttggttccagttctcttctccagatttccacgtcttgtaacctgcttcctagtctttgcttgactggcaagagttacatcaactggatcatcagtcctttttccagctgtctttatatcgtctgatttaggtctaagagaccttttctttttagctgctcgaaagtgacaccctaaaggtctccaccccccagatttttttgtgatattactactgccccgcaaggttgagtgcaaagggaggttttgtaagcatgaagcttttgttctcctctttctcaagcatttttgcatagacatttgaggagcatgttttgtcaaagaagataaagaccgtactttcgtctttataggtgatgtaattggcgatgtgacttctggatcctcaacctttcgttttttagaaggaaatacctttgaccttacatactgtaggctatgatcaattctgagtttctccagtggagcacagcccaagtcaatgctacaaacagggcagcagcacacttccttatttacaaactcctctgatatgcacttcctgcaaaaggtgtggagacactcggtgatggtggcggcgtcgcggaggagacggccgcagagcggacacgtgaggcacgccgcgaggcccgaccgcctcagcatcaccacgccctcggctcctctgtcccctcccgctccaggcgccgcagcggcggcggcggttggcgcctcgcaggcgagcacggcactctccatgccgccagccggagagaccgagcacgagacgacgacgggggttcggggttccctccaaagctccctcgtgccgaatttgaaacagcttcacggaagtagtatt

SEQ ID NO: 58020 - DNA, 229 bp, Zea mays
  unsure (1)..(229): unsure at all n locations
  Clone ID: MRT4577_152910C.1
gaaatcgctagacttttttaacatgtagttatttatgaaggacgggggaaatttttccgatgggtcgggtaaactatcnaatcaccatccacttctccatattgatggatggcttttgtccccatcattcatctactgaaataacataggtctaagtagatagagatgtcaatcaaccatctcaaaagggttcaatcagggattacaattcttctgattcataaagcaa

SEQ ID NO: 58021 - DNA, 167 bp, Zea mays
  unsure (1)..(167): unsure at all n locations
  Clone ID: MRT4577_152911C.1
gtgataatcacataaaaagantgtcaaacactgatgcaaaatacatgcagcactgtacatcacaccaatgatcgattgttaagcattcaaagaactagtatttcaggtgctgcgcaaaacaccaaggatagaaattacctcaatgacatcaaattattgttctcacg

SEQ ID NO: 58022 - DNA, 379 bp, Zea mays
  Clone ID: MRT4577_152912C.1
cgaccacgcgtccgccaccctgttgcaggagcgtctccctaatctccaggctctgaggcatggttttcttagttgcattccaaatccctatggcacaagggctcgaagcaggtcatgtcctcaccagttcggcgtctgtttactctccgaaacataccaggagatcttatgcagacctgcaatggcaaaatgtctatatgtgcttggatcacatgggtactgttggtgtttgaccgtctcacgcacatcgaaagaatcaagaatcaccctatttagagtggctcaaggcgcagagcaaacatgcccttagaccagaaagcactgaaccttattattgtgcatgcttaaaacggtaccttatgttctctccaagagggtt

SEQ ID NO: 58023 - DNA, 174 bp, Zea mays
  Clone ID: MRT4577_152913C.1
caaatcaaagtgcactaatattgctaccgttttcatctatactactctattaagaacctacatgtaggtatctgatcatcagccaatgtgtaagcgcaggtcgagtcatcaagctagctagcccggagcacgcctagacacgccagcagcaatggcggctcagctggccgtcgc

SEQ ID NO: 58024 - DNA, 370 bp, Zea mays
  Clone ID: MRT4577_152914C.1
aatcacaacactacatttaattggttcaggacaacgaacgatccaacattcatgagaccaaagcaaatactagaaaacgaaaagtaactagggaagctgagagatccaacagtgggagcaatatgccacttacaccatgtccagcatgataagttaagtcctggatctgaaggagcacaatgcccctggcccgcatatgctttgacattcactggcacctctcctgacgcacctacacccctagcgcccccatcaccgaccccacgatgtactcaccaaccatgcagcactgccccatggcaacccctttaccagaccgacagtaacccgttcgccaacagcgtgcccgatgcaccattgtacaccccga

SEQ ID NO: 58025 - DNA, 397 bp, Zea mays
  Clone ID: MRT4577_152915C.1
atctatcttgcccatatatgaattgttgatgaccccggtgtatttatcaatgatgatcaaaggatgtgaaatttgtaagaatgttggcatcttctactttccgtatagtattgtggttgatcaagccttgtgtggcaatgtgtggtatggttcacttatggtggtgtgttaacttaatttcaatacatatatatatatatatatgtgtgtgtgtgtgtgtgtgtgtgtgtgtgtgttgaccatgtcattgaagaaatatggatgaatatatgaatctgcttaagatgttactgttagaagagcatgccctctttaataatttagttgtgatctagggtgtatgtctattgtaaaatcatgtgtatatcacatgttagggcgaattataggtgcaacc

SEQ ID NO: 58026 - DNA, 708 bp, Zea mays
  Clone ID: MRT4577_152916C.1
ccggccgggagtccggccgggagccggccgggaagaactcctgcaaggtggtgtgcatgcccttctggggctgctgccgcgtgctctgccacctctggcgcaaggtgcgagacaccgagcgagtgtaccgcggccggcgccagcccggcgacatcgaggcgggggatctcagcacgagaagctatggctacagtggctcgtcgtcgccgtcctcctcctccgattacagtggccaccgtgggcgcgccgtagcggccaggtccaaatgggactcgtcgtcgtcggcgcgggagaggaggaaggacaggcttcggcagtccctgcgcacgaggagggccaactccaaggtggagcacgccatgagaatgagccgtgagagtgaaagagaacgccggcacccccatcatccccattcgatcggggccaggaggaaggaggcttcgtcccttcacgaacatggctcggcacctcgtgaccatgctcatgcgcaccgccgtacatgaaaggcaacctttgccgattccgcctgacattggcactgctagtgtacagtagagtacctgtagtaagtttgtatcccatcaattgattatatccttacacagggatcatacaaaaataatactttaaaattggcagcaaaaaatttggatatgctagaatatttctatgaatttgatcagaattaaacaagcttgacctacacac

SEQ ID NO: 58027 - DNA, 185 bp, Zea mays
  Clone ID: MRT4577_152917C.1
gccggccgggtcggaaaaaacaaaaagcagcggcgagctcagagctttcgttcttgtattataaggcggcatgaagcgttacagcgataggacgagaagatgaagagaactactctgtgggcgatactaggtctccagttccttctggtctctgcggccgcggccaaaggacctgcagggcccac

SEQ ID NO: 58028 - DNA, 657 bp, Zea mays
  Clone ID: MRT4577_152918C.1
ttgtcggcacgaggccaacttggggaggagagctcggaaaaggaaaagaaacgaaagaaaggaaaatcgaggtagaagaaggctatgtgatgtgaggggaaattacgtgagatataagccaaatccattgaattctatcgttagctggctgcttgagctgagttctttgattgccgtggtggtctgactaatttcctgtgacctcctggaggaattctctgcttcatttctcgagcggggcacgaggagctgagttctttgattgccctagggcgactgcctccagtcaaggaaatcgctgaagacagagccgcagattgccagattcgtagttccgcttctgcttcggcgcacctgttcggtgtggaatgatggaggtgagcccgtctccggagcaaggagtgatggcgggaagggagccgttcgggctgccgaagaccccggcaacgccgccgtcctccgggggcacgcagggcctgcgcatggcgtacacgacggacggcaccgccatcttcaccccggtgagctccgtgccgcccgcgacggcgacataccagcccgtgggcggcagcgccgcgtctgcttcaagcttggctggcgtaagaggcaatggtggcgcgcccgtgcactcgggtgggcgcgggtgagcccgggacc

SEQ ID NO: 58029 - DNA, 821 bp, Zea mays
  unsure (1)..(821): unsure at all n locations
  Clone ID: MRT4577_152919C.1
cgtattaattggtactatttgtgtattcctgtcagcgttgttgatagcaaaaggcactgaatcagtgctcataatccaggtgcttgttcatgattgctgccgttttggtccacacgttctcttctaggggcttatatagcttctgttttttctttagctagaacagattatgctataccttctgtccagtttgtggcttctcttcagcttgtagtaatatagtgcctatcatgagacgtgtaggaataatagcaatacgccaacaccagaatatatgtaaggcttctcaggatatcggcatatcagcatgtagctacactataaaagggatcctatcatcctagcataaagtggggttcaaaatgacccatgtttgattaggcaattagccaattactatctggaagggttgattgagagtagcaaaaaaaaggtaaactatctatctgtgtgtgttatcgttatttctccatagtcaccggtgtttaatgtgtttcagaaattgatcttcttcgtgtttccttgtcctcctgtgttctatttgtccactcctgaatcctgatatttaagatgctagatgcttgtctttaccaagcctgccactgatatattactactttataattcctacctgatttggattccgaacatgattttgacaccacagaaatctgttttactgtactgcagcctttgcgtttatggatctaagaaacattgccacttattcatagtggcatatctatgtatttctgaataatttcattttctctgcagatgcataccatttangtatagagctaacaatgatgaaatctctg

SEQ ID NO: 58030 - DNA, 301 bp, Zea mays
  Clone ID: MRT4577_15291C.1
attcggctcgagcccaaccagacgccactgttatttcttgctatcaacaactggcccatagcgggaagtatatacaaatggtgcgggacctaaacaagctgagctgagaggactagcaatagtgtggtgagacctgagctctcaggagattttgacgatgacaaacgtacactgcaccctcggcgggaccaagcaccacaccgattgcgagaaccaggcacgcagaagggtctaccgaggacaccagtgatcacttaaaggcccaggcgagaccccctgccgggactgcggctagcaaggg

SEQ ID NO: 58031 - DNA, 138 bp, Zea mays
  Clone ID: MRT4577_152920C.1
gatgatgtttcatcattctgctcacttaatgaccacccgagcacaccaagatggcatgatctatatttacagctccagccacatcttcccaaaccttccaggctccgtgcctatgctgctattgcaatataaccaaac

SEQ ID NO: 58032 - DNA, 933 bp, Zea mays
  Clone ID: MRT4577_152921C.1
ctattccattacgaggggttgtatacctataaggatgacgcataaaaatgctgcaggacacaaaccatgtgatggggcgtcccaaagaaatccgcctttacattgtgcagtgcctctgagcgcttctaagaaagaggaattggctgctaggactcctctggtccttcaagtgatgaaattgttggggtgatctggagagagattcctttaggagaatattaccctgatttttcccattattggatgatctgatccgctgtgaacatagctctggagaagttcaacatgcactgtacaatatcttccaatcagccattctccccatgataagggtttaataacagattgtgacccaccaattgtacagtttttgttaccccactttggtgttgtaattcagttcattgtggcgtcattccattacgaggggttgtatacctatgaggttggcacctcagccctaactgattatacctttgcaataccatatacaaggtgaaatgtatcggtagttctaggcgtaaataaaaatgctgcagggtctgtcattcagcttaaggactatggagcatctttttaatattcattttaccaatgatgttcatcatatatgctgggaccaggcagaaagacacggcccacgcgtccggaaagacacggatatggaatcatataagtcaggtgacctcggcttctcagagccccatgttaccatttgcccattgccatccccaggatcgtgtttatatatatagcactagagctacgaaccgttttgatgttactactggctttgctacgtcgattgtttttaattttatacaaaaccataaactagagttacatgccaacaaacacgattttcaattttgctcgttctgtagttatgtatgcagtatttcttatccatagaaacagacgaatagtatgatg

SEQ ID NO: 58033 - DNA, 435 bp, Zea mays
  Clone ID: MRT4577_152922C.1
gggaaatctcgtaggtttgccagtaattgttgttccaactgggttcaaaaacataccgagtccacctccaactggtactcggagacgaaccacagtcaacacgggcatatatgctcctcctaaccatgatcacatcgcattagccttagcaatggcttaccagtctgcaacaaatcatcataagcagcggccccccatagatgatctgggaccaaacgacacaatacccaatccccctaccgttcccatccctcctagacgcttgcatatgtaacagagtttgtaagaaaccttttagtgcctcacaattgtcaaagcctgctccagactgtaacctgtacctaagaacaatatcatcattcaaaatggcaagatttgatggataccccgttaggtttttttttccttcttgtttctttcgccatatcacgattc

SEQ ID NO: 58034 - DNA, 467 bp, Zea mays
  Clone ID: MRT4577_152923C.1
ctgcacgagccgggcctgaatatattgcctggtcgacgttctctctatgtcgggggccgacctgttatttatgtttacactgtccccgaattggatgtctgggtgagcaggacacaaacaacgctaagtcacaacggacatgggctgcctcaacaacacgcataatggccgatgtaacttacactgatcatgcaacataccctgtaagcgaactgccgatcaacatccttgtcgaacagtgctccaggcacggagcaatggacgtaaatttcttcctgtggatgataacataacctacatgaatgaatgctgcaacaatggtagatcttattgattcaagtgccttagcatacgaaagtgcaagcactagtatgcatcatatggccacctgaagccaacagtaacaagtggatgttggcactgccacaaggtctgaaccgactggtaaagctgaacagcaagcttgt

SEQ ID NO: 58035 - DNA, 550 bp, Zea mays
  Clone ID: MRT4577_152924C.1
acaagctttttttttttttttttttttttttttatttttttttttttttttttttttttttttttttttttttttttttttgggaggaaaaaaaggttggtatttgcccaacaaatacacccaagaatgggattccccaccccacccaaccaaaagaccaataaacccccatttattaaccccccctttttataaaaaacccaggttgggggccgggccaacaaaccacccaaaaccgagaaaccaaaaaaaaatcctcgggttggaaaaaccaaaactggtgggaaccccctttgtacccccccctcccccaaaccatggtccctgggccggaaccccccaaaggggaaatcccacacaacggggggccgtaacaagggaacccaacccgggaccaaacctgggggaaaaaagggcaaaagcggttcccgggggaaaaaggtaaccccccaaaaattccaaaaaaaaaacaacccgaaagaaaaaagggaaaacccggggggcccaaagggggggccaacccacaataaatggggtgggcccactggcc

SEQ ID NO: 58036 - DNA, 210 bp, Zea mays
  Clone ID: MRT4577_152925C.1
attagttggagggtttctcttggacctggtggagatctgggtctaacatcccgagtcacgaatgccaacgcagctggcagacctttctcgtatacattggcctatcacacatactaggctgtctctgacaggagcaacgtgcgtgtggtagggctggtcacaatgtgctaccttgacaacttgcaggcggaggcgctctttacggggcat

SEQ ID NO: 58037 - DNA, 312 bp, Zea mays
  Clone ID: MRT4577_152926C.1
ggtggggggaaaccaaaccaaaaaaaaccgggcccaggtaacaaaagccaccgataaagggccccagtttgtttcattggtcccaccgccccatttaggggggccaaaaaccgagtttaaaaccccaaacaagtcccatgaagggccccatcggaaaaaccgctcctttgtaaaaaaaggctttgggttattccatttggccaccaaatccgggcctgtgaaaaaaaaaaatgggaaaagtttcccctagcccccagccaaaagaactttacaacccaggaatccccacccctccgggaatacgaccacccc

SEQ ID NO: 58038 - DNA, 782 bp, Zea mays
  unsure (1)..(782): unsure at all n locations
  Clone ID: MRT4577_152927C.1
ccggccggtgctgaaagtgtaatctacagtttgaaaagccacttgatgaggatactgcaagagaaattttgagagcagctcctggtgttaccattatcgatgaccgtgcttccaatcgcttccctacacctctggaggtatcagacaaagatgacgtagcagtgggtaggattcgtcaggacttgtccctggatgataaccgagggttggacatatttgtgtgtggtgatcagatacgtaaaggtaccgcactcaatgccgttcagattgctgaaatgctgctgaagtgaatgcgacttaaccctcttgtccttccctccctgtccctaattggtctgatcaatgctggactgtactctgattagtttgacctcaattttggtcgcctgttctgtattctcccgtgctagtgcaataattgtgttatgggcttgagttatctgctgtacgcataagtgggctcctaaactgggaaataatgggccgtccttattcagcagtgccgggttctgtggatcacagggcccaaagtgtcctacgggatttacactttcatgtgcatgaatagggtctgattgtaaccttacccagaaggtactgggaagctctcttgagcaggaagcatctgttgcaggtctgaaagaaactgtgcatcgataagacattagagttgagaggaaagagggcgggttagccagtaaatttctgagatcgcatgatgtgttgttcgtcagtatatgtaatcctttgtttcaatggatttagttgttttggntggtctt

SEQ ID NO: 58039 - DNA, 266 bp, Zea mays
  unsure (1)..(266): unsure at all n locations
  Clone ID: MRT4577_152928C.1
gtctattgacttggcgtngaacatgccgcgtctagccggatgcggtcggaacgagagaggatatggactcagcatgcagcgatccaaggactcgtactcgccgcacgtcacaaccacttgtacccggactctcagccagggctagatcctcctccggcgcaggggggctacggctacggctaccagtaccagggctaccttggcgaatctgcgaaccctccttattactactacactggtcagctggccgagcagcccccagctcc

SEQ ID NO: 58040 - DNA, 2055 bp, Zea mays
  Clone ID: MRT4577_152929C.1
gacaaattcccacttcatcggtacctcgaggccggccgggaaaaccctaatcgacattcccgttgtcattcgtcagcgcgccccctcaaccccgtctcagcctagcgcgccgccacaatgcaggccgccgccgccgtcgtcgtccgccacccgcgcctattcccgccgtccccgggccgctccgcgcagcaccggcgcgcacccagcaccgtgcgcatggcgctgcgcgaggacgggccctcggtggccatcgtgggcgccacgggcgcggtgggccaggagttcctccgcgtcatcacggaccgggacttcccctaccgcggcctccgcctcctcgccagcgagcggtccgcggggaagcgcctcgcctttgaggaccgcgagtacaccgtccaggacctcgcggcccctggggcgttcgacggcgtcgacatcgcgctattcagcgccggcgggagcgtcagccggaagtatgggcccgcggccgtcgccagcggcgccgtagttgtcgacaacagctccgcgttccggatggagcccgaggtgccgctcgtcatccccgaggtcaaccccgaggccatggcgaacgtccgcctcgggcagggggcgattgtggcaaatccgaattgctcgaccatcatctgcctcatggctgccacgccgctccatcgccacgctaaggtgttaaggatggttgtcagcacataccaagcagcaagtggtgcgggtgctgcggcaatggaagaactcaagctgcagactcaggaggtcttggaagggaaggcgccaacatgcaacattttcaaacagcagtatgcttttaatatattctcacacaatgcaccagttcttgagaatgggtataacgaggaggaaatgaaaatggtgaaggagaccaggaaaatttggaatgacaaggaggtgaaagtaactgcgacttgcatacgggttcctgtgatgcgcgcacatgctgaaagtgtcaatctacagtttgaaaagccacttgatgaggatactgcaagagaaattttgagagcagctcctggtgttaccattattgatgaccgagcttccaatcgctttcctacacctctggaggtatcagacaaagatgacgtagcagtgggtaggattcgtcaggacttgtccctggatggtaaccgagggttggacatatttgtgtgtggtgatcagatacgtaaaggcgccgcactcaatgccgttcagattgctgaaatgctgctgaagtgaatgtgacttaaccctcttgtccctccctccctgtccctaattgctctgatcaaatgctggactgtactctgattagtttgtcctcaattttggtcgcctgttctgtattctgccgtgctagtgcaataattgtgttatgggcttgagttatctgctgtacgcataagtgggctcctaaactgggaaataatgggccatccttattcagcattccggtttatatcttgttcagattcgtctaacagtccagcagtgccgggttccgtggatcacagggcccaaagccgcctacgggatttacactttcatgtgcaagaatagggtctgattgtaacctgacccagaaggtactgggaagttctcttgagcaggaagcatctgttgcaggtctaaaaaaaactgtccccccataagacattagagttgagaggaaagagggcgggttagcccgtaaatttctgtgatcgcatgatgtgttgtttgtcagtatatgtaatcctttgtttcaagtggatttaggttgtttgtggtggtcttatttaccgttttgcactgtaggcttcactttgcagggtggagtttgaatatagagattatgatggataagtgtaagctgttagaagtagtctaagatagatacatttgacacttggtagttcaccttttcttcgttttttactggaaaaatatctgtcagaggagtgcggcccagagggtgaatgcctgtttgtaaattgtaatcacctgtcacgaggttaattcgcccagaggagggggatcaaaaaaacaaaaaaaaaagggccc

SEQ ID NO: 58041 - DNA, 368 bp, Zea mays
  Clone ID: MRT4577_15292C.1
gccaaatcgtgtgttcaccgtggctgacgaacctgccggatcacctaaccgatgcggcggctcccgatgggcctgtaccgactccagagacatgcaacccgtatgccgttcgagcttggccctcgtgcggccacagccggaggtaccccccgcgcgcgcgggcgcggacacagtcactgagtgctacgcgcgggacaccacgactagccgagtctgcttatggtgcgcggcttcggtgcggcgattgcgcgcagacacattacacggaggacgtacgaccgatccggtggagccgaacatggacgggccagagctacaagaacttgaggtagcagacgtcggtgtatactctcaagagcttgaggttc

SEQ ID NO: 58042 - DNA, 342 bp, Zea mays
  unsure (1)..(342): unsure at all n locations
  Clone ID: MRT4577_152930C.1
cttgaagatgtagatcttgtaggtgcacctgctncagcacctngaagatgtagatcttgtaggtctccacgctcttcttgcccttcttcttggtgctgaagcaggtgcacccgcacattggcatctnctacacggccacgtgcatcaggaactccaccattaaccagtatccaggaggggggggcgcctcangccgccaagctcgcacgctataacaagaaggctaccatcacccccccggagaaccagacctnctagcgcctcggccttaccggagagctcgacaagcacgccggctgcaagggctctattttttttatcaataacctaaaactaagctga

SEQ ID NO: 58043 - DNA, 630 bp, Zea mays
  Clone ID: MRT4577_152931C.1
gggtacccgcggccccccctcgagttcttcccttccttttttttttttttttttttttctaatttttaagaatatcttatctttgaattaatcataagcacacaaaaggtatataaagatctgtcgtcacagcaattaattaagtaaaatctgggcgttattaattgtaacctatttttcatcaaaaccatgtatatatatggggtagctagccttccttatacgaccttgggcttgatagattaaaacttgggccactcataagtcacccccctaaagtaaatgtttgcattcacaggactactagtaggctccaattcctctagctctgcgaaaacctcatctgctgaaggttgcacgctaccgcaattgatcggctgatgcatcgccacacactcctcgtcatcgatggcgtaggcaacataccctgctgctgcattttcttccatcgtcatgtttgtcatttgctgacactcgaagttgccgttcttgatgatgttggttggttgttggccatgaacttcgtctgttcacgctgcaagttgttcttcttcttcttgcagttggacgacatgtgagtagcagtgtgaggccggggagtagccagcgagcacattgcgttgcattgcc

SEQ ID NO: 58044 - DNA, 167 bp, Zea mays
  Clone ID: MRT4577_152932C.1
cacctggggtgtttccaatgtgacataaaaagaatggcgttgcttcaaactagaaaaacctggcatacattgcgtgcagaaacggtccctgagaaattacaccccttgcggacgagggtacatgacttttactgctggggaaaaacttgtttcttattccaaagtta

SEQ ID NO: 58045 - DNA, 430 bp, Zea mays
  Clone ID: MRT4577_152933C.1
caagaagggtacacaaggggtctcacaaaaaaggtgaaaaaccgctgaccttgcttcaaacagggggccttaagagggaaggaacaaaaaccagggaactttgtgggaacccccccccaggaaaacaaacccaagcttttttcctcaaaaaagggaacgggggcccccgggggcctaaaggggcacccccgaccccccggggtttgggatcatcctaatgccttccaccaggggtccccaccggccccaaagggggtccccccccacgggacaaaaaagaccttgcccgcctgaacagggggggaaaccaggcccaagaaaaaaggccccctcccaaaaaccaccttaccctgggtgacccccggggaccccggccaaggccaaaaaaacttgttttagggcccgtcccacggcaccacccacccggggg

SEQ ID NO: 58046 - DNA, 499 bp, Zea mays
  Clone ID: MRT4577_152934C.1
ggggcaaaaaaggtttcatttttttaatttaaaaaccgggggggggttaaaagccacccaaggggaaaaccgggggcccggaaagcaaacccaagggcatgggggggctgttttgtttggggccgggctacaacatggcacgggggggcccccacgaccacaaccactttgaacgggggggcccttgacaaagggaacactagggggggcaagaaccactttttttttatgggccagtttggtgcatgaaaaaaacgttgctaggaaatttttgtttcaacaaaaactggttgtttttgtggggccctttccctgccttccaaagggggggctacccccactttgggtccctccatcaaatgattttggggccacccacggggggggctgtgggcccccccccgggaaccccccacttggcggggaatttggggggtttggctattttaccccccccccaaaccggccccttttttttttgaggaatttcaggggggct

SEQ ID NO: 58047 - DNA, 339 bp, Zea mays
  Clone ID: MRT4577_152935C.1
ggaaaaataaaaaaacttcattcccctttaaccaaataaactaaaaaaataccttttatacaacttgcggttttacacacaccataaatttttagtcaaaccattttctattaaaatcaacatttttgcaaacaccgttactttaacaaaattttttttctaaaacttttacaacccaccaaatgattgccattcctttccataaaactgctttttggtataacaatgctacagtggttttccacccatccaacaaaaaaaacttttggcaaaagttattaacccaatgaagccaattttagccaaatactttcttttaacaaatttttcataccttcc

SEQ ID NO: 58048 - DNA, 145 bp, Zea mays
  Clone ID: MRT4577_152936C.1
attttgatgggaacaatgatattgtcatagatggatgtgtccctactttaaacagggctgctgcaatgattaacttctttgaaaacactgctgtatgtgacgaccttggtgaggacatcaaccctgatgattatacgatgaaaca

SEQ ID NO: 58049 - DNA, 365 bp, Zea mays
  Clone ID: MRT4577_152937C.1
ggaattcccgggtcgacccatcgcgtccggactagttctagatgcgtagtgatccttggctagcggccctttattaggggcgtcctgctcactgaggcggacttttggctgttcgtgtcttttattgggttcgatgaggtatacaatctaccgcagatcggacagcgaagcacataactctgcttaccattcgtgcttgatgtctgtcccgataacatcaacttcaggtctacgccgttctctccaagagcaacacgatgctggtgctggagtacccttacccgttctactacaccaaggacatataccagatccccggcctctgcagctccgccaacatggaacacaccaggaagcactactac

SEQ ID NO: 58050 - DNA, 604 bp, Zea mays
  unsure (1)..(604): unsure at all n locations
  Clone ID: MRT4577_152938C.1
agagcggcgactacatggactaacatagataataatatgtgctcgaagctgggcgcaaaataaccaaaactcaagggggatgcttaaagcggagcgtccagtcacccagctcctcatgctaccaaggtagcccgaggagacgaaactgacgacgactctcgcagctaataatgctcccaagagagcatgagaggacacacacagactttagagtagcataagatgaaatagggagcgcggtaacataaacctcctacggtaacagcggacagacaaggttacaaccaacaacacattgtatataagtcaactactgcttcaatgaaatatccaatgaagaatcaatgcaactgatcgatctgctactaaagaatgggaccaaggcacgcaccctcccccgggaagagaaggcggtgacagctttcttcgcgcttaatgccataggttcatgcacaagccagaggggactgaaggcggcttcttgctgtagatcgcctccgagaaggtgtnggtaagctggccgtagaagcttgcaggatcattgatgagggtgtgcacgtacacgctgaccatattgcgatcatgcgggggagcacgcaagctg

SEQ ID NO: 58051 - DNA, 1694 bp, Zea mays
  Clone ID: MRT4577_152939C.1
gggtacctcgaggccgggcgggagctttctctatccacctttccaccgtcaccatggccaccgccactacgtccgcctatcattgcaacgccgtcctccaccttcccagacctccgcagttccgccggctcctgccccctctcccctccctcgtcacccgcagagccgcgagcgtcgggctgggggccgcccgtctcggttcgagggcgagggcaagggcaagttccgtaccgccaccgccaccattttttgaaaccgtggaggaggaggaggaagaggaggaggaggaagagcgtgggtggtcggatgcggaggcgggcttcagtgacgaggcagaggatgagcaggagtggtcgggcggcaacggcgcggcgcgcggggaggacctgggcgcggacgccggcgaggaccttagcgggtgggcgcggcagtggccgcgcccgcgggagctgttcgtgtgcaacctcccgcgccgctgcgacgtccaggacctgctcgagctcttcacgccccacggcaccgtcctctccgtcgagatctcacgcgatgccgagtccggaattagccgaggaacggcttctgtgacgatgcgatctctagcagaagctcgggcagccatcgacgctctggatggattcgacatggatgggcgtgaggttttcgtgaagctagcgtccgacgtcatttccaacaggaaaaacgtgaacctggcccacataacgcccacgaaggaccacatcttcgagaccccgcacaaggtctacgtcggcaacctcgcgtggtctgttcagccgcaagacctgagagagctctttacccagtgcggaaccgttgttagcacgaggctgctgacggaccgcaaagggggcaggaaccgagtctatgggttcctctcgttttcttccgcccaagagcttgaggaagcgttaaagctcgacagaacggtcttcttcggacgggatatcgtagtgaaggaagcccatgtagagcgccagacgcgctgagccgctgagtgttacccttgagaactgcactttttttgtctgcctcgttgactgactaagctcatgctccaggcacaagctacacagctgacgaagaagcaattgagcggttcatcgcgaaagagttaaaaaaaaaaacggtagtgtaaattagtaccattgctgcaactttgtcagcgccgccgtggatgctggtgtgagaaattctaggacgaactgagaactggtattgtagtggtaatacatgttgttttagcttcttataataccctccatacagtaatagtgctccttcaccacacgtttctaatgtctcgaatttttgtttgtgaaagggattctaattgagttggtcagattgtagaagacccggctctggttgtggtttgctgcacttctaaggctatctctagcaatctattcatctccatctctcatttcaaactttactattttaaacttgcaatatatagtgtaaaacaatgttttgcatgattatatgtacaatttagttatagtctaataccctaatatcttcaagtacacaaaggtcctgtgagttgttagatggcttgagtagaagtccggtattggtggtagtcgttctctgtagtttcctgtacatagacgtggcagtggtcgttctcacatgctacggtttcctgtgtgaagcagatgctgttagctgtt

SEQ ID NO: 58052 - DNA, 437 bp, Zea mays
  Clone ID: MRT4577_15293C.1
tggctctggaacctttgggctgatttatgtgcttgagtatccccagatcaggtagcccccagccccaggtattccgaaacgctcactctatctagctacagagggcccgaagtagttctcctgtacccgtaggggaagctccgttctcccacaacccttttgaattttatccaccagggcccgcctggccacccctacttacacggaccggaggggaccgacatggacccggagagaccccgatccatcagagaccgaaatttttctaacttggtctaacatacacggaccggggccgaattgaataagggagttcgcggcgtcgggctcgtttacccacgcccacaccgggtacacagaatcagagaagagcaaacgacgccctcacataagtatcgacactgagggaacgctcacccttccccctacatctttac

SEQ ID NO: 58053 - DNA, 572 bp, Zea mays
  unsure (1)..(572): unsure at all n locations
  Clone ID: MRT4577_152940C.1
cgacccgttacgattganagacagatatcgtcggatttaatgctttgatcgttggacataagttatgtcccacggtttatgatttatttacaacgactttagtcgctgaaaattttatcttttactgcagcggatgttctcgtgttataattattagaaatgtttcacgtgctatcgtcctatcgatccctacaaccgaagtaggtgcaacgtaaatctacaactatcagcctctaatatcatacatcgctgataaagagatcgaggtgaagattggatcaatccttattagctctggtcgccgtcgacggccagaagcggcagatccacctcgtgcgcccactcgatgcagcgggtctcgaagtggcggctccttgcttcgttgggcaggtaggtcacccaagccttgagccctaagcgccaacgcagcgtcctcccttccgcttccctccccaccctccacgtcatctcctccggcagctcgtcgccggccaccaccagccctcgcatcttgctgaacgctcgcccaggcccgccataccgccttctcatgccgttcctcgggtctgtcg

SEQ ID NO: 58054 - DNA, 104 bp, Zea mays
  Clone ID: MRT4577_152941C.1
ggccgggccggggcttacaaaagggtcttccaaacgccggggctaactcatgacagagaccgacagatctctaattccccataccgtccagcgatcgatcttca

SEQ ID NO: 58055 - DNA, 288 bp, Zea mays
  Clone ID: MRT4577_152942C.1
ttttaaaattcaaaaaatataaaaatttctgtagcatcctggaaaatatctaagctggtctatgaaacattcccatgctcttattcatgatctctactatgcaagaacataagcacgattaatttattgccaaattaaataataaagtgctaggactacaagatatcttaggaactttgctaactacaaggatttatgcgagcttcaaaaaaaagctgatgcttcgcctacaccgttgcatacaccagcaactgcgatgttgccactcttctgcctgtacaacaccaa

SEQ ID NO: 58056 - DNA, 366 bp, Zea mays
  Clone ID: MRT4577_152943C.1
ctaattccgggtcgagcacgcgtcgcgccgcgcgcgcaacagcacatcgctcttcatctacctggcgagtgagcgtccagaccgggaggctttaaccgtggaccttcacatgtcagtgaacgatatctcctgaacgactacctgcttactggcaacacgcacattcctgcgactccgcggcctctccaaagcggtccaggccatgcccatctcacgcctaccaactcgctcatatgcacgcgcacacgcagaagtatggcgtcgatatgacacaccctgaatcatcactgctactgacccatccatcagtggtctgacccatttcacagggccacgtgagatccaccgtatggtcactgtgtgtag

SEQ ID NO: 58057 - DNA, 417 bp, Zea mays
  Clone ID: MRT4577_152944C.1
tcggccttaggagacgggtagcgtatccacactagcgagagagagagagagagggaggcgggaaaccatatcttctggccggtccgcgctcgctcacaggccgggctccgtccgtatctgcctgcccatccaccgcggggccggccgcccgtttgccttgcacatccctcctcctatcctgtaatgcttctgtgcgtcatgttatgctacctcggctccctgtggtttcccctctgatgcgtaatgacatggctcggtggatggcagttttgatcatcccgtccttccagcggatctggtcacgctcggatcgcatatgggtcaatactcacctgccgagtcagagaagactatgtccggattactctccaccttccttctgttggctctagcatctgcctatactgcctacgcatg

SEQ ID NO: 58058 - DNA, 769 bp, Zea mays
  Clone ID: MRT4577_152945C.1
aaaaatatattaatcatatttgattcacaggcaatcttagacgaaaatggttaagtccgaccccactcttagaatgaacgtccaccaatacttggtgactggcagaagaatccccaccgaaaagacccccgaatccgaaatcattgccatgagagtcttcgcccccaacgaagtcatcgctagatccaagttctggttccaaactagaagacaaaacaagcttaagagagctcaaggtgaaatcctctccgtcagcgaaatcttcgaaagaaaccaaagaaccgtcagaacttatgctatcgctttcagataccaatctagaactgctgttcacaacatgtacaaggaattcagagacgtctccttgaacggtgctatctctcaactctacatcgatatgagtggtaaacacagagccagacacgacaccatccacatcttgagaacttccatcatcaccaaggctgatgatatcagaagacccctcagtgctgcttacagagactctcaactcaagttccccatcgtcaaggtcctccccagatcttccgaaagaagattcagaagcgttttcaaggccaacagaccttccaccgtcagaaagtaaaatgatctgctcgttattctttatacggggggatatagagtacccactatctgtgaatttcataaaaatcgtatgtaccaccagtgataaaatacctgaaaacattgtgactttgaccatctagatcatgcattagctaaaaaaaaaaaaaaaaaggcccta

SEQ ID NO: 58059 - DNA, 449 bp, Zea mays
  Clone ID: MRT4577_152946C.1
cacgaagagcagattccttgtattttttcaattaacaccataggacccatattaaatagggttgtacacgcccttatatgcaagcaccaattaagtccctttctattcaattttaactagcaatatatttatttttctacagttgttcaatcctcttatatcgaataagccctaatgtgtatacaccaattaactgcatatccatgcatgattgtgtcaattatatatggtgctagcacctactgtggccataggcgaaaagaaagaaaaatgcagcttacaaatgcacgtaaagcatatttaacaaatcatctgctgcaatatagtaattggggaaaggccagaaaacatgtctactgttgggggccttcggcttccgaaggtccttaaaaacatgatttgacaatgttttccaagtgaaatttgtgggccgatttcttcgaaatcgg

SEQ ID NO: 58060 - DNA, 369 bp, Zea mays
  Clone ID: MRT4577_152947C.1
aaaggaaaaaacctttggagaggcattttaaggccaaaacccatgttttaaacagaaaaaaaaggcatggggcagcatgattccaaaatgggacttacacagggaaaaaccaaagctcttttggggggggaaaaaaaatgtaaaacctatttgggagcacaaaaacccaaactgggggaaacgcggcaaaaaagaaaaaaaaaatcgctttgttaacgacccaaaaaaaaaactcatgccaaaaaggattttaaggggccaaaaaggggcggcccggggggttccaaatattttaagcccccggaacttttgggcgggggggggggcttcccgcccggctcaaaaggggggaaaagggttttgactttt

SEQ ID NO: 58061 - DNA, 297 bp, Zea mays
  unsure (1)..(297): unsure at all n locations
  Clone ID: MRT4577_152948C.1
ttggtgtttttgttttttttttgttttttttgatttttnnnnnnttttttttttttttttggcaacaacccaaccccccccaaatgtcccgcaaaaaaaaatcattccctgccccccctgtttagtatgaccccttttaaaccaatgagtgcccggcccgatttttacccccccccccacctgtttaaaacggcggcatcaaccccaacccccccaaaaacaaaccgatcggttgcagcaacaaccccaactgtcccccgctgatcccaaaaaccggaccccccgcccaaccccccg

SEQ ID NO: 58062 - DNA, 348 bp, Zea mays
  Clone ID: MRT4577_152949C.1
ggttttcttgaaagatcgtccatcttggtttcgtgattgtcggagtcttgaagtctatacagtgttaccagctggaaatggcggaaccattgaacttgtttacatgcagatgtatgctcctactactttagttcctgcacgtgacttttggacactgagatacacatccactatggaggacggctgtcttgtggtctgtgagagatccttaagtggttcaggagatggacaaagtgctgccacaacacaacaatttgtaagagctgagatgctttctagaggctatttaattcgccaatgtgagggtgggggctcgattgtgcgaatagtggaccatctggatcttga

SEQ ID NO: 58063 - DNA, 417 bp, Zea mays
  Clone ID: MRT4577_15294C.1
ccttggaagatgagattgtaacttgagggataagttatcagaaatggagaagagttatgtcattaagtgtgaagaagctgccaatgcaattgaatctaaagagaagcacatcacttctctcatgaatgaaatttctggtttaagaacagaagtttctcagaaactaccacagttagaaaaattggaaattgaattggctttgtcaaagagttcacttgatgagcagtataagcgctggcgaactgcccaagataattatgaacgccaggttattctgcaatctgagacgatacaggagttgacaaatacttctaagcagctatcttcgttgcagcatgaaatcactgtacttcgccagactgcagatgcactgaaaaatgaaaatgaatgtctaagatcttctgctgaacaagaaaa

SEQ ID NO: 58064 - DNA, 617 bp, Zea mays
  Clone ID: MRT4577_152950C.1
gtcttgctcatttcgtccccgcgtcggtcgccccgctgtctcccgcctccgcccaccttcccgcccgctcgctcgccttcgcgccgctgaccaccgccgccgagatgggctccctcggcggctacgtctccccctacggcgtctatctcgaccagcagcgcgtcttcttgctcgtcatcaaccgccggccgcgggacctcttcgactacttgcactccatccccggagcgcccgcggacctgcgatgccgcctcgtcggcttcgccgagagggctctcctggcgccgcggctgggaaactggtggcctgacgagagctcgtggagcctgtattgggcgatgtacgcgtgggctcacgcagacgcaatgcttaacagatttgttactggcggaatgaacggtttggtttactatgatggcgcacagaattgctgctattggagccagtgaccttttcatgcttaagcactcagttaattgcctgctgtacagaatttgcatgctgttggaacagatggtttggtttagagctttcgtatagcgcgaagaagatcaatcttaactggaatgaatcaacctgttacgctttatccaatgctgctcttggcccatacgatc

SEQ ID NO: 58065 - DNA, 1542 bp, Zea mays
  Clone ID: MRT4577_152951C.1
cattgggtacctcgagcctcgaggccggccgggatgcgcccaagttccgtcccctcatggcgacggcggcgaaggcaagggctccgccggccgtgacggcttccaaagcggcggcggcagcggtggagctggaggagcacgtgcactacaagcacactgatgcgtgccaccaactccggtggacagccaaggaaagctatgagtacatgtacgcgcggccgtggagcagggtggtcgacttttatgccgagctcgtgcgcgccggcgccggcgcagcggggctcgccaaattatttgggaatgatgagaaagattacacactttatactgctggagaaaattatctaacaccatcagaaaaaccaacgacaactaccttctccaaaggtcgtggaggaagatgggaaagagtaacatttaaagttgttatttcataccatggggggtcgttcgatggctggcagaaacagcctggccttaatactgttcaagggttagtggagaaacatctcggacaatttgttgatgagcgaaaagctaaacagcttgaagcaagatctttgccgatagaaggctgtgcaattgttgctggacgcactgacaaaggggtgactgctcttcagcaagtttgctcattttacacctggagaaaggatgtgaaatctggagatataaaaggtgcaataaatgaggctgctccagataaactaaaacctctgcatgtgtcagaggtttcgcgtgagtttcatcctaattttgcagcgaaatggaggaggtacatgtatattttccctcttgatgaggatgctgacttgattttaggggaagcacagtcctcaaaaacactagagaattctgaacacaacataaagcctcaaagctttgatgtgtccaaggttgatgaaattctcaaaccacttgctggaaagacattatcctacaagatgtttgcacgtgatacacaggcttcacgaagtgttggcccacctacagaatgtttcatgttccattcccgagctgcagtggccaaactacattctgctaatgaggatcacaaaggaggcatggtggtcatgtgcgtcgagctagtcgcaaacaggttcctgcgcaagatggtcagggttcttgtggccactgccataagagaggctgctgccggtgctggcgccgatgctttgctgaacctaatggaagccacggacaggcgtgccacggcgcccccggcaccgccagaaggcctgtgcctcgtagacgttggttatgaagattttgataagcagaggtgcttcatagtcgattgaaagaagtattctttgtaggggtgcgtgtttgggtccgtgccgtttctcagagaaggggggaaaagagagaaagttattccgtatctttttgttagaaaaaaatacaagatgcatgattcagcaattgaggggtctgtttagagaaacatacttcatgtcatgaagtgaccaagccatgcagctgctattagtcggctatttttggttgctatgagtcgcctattaaaaaactcgctcgtgc

SEQ ID NO: 58066 - DNA, 638 bp, Zea mays
  Clone ID: MRT4577_152952C.1
tggttccaatcagcacatgctcaccaagttccgtctcctcatggcgacggcggcgaaggcaagggctccgccggccgtgacggcttccaaagcggcggcggcagcggtggagctggaggagcacgtgcactacaagcacactgatgcgtgccaccaactccggtggacagccaaggaaagctatgagtacatgtacgcgcggccgtggagcagggtggtcgacttttatgccgagctcgtgcgcgccggcgccggcgcagcggggctcgccaaattatttgggaatgatgagaaagattacacactttatactgctggagaaaattatctaacaccatcagaaaaaccaacgacaactaccttctccaaaggtcgtggaggaagatgggaaagagtaacatttaaagttgttatttcataccatggggggtcgttcgatggctggcagaaacagcctggccttaatactgttcaagggtaattttgttcaatctactattcacttcaatcacatgtaatggaatacaatcactggtgctatttttctttgaactttttattggttgcaggttactggagaaacatctcggacaatttgttcatgagcggatagttaaacagcttgaagaaagatcttt

SEQ ID NO: 58067 - DNA, 1979 bp, Zea mays
  Clone ID: MRT4577_152953C.1
cattgggaccctcgaggccggccggagttctcctcacggacgggcccaaatctatcgcaaacaggcctcgtctcgtcctcgtcctcgtccgccgccaaatcgaacccccccaaaccctagctacccggcgcaacgtccccttcccgcctctccgcggcgctgcgtgacacccggcctccgctacgaaacaccggggcgggtgtagcctagcgggcgggccatggcgtcaacggtgctggaggcgacgcgggcggcccatgaggatctggagaggctggagcggctcgcggtgcgcgagctgcaacgggagcccgctaacccgcgtgaccgcctctttcagtcccaccgcgtccgccacatgctcgacctcgtcgtctccacctccggcaagctcgtggaaatttacgaggacaaggacaatgctaggaaggatgagatcaacactcatcttactgcacccacgcaaagtggactgtttagcaagtactatgaaaggctcaaagagatccgtgaatatcatcggcggaacccatctgcccgctttgttagtacaactgatgactatgaagagcttctaaaggaggaaccagttattgaattcactggcgaggaaacttttggccgttaccttgacttgcatgagctttataatgagttcataaattccaagttcggaacactgatggaatattcagcttatgttggctgtttctcccagacggacaagatctcacatagtcataaagctaccagaaaatacagagaatacttggaacatattttggaatatctgacatcatttctgtatcgcacagagccattgcaagacattgataagatttttttaaagctggagagtgaattcgaggaacaatgggccaatgaaggaatacttggatgggggaataaagggacagaaaaagagtctgaaatagatctcgattactacagcacagttgaagaacttgttgagcttggcccagaaaaattaaaacaggctttagctgctcgaggtttgaagagtggcggtactgttcaacagcgtgcagatcgtcttttcttgttgaaggttacaccgttggaacaactagataggaagcattttgccaaagttccacatactaaagatggctcaaacacagctcctaatggtaatgctttcaaggaggatatgaagaaagaaattgcattgatggaagtgaagatgaaacgtctttgtgagctgctagatgaggcctttgtaaggacaaaggaaaatgcggagaagaagcttactttgacatatgaagagatggaagcagaacgggaagaggaggaggtacaagttgacactgagagtgatgacgaagagcaacaaatctacaatcctctcaagttgccgatgggttgggatggcaaacctatcccctactggctgtacaagctacatggccttgggcaggaattcaagtgtgagatatgtggaaaccatagctattgggggcgaagggcttatgagcgtcatttcaaggaatggcgtcatcagcatgggatgcgatgccttggcattcccaatactaagaatttcaatgaaattacatccatcgaggaggcgaaagcgctctgggagaaaattcaagcacgacaaggggtgaataagtggcggccagacctagaggaagagtatgaagatcaggaaggcaacatctacaacaagaagacctacactgacctgcagcgtcaaggcctgatctagggctcctgctggttaaagttgtcgggatttgttcagaacttatctcatgtagttgtaactctgaaaatattggcccatctggcatacattttatgtaataacatgattctccggaactcatgtgcttttcccggttgtcatggttgtctcgtgtgtctgtttgcccagcttggtcgtccgtagctatgttatgttttatataatcgtaaatgtgttcttgtattaagcacaagttggtgtttgc

SEQ ID NO: 58068 - DNA, 354 bp, Zea mays
  Clone ID: MRT4577_152954C.1
gccagatattggcttgcgtacttgtccacctttggcccattcgcataatgcttaaggtccgcatgctggttcatctcttggggctcatgagccgctcgtggatgctgcatgttaagcctccttgccttcttactctaaacatggggcacttgccagagacatgatcatgggggatataatgcacatcttatcattcctctggacaagtacacaagccattatatgtcgtgctcgactacccacttactgatggatgcgatctcacttcgggactctgccgtatgattctttccccttttctgctcatccaccttgtcattttaagcgactcttgctgttcgttctagatcgcga

SEQ ID NO: 58069 - DNA, 909 bp, Zea mays
  unsure (1)..(909): unsure at all n locations
  Clone ID: MRT4577_152955C.1
agctgctcgaggtttgaagagtggcggtactgttcaacagcgtgcagatcgtcttttcttgttgaaggttacaccgttggaacaactagataggaagcattttgccaaagttccacatactaaagatggctcaaacacagctcctaatggtaatgctttcaaggaggatatgaagaaagaaattgcattgatggaagtgaagatgaaacgtctttgtgagctgctagatgaggtctgctcttcactgctccctgtggttacgacttacgactttactcatgtaattttgaacgcatggtacactcatgcaaatgcactagcatgtgcagtcaatccttttgtgaccacttagggtgcgtttggttacgggacagacaggagagggacgttctctggcgtcctctcctgtccctccaattttgagggataagtggggataacattgggatagtcatgtcccaacccttaaccttgaaccagaacaacgccccccgacagatcgtcccaaaacggccggcaatgtcaaagaaacaaacacacccttaatcccaaaaataaaatctccaaatgaacaacacccacgaagaagccgaaagcgcccgggagaaaaattcaagcacgacaaggggtgaataagggcgcgccagacctagaagaagagtatgaagatcaggaaggcaacatctacaacaagaacccctccactgacatggagggtcaaggcntgatntagggccccccccccccccccctgtcgggatttgttcagaacttatctcaagtagttgtaactctgaaaatattggcccatctggcatacattttatgtaataacatgattctccggaactcatgtgcttttcccggtaaaaaaaaaaaaaaaaaaaaaaccaaaacaaggcggccgtt

SEQ ID NO: 58070 - DNA, 361 bp, Zea mays
  Clone ID: MRT4577_152956C.1
atatggcagcctgccgaagcataatggaggagatcacaaaaagagcttttgctgagggaatccttcttactaagaactgggacactgaaccactatttcctttgcctgaaagtgttgtgggcatggctggagcaagtgatttaagtcccttcttgtcagtatctaccccaaggaaacgtgtgaaaagtagatgggagcctgttgtggatgacaatgttaccaataaggtggaacaaatagcaaaaggattgatcagcagtaatgtccacagtactttggaccctagaaatagaattccacatcctgtgcggggtagcagtcgggatcgtgggaagtttctccagtcttgtcgagcatcatc

SEQ ID NO: 58071 - DNA, 633 bp, Zea mays
  Clone ID: MRT4577_152957C.1
agcctagcgggcgggccatggcgtcaacggtgctggaggcgacgcgggcggcccatgaggatctggagaggctggagcggctcgcggtgagcgagctgcaacgggagcccgctaacccgcgtgaccgcctctttcagtcccaccgcgtccgccacatgctcgacctcgtcgtctccacctccggcaagctcgtggaaatttacgaggacaaggacaatgctaggaaggatgagatcaacactcatcttactgcacccacgcaaagtggactgtttagcaagtactatgaaaggctcaaagagatccgtgaatatcatcggcggaacccatctgcccgctttgttagtacaactgatgactatgaagagcttctaaaggaggaaccagttattgaattcactggcgaggattgtttgattcctcttgtgggatcttggtggtgtcgatggaaacttttggccgttaccttgacttgcatgagctttataatgagttcataaattccaagttcggaacactgatggaatattcagcttatgttggctgtttctcccagacggacaagatctcacatagtcataaagctaccagaaaatacagagaatacttggaacatattttggaatatctgac

SEQ ID NO: 58072 - DNA, 371 bp, Zea mays
  Clone ID: MRT4577_152958C.1
ctccgacgccatatcatatctcactcgacctgcaactgcaaagactccttttagcgcgctgctgatgcgtcgtcgaacgcggcacgcggtccttaaagcctgcatgcgaaagccaggcaggcgtggacgtagtgattagaaacggttcgggttagatgggtcgagaaaacccaggtgcggccgtgcgggtgccgggtggtgcttgtcgcagctggtgcggttcgctcagctggtttgatgactgatcggctctagcgagtggacgactcttcctcgtttggatctttactcaaggaattacgaacagcatgaagatcttgggtgctcttctacgcgtcgtcacatgctatggctaacaaaaatactttacg

SEQ ID NO: 58073 - DNA, 382 bp, Zea mays
  Clone ID: MRT4577_152959C.1
ggggccgaccacgcgtcggaagaaccttaaaagggggattccattgccttaatttggccaccaagggcacccaccatgtgtggggtccttatcctcctggctcttgtggcttgcgtggctaacgcgccaatttgccctcaaggctcacaagctcctatagtttccctttttcccccatacctgccatcaatgatagctgaagactgtgaaaacccaccttttcagctctatcggctccaacaagcaatcgcagcacgcaacatacctttatcacactagtttcaacaattgtcagccctatctttggtgcagccattggtacagaccatcagggcacagcagctgcagcaacttgtgctacctgtgatcaaccaagtagatc

SEQ ID NO: 58074 - DNA, 324 bp, Zea mays
  Clone ID: MRT4577_15295C.1
cctgaattccctcggctacccactcttcctaaactatctctatttcacatcactaaccccatctataccatatctactttctgcaacgattcccactcaatcttggtggcttcagactcatcctataaatcactctaacgctctaacatccatttctactgctaatggcatcaacgtatctacctatttcagtcaatataaagattcaaacatctcacatcataagtgtaaccaatcctcatctactcaatcatcagactctctttcaactgctctatatgatatatctcaaatcgctctctttactctaacgcatgctttcca

SEQ ID NO: 58075 - DNA, 236 bp, Zea mays
  Clone ID: MRT4577_152960C.1
gcaaatcgtacgttggaacaacatacacagatagaacagcgttcgacgacgcgcgtccacggctaatgacccacaagcgcgtctaatgacataatgcagccagtgctcgctgacaaagatcggaacaggccatatcaaattgatggaatggacaagaatgaaatacgccaatggatcgagagtgcaaagaacactaattgtgaaagttatcaaaaccttaacagcacacgtgcagt

SEQ ID NO: 58076 - DNA, 631 bp, Zea mays
  Clone ID: MRT4577_152961C.1
gccgggggctggcctgcgctcctccgctgtcgtggatggaactactgttacgagctacaggcttgccttcaacagcatacaatgggccatcatggcaacagaatcaaggaggattatcacaaagaggccctggagcacctggggtgcctgctggtggtgtgcggccacccttgccaccacatttgcattcacaaactgatggggctagcagaccagggcagccaagatcttacatgtctgggatggataatcatgtggtagttcaaggaaacaaagatgacaaaagtggagtgaaccagtctgtgcaggaggtggcggatcctaagaaggttgaggtggagaagcaggtcctggattccagagagaagctggagtattaccgcacaaagatgcaagatcttgttctgtataaaagtcggtgcgacaataggctgaatgagattacagaaagggcgtcctctgataaacgcgaggtggaatcattggccaagaaatatgaagagaagtacaagcaagtagctgagttagcttccaaactagcagttgaagaagctgcatatcgcgatgttcaggagagaaaagttgagctgaatgatgcactgattaaaatggttcaaggtgggaagtgttg

SEQ ID NO: 58077 - DNA, 281 bp, Zea mays
  Clone ID: MRT4577_152962C.1
tcgcgtgcccgcgcattatagatccaggttaccttcacgtgcacacggctgatacctggccggactgacacctaaaactatctcactagccggtccgatacaactgccgcacttccaaaaccttggcgttaccttactcaatcgccttgctctacaatactctttttccggtcttcccaacagcgattactccatgttccaaaagccttctcatgagacgagtactctgactagcgacttggacacgccctggaatgcatcaccaatcgcgacgactatga

SEQ ID NO: 58078 - DNA, 323 bp, Zea mays
  Clone ID: MRT4577_152963C.1
ggataagggaccatcaaaaggctcttgggcattaaaagtaaaaactagactgagagaattattgggatgggtaaaccaatcctaggaaccccaaaaccccgcttggatagacaacctagaggggcaataaacaggttggcccccaaaaacaaaatgacaatggggggcctttttcccaaaagacccaaacttacccaaaactttggggttgggccacaaaaaatgagaaatcttttggggggggccttataaaaggtttccacgcaaccctccttaagggcgccactcacgaaagggtttgcctgggttgttcaaacaacccc

SEQ ID NO: 58079 - DNA, 1049 bp, Zea mays
  Clone ID: MRT4577_152964C.1
aaccttgtttttccaaaatccctaaaaaaaagagaaagtatccctctttctataagatttaatgaaaattaagaaatcttttaatataattgctatgcttagtcccaaaagaactagatttcgtaaacaacatagaggaagaatgaagggaaaatcctgccgaggcaatcatatttgttttggtagatatgctcttcaagtacttgaacccgcttggatcaccgcgagacagatagaagcaggacgaagagcaatgacacgatatgcacgtcgtggtggaaaaatatgggtgcgtatatttcccgacaaaccggttacaataagacccacagaaacacgtatgggctcgggaaagggatcccccgaatattgggtagccgttgttaaaccaggtcgaatactttatgaaatgagcggagtatccgaaactgtagctagagcagctatctctatagctgccagtaaaatgcccatacgaagtcaatttcttcgattagagatatagaaccccaaaaaggaatattgaagataaaaaaccctggtttttctttctggaaagacaatatttctttcatccttttgcattgaaataacaaatggaaatcaaaataatatgattcaacctcagacccttttaaatgtagcagataacagtggagctcgaaaattgatgtgtattcgagtcataggagccgctggtaatcagcgatatgctcgtattggtgatgttattattgctgtaatcaaagacgcagtgcccaaaatgcctctagaaagatccgaagtaattcgagctgtaattgtacgtacacgtaaagaattcaaaggcgacgacggtataataatacgctatgatgacaatgcagcagttatcattgatcaaaaaggaaatccaaaaggaactcgagtttttggcgcggttgccgaagaattaagagaattgaattttactaaaatagtttcattagctcctgaagtattataaatactagtagacgagatatagatcaaagaaaaaattagtagattgtgtctcacgtatatgcttt

SEQ ID NO: 58080 - DNA, 362 bp, Zea mays
  Clone ID: MRT4577_152965C.1
aaaaaaagggcccaccggcaaggggggctctggcaaaaccgaggggattggggccccccccgccgggtatcccttggcccgggccaacccaaccacccaagggggcggccaaggggcaaatcaaccccctaggggaagggggcaagggggagcaaacaacatgccccccccgaagggcctactacattatccccataaaagcggggtggaatcccacacccaaacctaagctccaggttgaaaaaaaaccagggccaaagagatgcccgtatgcatccggggccaagaaccccttacccaggcaggggccccctccccagcctgggattccccctcatgaggaggggccaccggggacgggg

SEQ ID NO: 58081 - DNA, 6683 bp, Zea mays
  Clone ID: MRT4577_152966C.1
gctaaaggattttctcttttttccattcattattattctatttattctgacctccatacctcgatcgagatagtggacataggatgccactctttaaaatgaaaaaaaggagtaatcagctgtgacacgaaaaaaaacgaatccttttgtagctcgtcatttattggcaaaaatcgaaaaggtcaatatgaaggaggagaaagaaataatagtaacgtggtcccgggcatctagcattctacccgcaatggttggccatacaatcgcgattcataatggaaaagaacatatacctatttacataacaaatcctatggtaggtcgcaaattgggggaattcgtgcctactcggcatttcacgagttatgaaagtacaagaaaggatactaaatctcgtcgttaattgaattcagaatagaaagattcagaataaacaaaatttataggattcaaataatcaaataaagtaaaggtaggcgggtaataaccttatttatgacaagtttcaaattggtaaagtatacccctaggataaagaagaagaaggggctgagaaaactcgcaagaaaagttccaaccgatcgtctacttaaattcgaacgggttttcaaagcacaaaaacgcatacatatgtctgttttcaaagcacaaagagttctagatgagattcgctggcgttactacgaggaaaccgttatgatactgaatctcatgccttatcgagcatcgtatcccatcttaaagttggtttattcggcagcagcaaatgctactcattatagggatttcgacaaaacgaatttattcatcactaaagccgaagtcagtaggagtactattatgaaaaaattcagacctcgagctcgaggacgtagttattctataaaaaaaacgatgtgtaatataacaattgtactaaatatagtaaagaaatcaaaataatctttagatcaatctaagatttcgattcccagtaaaaaaaaaaagaaatataatagaaaaatatgggacaaaaaataaatccactcggttttagacttggtacaacccaaaatcaccattccttttggttcgcacaaccaaaaaattattctgaaggtctacaggaagataaaaaaatacggaattgtatcaagaactatatacaaaagaataggaaaaaaggctcgaatagaaaaatggaatcagactcaagttctgaagtaattacacatatagaaattcaaaaagaaatcgatacaatccacgtcataatccatattggattccccaacttattaaagaaaaagggagcaatcgaagaattagagaaagatctccaaaaggaagttaattctgtaaaccagagacttaatattgctatcgaaaaggttaaagaaccttatagacaacctaatattcttgcggaatatatagctttccaattaaaaaatagagtttcattccgaaaagcaatgaaaaaagctattgaattaactaaaaaagcggatataaagggaataaaaatccaaattgcgggtcgtctagcaggaaaagaaattgcacgtgccgaatgcatcaaaaagggtagactacccctccaaacaattcgcgctaaaattgattattgctgctatccaattcgaactatctatggagtattaggtgtcaaaatttggatattcgtagaagaagaataactaaccatgtcttcccattccgcccagtgatagaataaaaaagacaagaaccttgtttttccaaaaatccctaaaaaaaagaagaaagtatccctctttctataagatttaatgaaaattaagaaatcttttaatataattgctatgcttagtgtgtgactcgttagttttttctttagggtcaaaaatggaaaaaaacttagtaatgatagaaaattaactaataaccaacctattgcttcgtattgtcgagatcctaactaagaaacagtcactatgtgaataaatacatctatcaaaaatgagtagatctatcatatagttgtagcaactgcatttttttctctacaaaagaaacctgattctaggctgtgaagcaaaactaaagggatgtggataaaaggagggatgatagatagaaggaagaagaataagaaagatataggattcccatatgtatggtctatgaattacatcataaaaaaaaggcaatgtgataaagcatcaatataataaaattctcaaaaaaaagagagaattcgaaatcgtaacttgacttttgaaacaacaaataaaaatataaagcaataaataaagagcagccgggttaataaaactgagaaaattgactcggaaaaaaaaattggaagctccattgcaggattcaaacctaaccattaaaggagaagctgtgggaacgacaaaacctatgactacataggattttattgaaaagaatcctaacacttcattgggtgggatggcggaacaaaccaaaaaaattgctttatttgataaggttctaaattaacaaataagacaggaaagagtaaatattcgcccgcgaaatccttattggattggaatactttaccacgattcaataagaataaaaaaaaaggagattccaaaaaaggaaggattacattttatataaatattgaatttggatatattctagatcttctttcttgaactatatatttatttttcttttttaagtttaagaaagtcaaaatcaaaaaaacctaactttttctattatatattgatgtgtatctatctataatatttttgaatattatggaattagagaaatgacattcgcacgctttctcatttcattcgcgaggagctggatgagaagaaactctcatgtccagttttgtagtagagatggaactaagaaagaaccatcgactataaccccaaaagaactagatttcgtaaacaacatagaggaagaatgaagggaaaatcctgccgaggcaatcatatttgttttggtagatatgctcttcaagtacttgaacccgcttggatcaccgcgagacagatagaagcaggacgaagagcaatgacacgatatgcacgtcgtggtggaaaaatatgggtgcgtatatttcccgacaaaccggttacaataagacccacagaaacacgtatgggctcgggaaagggatcccccgaatattgggtagccgttgttaaaccaggtcgaatactttatgaaatgagcggagtatccgaaactgtagctagagcagctatctctatagctgccagtaaaatgcccatacgaagtcaatttcttcgattagagatatagaaccccaaaaaggaatattgaagataaaaaaacccctggtttttctttctggaaagacaatatttctttcatccttttgcattgaaataacaaatggaaatccaaataatatgattcaacctcagacccttttaaatgtagcagataacagtggagctcgaaaattgatgtgtattcgagtcataggagccgctggtaatcagcgatatgctcgtattggtgatgttattattgctgtaatcaaagacgcagtgccccaaatgcctctagaaagatccgaagtaattcgagctgtaattgtacgtacacgtaaagaattcaaaggcgacgacggtataataatacgctatgatgacaatgcagcagttatcattgatcaaaaaggaaatccaaaaggaactcgagtttttggcgcggttgccgaagaattaagagaattgaatttgactaaaatagtttcattagctcctgaagtattataaatactagtagacgagatatagatcaaagaaaaaattagtagattttgtctcacgtatatgcttaaaaatcctaaatttaaagaaaagggaaaacatgttgattatagaaaaattaggaggaacctagaattagagtcttatgggcaaggacactattgctgatttactaacctctataagaaacgcagacatgaataaaaaaggaactgttcgagtagtatccacaaatattaccgaaaacattgttaaaatacttctacgagagggttttattgaaagtgttcggaaacatcaggaaagtaacagatatttcttggtttcaactttgcgacatcaaaggagaaagactagaaagggaatatatagaactagaacctttttaaagcgtatcagccgacctggcttacgaatttatgccaactatcaaggaattcctaaggttttgggcggaatgggaattgctattctttctacttctcgaggtataatgacagatcgagaagctcgactaaacagaattgggggagaagttttatgttatatatggtaatggccccacctatagtacccaaattctatctcgaacttcctattttgaaaataaaaatagaaaaataggagaaaaatatatgacagaaaaaaaaaatagtagagaaaacaaaaaacccgagagaagcaaaagtcactttcgaaggtttagttacggaagccctacccaacggaatgttccgcgttcgcctagagaatgacacgatcatcctgggctatatttcaggaaagatccggtctagttctatacgaatactgatgggggatagggtcaaaattgaaataagtcgttatgattccagcaaaggtcgtataatttatagacttccccataaggattcgaagcgtaccgaagactcgaaggatactgaagatttgaaggataccaaagattcaaaggattaggtttttctggggtaataacttccaagtttcaaaatttaagtgaagagacttattttttccaaaagaatagattcatagtttaagaaaggaatacccatatatgaaaataagagcttccgttcgtaaaatttgtacaaaatgtcgactgattcgcaggcgtgggcgaattagagtcatttgttccaatccgaagcataaacaaagacaggggtaatctttcgaaaaagaagcttttctttctaatagcttttctttctaattaaagtaaaaagtacccacggaaatgcccaaattgcaaataaaaaaaatgaaagtaaaggatatattttaacctgaaacggatatctttgtatcttttttctttttgttatttctaactcatatttatgagataataaaatatgacaaaagctataccaaaaataggttcacgtaagaaagtgcgtattggtttgcgtaggaatgcccgttttagtttacggaagagtgcacgtagaataacaaaagggattattcatgttcaagctagtttcaacaataccattataaccgttacagacccacaaggtcgggtcgttttctggtcctccgcaggtacttgtggattcaaaagctcaagaaaagcatcaccctatgctggtcaaagaacagcagtagatgctattcgtacagtgggtttgcaacgagcagaagttatggtaaaaggtgctggtagcggaagagatgccgcattacgagccattgctaaaagtggtgtacggttaagttgtatacgcgatgtaacacctatgccgcataatggatgtcgacctcctaaaaaaagacgtctgtaaaaaaaaatgaaaccgctttcaagagaaataaacgattcaatgatcaaataatactagtctgttatggttcgagaagagataacaggatccactcaaacactagagtggaagtgtgttgaatcaagagtagatagtaaacgtctttattatggtcgtttcattctgtctccgcttagaaaaggtcaagcggatactgtcggtattgccttgcgaagagctttacttggagaaatagaaggaacatgtatcacacgcgccaaatttgggaacgtgccacatgaatattccacaatagtaggtattgaagaatccatacaagaaattttactaaatttgaaagaaattgtattgagaagtaatctctatggagttagagacgcatcaatttgcgtcaaaggtcctagatacataaccgctcaagatataatcttaccgccttccgtagaaatcgttgatacgacacaacctatagctaacttgagagaacccgttgatttctgtattgagttacagatcaagagagatcgcgcatatcatacggaactcagaaagaactctcaagatggaagttatcctatagatgctgtattcatgcctgttcgaaatgtgaattatagtatttttttttttgggaatggaaatgaaaaacacgagatactttttttagaaatatggacgaatggaagtttaactcctaaagaagcgctttatgaagcttctcgtaatttgattgatttatttcttccttttctacacacagaggaagagggcactagtttcgaagaaaataaaaacaggttaactccaccccttttaacctttcaaaaaaagattcactaatctaaagaaaaacaaaaaaggaattccattgaattgtatttttattgatcaattagaattgccttctagaacgtataattgtctcaaaagggccaatatacatacactattggaccttttgagtaagactgaagaagatcttatgcaaattaatagttttcgtatggaagatggaaaactgatatgggacactctagagaagcatctcccaattgatttacctaagaacaagttctcgctttaaatcattgcaattttttcctcttcttcttttttgagttagaat

SEQ ID NO: 58082 - DNA, 409 bp, Zea mays
  unsure (1)..(409): unsure at all n locations
  Clone ID: MRT4577_152967C.1
atgctagtaaaggctctttgtggtgcgacctatggttanncttgaactagcanngtgggctttccttgaatgtgtttgctttgtctattgttcctttgctgtgcacttgnatgaaggagacaagatattgttctgctttctgctaggttgcaagggattctaatgagagactgtggtggtgagttggcattttgggaaaacaactcttgttggtccaaatggctttactattgggctaatgtaccaatatggtgatgcatgtgcagaatggtgctgttaacacagntcgaagaattggcttaactcctgttgccatacaagaggcattttgaagccagggtctctgaggatggcnngtaaacgtgtgccctagatcatagtgccaagcagtantgccttgtaagaaggt

SEQ ID NO: 58083 - DNA, 236 bp, Zea mays
  Clone ID: MRT4577_152968C.1
aggttacctgattggtttttttttttttggtctctggggggggggcaaatagcggaagggtccggggtgcgcacgcccaataaaataatgctctcaaattaccccctgggaagagcgctatgcttttggtacaattggggggaaaggaaatacggaccaacctgtaaggtaaaacaaacatgtaggtgctcagacttatggggaaaaatggggcgggaaagggtcaaggggggaaa

SEQ ID NO: 58084 - DNA, 412 bp, Zea mays
  unsure (1)..(412): unsure at all n locations
  Clone ID: MRT4577_152969C.1
attcccggtcgaccacacatcctattatnttatgganacatatttgacaaagttcatcgatcannaccaatgtatcgtgaccaaaaaactgggtgtagctaacaataanaancanctaattaataatctncttaacaacatctcatattacaaggttgactataccaacttcttcccttttttttccaatatcaatccaaatcctcntattccttaaaatcagctccttttcccacttaaggcttctctcctacatattctgaaagaaagcaaataagcatttattatttttctacatacttataattaagagctcattaatatcttttttccttattaaaaaatcataacccttattaactctcttaatccaaactatattctccacaactatattttaccattcttttat

SEQ ID NO: 58085 - DNA, 484 bp, Zea mays
  Clone ID: MRT4577_15296C.1
aaaaatccgcaaacctgggaaggggggggttatttggggggcgggctccccccccccaattcattccggggggacattacaacgcatgcctgggcggggggggggtcccctaggggctaggcaaagcggcttggaaggcaaatgtcccaaccggggggcggccccgggggggagaaaccgggggggctcctcgtacgggccggcaaagtaaaggggggccttaaaccaggggggggccctgaccagatccccggccacaaagggcatgtagtcgtccccggggacagcgccgggggggatgaccttcacctccccggacacaaagtacacaagcggggcgacctgccagtcccacgggattcgggaccggccacccgggggccacgacgaccacgtttccatgacccgaaggggcttcattcgggcccgggccaccttggcttggtccacgcgcaccttggacacgtcctccatggggacgccc

SEQ ID NO: 58086 - DNA, 462 bp, Zea mays
  Clone ID: MRT4577_152970C.1
tgtcctggccgcaacgttcgtgactcaagaagagcttgcgctaacgctcttaggggcagggctggcgctagggcgctatatggataggtgcagataaagatcctaatgttcggagagaggacgcgctgcagctgagcttggatggagagcaaggatgcccgaacaagcatcgaggaatgttctgcgctcacagctccagctacgaactgggcaagatgttgcctttctagcgaagaaagaagtaagtgatgtaagagaatgtatccagcgttcgggctatgaggagcatagctgtgaaacactcgagctgctctctaggtgacagactggacactcaaaacatggtcatagggtgtgtctagtctgcccttccgtgctaccggacacaagttcttacatatatgcttgggacgatagagatagcatatagagtatgactgggtcaattgataatgcggcgtt

SEQ ID NO: 58087 - DNA, 266 bp, Zea mays
  Clone ID: MRT4577_152971C.1
tcgtcccgttggtggatcttggcactgatcaggggtgtttgctttgctttggcgggctaatggcgcccgcttcatgtggccggtcgtcgcaaagggtgttccacttcggcaagggcaagagcgagggcaacaagaacatgaaagaacttcttggcggcaagggcgcgaacctggcggagatggcgagcattcggctgtcggtgcccccggggttcacggggtcaacggaggcgtgccaacaataccaagaagtcggcgcgcccttc

SEQ ID NO: 58088 - DNA, 497 bp, Zea mays
  Clone ID: MRT4577_152972C.1
tgggtactcgagccggccggattttgcaagaattggccatcccgcaggaaacaagaaatgcggcaaggccgtgcctgcgcctgaagacagccgccgtcctccccaccgccatgcttcgccttcccctatgccccatcccgccacccgcctccccctctccatccgccgtctcacctacttaccctcccttgccgcctctaacgcgcgcggctgccgctcgtcctcttcatccgacgacgaattacccctcgccgccgagctctttccggccgcagggcctacgctcctatccatcgcgcgatccctcgccgtcgcctccccgcccccgtccgccgcgtctgtcctcggcttcctctgccgccttccccacgacgcctccccgcacatcttcccccacctcgtcgccgccctcgcccgctcgccccgcccggtccttgcgctccgcctcttcctctccccgcccacgttcgcggccaccacccaccactccttcaact

SEQ ID NO: 58089 - DNA, 785 bp, Zea mays
  unsure (1)..(785): unsure at all n locations
  Clone ID: MRT4577_152973C.1
tccgcagnaacacaaataagaagcagatcggtcgtcctctcctctccgcttcccggcgaggcgatggccatcgccgaggggaagaagaggaggcccgccctgatctgctgcggcgtgctggtggccgtgctcgtcctcctcgccgtcatcttcgtgacgctctacttcaccctgttccggccgcggtcgcccaaggtggtggcgacggcggtgggggcggagatctttcccaagaacaacggcggcggcgcccaggacctcaacctcaccgtgcacgtggacgtcaccgtgaacaaccccaactacgccgcgttccggtacggcgacgtggcgacggtggtgcggtaccacggggaggacgtgggcctgtcggtggtgcccgcgggggagatcggaccgcgcgagacgcagacgatcgccgccgccgttgaagtggacaccggcaaggtggcgaccatcccctacttttgggtggagtttccgacagggaagttgccgttccagacggcgacggaggtcgccggcaaggccgtggtgctgggcacaatcaagatcagggcgagctcggaggtggcgtgcgatgtcaccgtgcaattgttgcctcccaacgccacgtcggagtgcacctccacggtccatataggccggtagtaacgagctatatatatccagtggctctgctcatctctgaacagataagtgaacatcaaaatgtatactctgctgtgaaattatcaacgaccgtgtttttaagggacagtgaaataaaatatattaatacaggt

SEQ ID NO: 58090 - DNA, 588 bp, Zea mays
  Clone ID: MRT4577_152974C.1
tacaccaaggcaggtgggcaggcctccgccctcctcccctactccagggcccactgcagcctcagcccaggagccaccagatctcccaacaccatggtccgataccgcgtgaggagcctgagcgaacgctcgcacgaggtgtacaggcagcagttgcatgggcaagagcaaggacaccacggccaagaggagcaagggctgagcccggagcacgtcgaggtctacgagaggacccatggccagtctcactataggcgcagacactgctctcgaaggaggctgcaccggatccacaggcggcagcatcgctcctgcagaaggcgcaaaagacgctcctgcaggcaccggaggaggcatcgcagaggctgcagaaccaggaagagaacatgcagaaggcactaagcttcctgggcccctcacccccagctggaaattaagaaaaagtcgcccgaaacaccaagtgaggccatagcaattcccctacatcaaatgctcaagcccccagctggaagttaagagaaagtcacctgcccaagaaacaccgagtgaggccatagcaactcccctacatcaaatgctcaagccctg

SEQ ID NO: 58091 - DNA, 649 bp, Zea mays
  unsure (1)..(649): unsure at all n locations
  Clone ID: MRT4577_152975C.1
ttcacttaatactgtattttttgtttatcttgttttcatactttgctacctgtggtggactggtggtaaagtgaaccaggaacaatttgatttcaaatatacagttttggtttgattttatggcacttctccttggtgttttgtttcggttaccattaatggttaatgctttttagttttcacaattctgaatttaaattttatctttatgttatgcatgtagtaccagaagtacttcagaaaaggaacttgtaagagagcaggtctttgtccttggtcgaatgggaaatgctaaggaacctctttcgacaattataaataaactggaagacattaatacatatttagcctctattactgcatctgaggtctggtctgtttacatgaaggtctgaacaagtggaacctgacaaggatgggtgtggctggattacaacaggattgaagttgattggcaggaaatgatgctacttagcaattgttccctgactataactgcctacaaagttgtgcaattgtgatgtcgcatcgctggagaagacgggcacggcgacgagtccgacctggtcaagagctgcaactgcgaaatggacaaaaaaggtacctcgtggagttttgtgtgggggatcangtcgttgggtacatccac

SEQ ID NO: 58092 - DNA, 401 bp, Zea mays
  Clone ID: MRT4577_152976C.1
actcacggcagccacacgcactccaacaccacctcccaggtcgcgctcgtcggcgccgacgtctgccccatcgagagcctcgactacgagctgatcgagaacgacgtgttcaagcaggactggagggcgcggggacggggccacatcctgcgctacgtggcgctcaagtgggccctctgcttcctcgtcggtgccctcgcagccgccgccggcttcgtcgccaacctcggcgtcgagaatgtcgccggcgccaagttcgtcgtcacctccgacctcatgttggacggcagacacggctcggcgttcgcggtgttcctggcgtccaactttgcgctcaccatgttagccgcggtgctgacggtgtacgtggcgcctgcggctgtcggatccggaatcccgga

SEQ ID NO: 58093 - DNA, 343 bp, Zea mays
  Clone ID: MRT4577_152977C.1
cgacaggacaaattgcgtaggaaatttttttaatgcttaacattttttttttgatacgatcaactgtatttacaaatttcattgactaggcattgttcattatgacattacctggatactattttttggaaaaacttatataggccgattggggcacatatcataaaacgaacacttcttcacattacaatgaccttttttctttagatgctttatagtataaaagaggtgattattttattgacatatgagcatcgtccataacttttattttcaatgttaggtatcattacatacccatttttttcgtggatcaccttatatttgcgagttaactgaaact

SEQ ID NO: 58094 - DNA, 779 bp, Zea mays
  unsure (1)..(779): unsure at all n locations
  Clone ID: MRT4577_152978C.1
gagctaaagctcgctcctgccgccgcgcccgcgcgcgaggggttccttgatgccgcccagctcccagatggtggccatactacaactcacgctcctactcatttcatgtagcctttacagcatgctgcattcttcttcttcttcttctccttcctcctcctccccctcctcggcaccgtcctcgctcgcgttgctggtgctgctggtcgtctccacctgcctctccttgctcttcgccagcctcagaaggctactcagagacaccaccgcccacagagctaaccacagggcgccagctccttccatggaggcggaggctgcggctgcggctgcggctgtgtttccggagaagagcgttgtgtcgtcgtcgccactgccacagggcgaggcggcggaggatttcacggtgggcgggagcggaacaatcctgtcagattcttcggagtgcgcgacgacgaacgacgacgacgaggacgagggcaccgaggaagaaggctccgtgtccgacgacgacgacgacgagagcctcattgagatctcccttgtcgacggccactacgtgggctccgagcaagccgagcagcgccgcgcgtacaactgcaactacaagaaggacctcctcgcggacctcctgccggacttgctgctcgacaggagagacttcatcttcgancatcttgtcggaaaatcggcgaggaggacgacagccctgatcgagatcgacctcgcgaaggctcattcaagtgcgacgtcgtcaaggatgaacatgaaccgtctga

SEQ ID NO: 58095 - DNA, 318 bp, Zea mays
  Clone ID: MRT4577_152979C.1
gtcggaaatcagcttcctcgcgtcggccagcacgcgccgcctggccacattcccttgtttctctggtctcctgcctcggtccagctcttctctgaatgccgcggtggcccatcgaatctctgactgaactgatttccggttggtgcgtgcctttcttctctggcacggtacgcgcagtccgtttcgctgccggcgaacacgcatgcagaagcagactcgtcttatcgtgctcacctgaggcagaccgtcgtgcccgccgtgcccgaggtagaacgagctagcatgagcagccttcaaactgcctgctcgtcgtgggac

SEQ ID NO: 58096 - DNA, 716 bp, Zea mays
  Clone ID: MRT4577_15297C.1
cccacgcgtccgctccaacgcctcctctcgcccgtccccatttgagacaaatccacgtccgtccatctagagagagagagagagagagagaggaagcttctctgattccgcggttcggctcgcccggacatgatagagataaagcaatgattcgctccggctagcatcgcatctgatcgatcactctcaatcccctgcagctcccagccacccacccacaggcgtctctgagtcgctctcgccggagcagcagcgccgacgcgggcctcggcgcagcgggatctcccaccctccgcccaccatcggcgcctcgccggccgacccagccaggatcggccacaaacaagaacgaccagaaggcgcgcccctcaagcggcgtcgtcctcgccctcgtccccgaggcgcaggaaacagtcaacccggatccatccacgagaagagatggggtcgttcaaggggcacgtgctgccgggcaccctgttcctggcggaggggctgtggcgggcgtggtcgtcggcggcgcggcacgccgcggacccgtcctcgcttcgggtgcgcgcgtggagccccgcgccggtgcgccggccggcgccgctgctggagctctacgccgtggccggcggcgcgctggcggacatgtgcgtgcaggtgctctactcccccccccccccgatattccccggcggccaggccaacccggcgcaccccccgacccc

SEQ ID NO: 58097 - DNA, 433 bp, Zea mays
  Clone ID: MRT4577_152980C.1
ccggcgggatgattccacacatcccgtctcctctcctatttctgttactgtctcataagagggagaacttagctgctcaatggatcgcgaggcccgtaaccgattaccatcgctgccacgagcgtaatcggagcctagaattggtcagtcgcatgtcactgggaacacaagcaaatgccactgttctaatctggctgtcgcaaatctgctccgccgcgccctgttcatccggaattctgtatcttatgcgcaccttcgataatacgctctgagcatgaccatgccccaccgagtgaagcatcatgtccgacgcctttgagtaggcatgcgatctctctcctcgctcggcgtccccatcgtctaccgcagtgacgccatgcacttacacaacaacttttactgccccatcgctttatccccacaacttcccttc

SEQ ID NO: 58098 - DNA, 592 bp, Zea mays
  Clone ID: MRT4577_152981C.1
ctttagcttttttggttcaagccgtcctgcagatgatgctacccctactgacgaggatgtccttgcggagcaaaacctagtaaaggaacaagcttcaaacaatgcggtagatcctaatgttgcagttcaaatacatggtctacgtaagacatatccaggaactttcagcattggatgttgttgcaaatgctctaaatctaagccgtttcattcggttaaaggcttatgggtgaaccttgagaaggaccagctattttgtcttcttggtcccaatggagctggaaaaacaactacaatcagttgtctgactggaatcacaccaattacaggaggtgatggtaagtatcgttcattgaagcagcattcttgtttctttgtctcaaaacaacaacttccatactaataatacatactaaacatctcatagcattcatttatggtcactctgttcgaagcactgtgggaatgtcaaacatccgtaggatgatcggagtctgcccacaggtggtgctttagacattttgatattattgatgcaagtggtggtttatttgaaaaaaacacataaatttgtgtgttctgttactttaca

SEQ ID NO: 58099 - DNA, 817 bp, Zea mays
  Clone ID: MRT4577_152982C.1
ctcgaggccggccgggaattattcttgcctttgatgtttgtcagctttttcttgcttccatagttcatggcgtgtgttcaagtcatcacagttcttctctttgcattggctcttgcaaaaattgacccctcaacatgccaaatggtgcagggcagagtcttctgcgttgactgcactcacaactatgacttatctgatattaaggtttcagtgaggtgtgatggtgtgaaaaaactggctttggcaactacagaaaatgatggctccttcaaggttgatcttcccttagaccacacaaaaccttcttctgtgaagaattgcttagcaaaacttcttggcgggccagttcagctttatgtctcaagggaaaaccaggtatcccaaattattaagggcaaagagcaaaacagctacaccatctccactccccttagtttcaggacatcatgccccctaaacacaaaatgcaaggctgggaaaaaggttggttcatccaaaactgtggatctccctctgcctccagagtggggattggcaccaagtagctattatgttcctttcttccccatcattggaataccttgatcatgtgctcaagacttcacaagtgatttgtaatcacttgagtaataatacttgtggggggaaatagactgttatatggtcttgtatgttacatatgattatagatgtgtcatgtgtagtagtgtgaaagaatgccacttatagttgtggaatgtactgtatgatagtatgtgaaaagcagataaatactctactggtttgtcaacttaaaaaaaaaaaaaaaaaagcggcc

SEQ ID NO: 58100 - DNA, 261 bp, Zea mays
  Clone ID: MRT4577_152983C.1
atcagattaccactttactggagtcccaactttggcaggagaaaaaattttatgctctgacgacgcttccgtttacacattaaactggtcaagagtctaaccaaagaaacctcaagttcctcctggcatggctaatgatactactggactaactcaccactaactcacttcactccctagctgagctgtgctgtcgaaaccaaacagagagttgtgacggagcagaggtgtcgggtgaaactagtagatcttcacagagaa

SEQ ID NO: 58101 - DNA, 134 bp, Zea mays
  Clone ID: MRT4577_152984C.1
cgattggaattcggaacttgtagtatagccttaattttatccacttcgaattagttttgtggattggtgagtgtcaagttatttgctttagattcaaaatgaagccttttccccctcgcgaaatcagaaggttt

SEQ ID NO: 58102 - DNA, 277 bp, Zea mays
  Clone ID: MRT4577_152985C.1
cccactcgtccgcccacgcgtccgattaaaaatataaaaaaaaaaaaaaaaaaaacggaaaatgtaaaattttagaaaaaaaaaaaaccacaaacaaaaaaaaaaagggcgccccttttaaaaaatccgggcttactttcccattccttcaacatcataccttttttataggtcccctaaatttaattcactcccctaaattttacaacctccctactttaaaacccctttctttccccaacttaattccctttccccacattcccctttttccaac

SEQ ID NO: 58103 - DNA, 151 bp, Zea mays
  Clone ID: MRT4577_152986C.1
cacgagtatttagccagctaattcatgatcgtatcggaacgcatgcagatgtcactgctcctgacatggggaccaatgcacaaaccatggcatggctgctggatgagtactcgacatctcatggtcactccccaggagcgtcactgggaag

SEQ ID NO: 58104 - DNA, 242 bp, Zea mays
  unsure (1)..(242): unsure at all n locations
  Clone ID: MRT4577_152987C.1
cgagcagtgtgtttcgcctgagaatgacggtcgaacatgtagacatgaacactgaaagcattaggctctagtcttggtttctatgattcataacaataagattattgtaattaatgtgtttggaagggttctatatgcttggtagatcactagtttcatgatggtctaaaaagtaaaatagtgtttctttgttgcaagtgcttgttattttatatacaaaataaactcttttagggcttgng

SEQ ID NO: 58105 - DNA, 786 bp, Zea mays
  Clone ID: MRT4577_152988C.1
ccggccgggttgtaccacttagtttatgtcttgcatgtgcattatgttatgtttatttctatataagagtgttgatatcgccacttggattagcttcgttgagagaacattttataggtagtaggtaacacttacatcaccttcctttgcttacacgttgacagaacactttataggtagcagttgcattagcatgttttccttacatgtaaggcatcaccgatccgctgcatgatatgtggtgataatatgttatttagcctcttgaatacttaaacccattgctttgtgtgttccatgtgctttataatctatttatttaactatttacatatactgagagattactaggtcaacaatagatttattctatttacaataaccttctcttgcataacgcagatagaaggtacatgtgcgttgttactatctcacgccaactcagacctctactggataacgttgcacaccatgcgactagacagacactaaatttgggtacctctacaaagcacttaatttattgtgcctctttcgaaaaaggttcttttctttcgtaattacctaaccactgctatactatactaacattttgaattcacatatacaaactcggcttcattactactgacggaacatccgaagcagaattttttgtgtcatggagatacaaattaaaagttagtttattgtaatttccaaaaaaacagcagagagcacttaacaaggcaagggagtatcaatttaaattatgctaccaaaattgtgttgaaaacttacttttac

SEQ ID NO: 58106 - DNA, 225 bp, Zea mays
  Clone ID: MRT4577_152989C.1
gcgatcttaggggtgggtttttatttgggggtgggggttctatttattccaactagtttctatctacttaatggccccaacaaaacgaaaaccttattgtgtatttcaaaaaaagcccaaaaaagccaaatcctttgattctgcatcaggcccggcgcatttaattaaaaaccctaattggcacccgtgtccaaaacctgcttggtcccaacgcctaggggcccc

SEQ ID NO: 58107 - DNA, 420 bp, Zea mays
  unsure (1)..(420): unsure at all n locations
  Clone ID: MRT4577_15298C.1
agcaagtggtccctgctctgtacttgncntatgatgtgagcttttacaaaatcatttgtcccccccttttttttttctctttctcgttttgctctcatcgctggaagtttttttgacgagagcctccgacaaccggagggggaacgaaaccttaaatcgctgctgcgaggagcgggttggggacgaccgggggggggaattgctgatggataattggtgatggaccctgccctcgaaattggtgggagaccttaactgcggcggacccccccatggttggatgcggccgtcgttgatgggggctggaacccgaagttgggcacgcggattgccttggtgcctcgggggtccggtccgggggttgtgtgcctggggacgccgggttggttgtggggccgcactgcctgctgccggggttgg

SEQ ID NO: 58108 - DNA, 302 bp, Zea mays
  Clone ID: MRT4577_152990C.1
cgggccccggggtgttttttttttttttttttttccctttttcccaaaaacgggcccttggtggcattgacccccatgtccaaaacaatcgcccataatgaaccttttattcaacaagccccccctggatccaaaaaaaacacaacccccgatttaaataattggcctaatgccccccggggaaggaccaaaaggaaatccctgtggggatcccccccccggggaccccccgcttggaaaagggttttaacaattcttacggaaccaccccgggcccgaaggggtttttgccgacccctggt

SEQ ID NO: 58109 - DNA, 2710 bp, Zea mays
  Clone ID: MRT4577_152991C.1
agtgccaagcatttaaacatggattaaccggccggcgtacccatggtatcctatccaggggcaatcgaatataattttcttccggagtggccaaggaaggtaccgagtttgtaccagttccacgactcaggccagaagacacggagtatggtatggtactacaccaagacggtgttgtttctgtaagttttgtaatttatgtacccttcacggtgccggaaaaaaaaaaaaaaaaaaaaaaaaaaaaaaaaaaaaaaaaaagggattggcctcgaggccggccgggactcgtccgaggcagggagacgcaaggcacgcaccaccatataacaggaggcgcgtctctgcaggccggcactcgcacggacgagcgaggcagccccgcaggtcgcagccacaacccaagcgcagcgctctgcctgcctccgctccggctcagctcccgccctgcctccgccttccattccgccgcgcggcgctgccgagtgccgacgtcgtccccgccggagtttctggtttctgggttggatctctcggagtcggagcgagcgaggatgggcggcggcaacggtgaaaccacccagctgggggagccactgctggcgaagaaggcgaaggcgtaccgccctaggtgccccggctgccgggtggaccgcctcaacgcggagcgggagggggtcttccctctcaaggacctcttcctcatctggctcgtcaccatcacctgcaccctgccgatccagtctctgttccccttcttgtatttcatgataagggatctgcatattgctaaacaaacacaagacattggattttatgctggttttgttggcgcttcatatatgtgtgggagggcagtctcctcaacagtatggggaatcgtggctgataagtatggaaggaaaccagttatcgtactgacccttattgcaatataaggaccctttttttgacaaaacagttatcttcaatactatgtttggactaagctcaaactattggatggcattaatcacacgatgcctgcttggaatcatgtgtggttatctcgggccaattaaggcttatgctacagaagtgtgccgaaaagaatacaatcatctggctttggcagttgtttcttcctcacgaggcattggtctcattattggtccagctattggtggttatcttgcgcagcctgcagataaatatccaagtatattctctcagacgtccatatttgggaggtttccatactttcttccgtgcctgtgtatatcaatccttgcagttattgctctaattgcctgcatctggtttccggaaactttgcataaacacaatggggatgccgttgataattcagttgaaaccgtagaagaatctcttgctggcaccgacactgaagaaaatggaggtggcggatgtctaaaattatttacaaactggccgttgatgtcagctattactttatattgtatcttctctcttcaggatgtggcttatgcagagacattctctctttgggctgtcagtgacagatcgtttggtggattaagctttactaccacagatgtgggcaatgtccttgcgatgtcaggtctcttcctttttctatatcaaatgttgatctatccgttccttgccaaaacggtggaccacatcacattagtccgtgcagtggcgttattgactctaccggttcttgctagctacccattctttccttcgttgtccgggttcgggctcatggtggtagtaaattgtgcatcttttctgaagaatacattctcggtaactaccattaccgtgttcaacattttgatgaatgaagctgtgactcaggatgtaagagccgcagccaatgggatagctgtaacactaatgtccatctctaaagcggttgctccagctgttgcaggaatcatattttcgtgggcccagaggcgtcaaacagctgcatttcttccaggcgaccacttggtgttcttcatactgaacatcttcacgttcatcggtttcgtcttcaccttcagaccgtttttcgttcgaggcagtgccaagcactgaaacatggatgaaccggacgacgacccatgggtatcctatccaggggcaatcgaatataaattttcttccggcgtggccaagggaggtgccgagtctgtaccagtacgacgactcaggccagaacacacggcgtatggtatggtacacagcaaggccgtgttgttgctgtaagttttgtaatttctgtttccttctcggcttcgcagcatgcagttgctgtatatgatggaagaacactctgttactgggcatgttgcgcggtttccacgcgtgtaagtaatgtagaagtcgctatggtaggtatttccataccgtcattagtggatcattgattttttttgtaagaaggttattgcaatgccctttttccgggcatgaataagaaaaaggaaatatgcttatatgcatggtatgaataagtgagcaaaaaaaaaaaaaaaaaaaaaaaaaaaaaaaagcggccggttaagagaactggctacattttggcatgttgcgcggtttcctctgcgtgtaagtaatgtagaagtcgctatggtaggtatttccataccgtcattagtggatcattgattttttttgtaagaaggttattgccttgtactgtgttcttgatttatttaaaatcagactaagagaactggtgacattttaaccc

SEQ ID NO: 58110 - DNA, 328 bp, Zea mays
  Clone ID: MRT4577_152992C.1
tcatatcttgtatcatcttattaagattatattttcttctcaattgtcgaaacttcacaaatgcgtttttattaatcaccataatccaaacaagccttttcttcttactgtcccatacttaattaatcatcactttatgccctaacttaactcttcactacattttttttattttcaccttcactgcccccccctcccctcctattatatcttcctctcccgtaaaacactttacttctctcaccttattctcctttctcccatttcctttaatttacctcacttcttaccctttacccccgtctcaaaagctctctcctattctttt

SEQ ID NO: 58111 - DNA, 153 bp, Zea mays
  unsure (1)..(153): unsure at all n locations
  Clone ID: MRT4577_152993C.1
atctcttctcctccctagactccccgttaggtattccaatttggtgatctgtttagcttcaagctcacatcagttcnccgactttttactatcacgtcacactgctcgccaaaatggccgacaagggtcgatcccgtgtttaccttgacattg

SEQ ID NO: 58112 - DNA, 505 bp, Zea mays
  Clone ID: MRT4577_152994C.1
ggttgactctccttttttgtttcttgaattttttgttcaaaattgcacaaacacttggttttccctttccctgctccttccccctccacaggggcgggaagcagagctttgctattgctccgcttcgcttccggggtccactggccactcttggcaatgggccacagattgcatactggggaccaacccttgctgcgcccatttctcgtcgtcagggccagcggttccccccttcatgggaaaagcaccttccccgcctgagccagctagtagctagtcaaacctcaaaccccacggagtagtaggggttgtacgcgcacccccccctggaggacatgagcctggacagcttccccttgcaaagctcgaacctggccggccggacatcaaaaccctgcccgggcccgggcgcggcccctcccggcagccccaggtgccggtccagcttggggaactccttgggccgattgaccacctgggcgtagcaaatgtacctgcccccggc

SEQ ID NO: 58113 - DNA, 523 bp, Zea mays
  Clone ID: MRT4577_152995C.1
cagaacgttaatcctttggatcactagctccacacatcaaaacgacaattaaatcttattaccggggggaaatacgaaacaggagacaagactaaataattggtcgatcagccggtctggtgacaagggagttggatgagatccatggggaaaaatcccatggcattcatggatctcctcctattcacttccgtgtcctcctcgtcctcttcatgctcctcggcgatcggtcatcgttctggctcagcatcaacaaccctatcgcggcatttacttcctcttcggtattcgtcgttttagactccatgtgcctcgtctccgcctcctggacgggcggcggcgcctcgacggctcgctccggcagcggcagcggcagcggcagcggcagcggcagcggcagcggcaggtcgttctcgtagtgcagcaggacgaggcccaaggagccatcggggtgaccgctgtccacggtgaaggggaccttctccttcccgtcgcgcagctcgtaccggttgtgtagcttccg

SEQ ID NO: 58114 - DNA, 583 bp, Zea mays
  Clone ID: MRT4577_152996C.1
ggcacaaaagggggtaaaccctttaaaaaaactatggaaggggatacccaaaacaggcatgactgattgaaaaacacaggaggcttaattaggctatgaggaaaaaaaccctttgggttgcatgggggtctttgttagggctagctacctttgtcaaaagggggtggctggtttttttttttgggatccttgcccggggctcccgaacaaacattttgggaaagcggacaagttcatcctggggggggccttttttgccggggggctcgtttttgcccgtttggatgttaaccttgcaccccggttttttaaaaacccccctgccaacgtaaacaagggggttgaggttttccgggggggacacgtaaacggacaacgtttggcgggggagctcgtcgccctggatccggaggaactgcctttccaagggcagcccctgaaaaacacggaggggtggatgtcaacaaggccggccctggcctggctaaacctgtcaataatcgggcgtggtgtccttgttggtgagccaccccaggaggccccatttgccggactgcacggggtaaaacttctcctcggcctt

SEQ ID NO: 58115 - DNA, 231 bp, Zea mays
  unsure (1)..(231): unsure at all n locations
  Clone ID: MRT4577_152997C.1
gctcgggtgtagtagtttatccccattatgtcatacgaccccactagcttctctttctcttcgcggtgaagagggcaaccgatccttgaccacgatctcatggagaaggggtagtcaccacggaccaccggctccacgaaccaccctaggttgtagtcgatggacctttcctgggcctgtttttcgaggagcatgcggccaganggcacacgacccancacgncaaacgcc

SEQ ID NO: 58116 - DNA, 221 bp, Zea mays
  Clone ID: MRT4577_152998C.1
cgacggacgcgggggggcacccgaaaattccgtaccgggaccgggaggggaaccagttttccttatagggagacgtattaaagtttggaaaaaagagggcaataacagtttccctgaaaaaatgggtatcaagtaaaaattgcaaacactttgggggccggaaggttaaagggtaaaccctggggggcctaaagagggaggcaacttacattaatgggggg

SEQ ID NO: 58117 - DNA, 255 bp, Zea mays
  Clone ID: MRT4577_152999C.1
gacgtatatatatgtatgtacaggtggcgcgtgcgggtacggcaacctgtactcggcgggggacggcgcgagcacggcggcgctgagctcgacgctgttcaacgacggcgcggcgtgcgggcagtgctaccaggtgcagtgcgaccagcagaacagccggtggtgcaagccgggcgtggtcgtcaccgtcaccgccaccaacctgtgcccggccgactactccaagcccagcaacgacggcggctggtgcaaccc

SEQ ID NO: 58118 - DNA, 349 bp, Zea mays
  Clone ID: MRT4577_15299C.1
tcggagattttcggtctcatctttgccaggcattgtgtatgcgcttctagacagaaaagaagacgcagataagcagtttgatatatacagaagccttgtgccggatgaattcccagataagagttttatcagtgatgttatactagcggctagaatggagtcacatgatcggctacaaaaggaatttgaatctgagtttcaaacaaagaaatgatacattaagatttctgtagatgaggcccaaatactcctggtaggataaatagttgcatagtgatgtgcaccaaaatgcaccaatcttacaaatgaaatataacacagtaaagcatagtgaaaagaggtgtctcct

SEQ ID NO: 58119 - DNA, 480 bp, Zea mays
  Clone ID: MRT4577_1529C.1
ttcgaacgaaatccaagcgattccccaagaggtttcattttgcgtcagatcaagcccagaatccgccactacccgccgagcagtgaagtagagcggcgagcggcgaggagggaccatggcgtcgttgccagaggaggaggaggccttcgagcacacgctgctggtggtgcgcgaggtgtcggtgttcaagatcccgccgcgcaccaccagcggcggctacaagtgcggcgagtggctgcagacggacaagatctggacgggccgcctccgcgtggtgtcgtgcggcgaccgctgcgagatccggctcgaggacccgggctccggggacctcttcgccgcctgcttcgtgctgcccggccagagggacagcgccgtcgagaccgtgctcgactcgtcgcgctacttcgtgctccgcatcgaggacggcagggggaagcatgccttcgtcggcctgggcttcggcgagcgcaatgaggcctt

SEQ ID NO: 58120 - DNA, 414 bp, Zea mays
  Clone ID: MRT4577_152C.1
cccacatataaaaatacattttcatggcaaatatccaagccacaacaatatcagacaactacattttcagaaaacaaataaaaggcacaattacactaaagcccagttaattttacccatgtaagaatattatcatcatggcaaatacccaagctcagcaacatctgtttaactacatttatcagaaaacatatagaagtacttgctacaccgtcatcccagttaatcttgccaatgtaagaatactagagtattattagatagcagtttcatgctctatctgggtagtgccacaacttagtacagaaaccagtttttagccttttactggtaacaatttttttaagaggattccaaaagctgcgcagccaaaccactgaattcatcgatcagggggcggatgaaggtgataac

SEQ ID NO: 58121 - DNA, 228 bp, Zea mays
  Clone ID: MRT4577_153000C.1
atggcccgaggtccattttccttacaacaccaaagacacaccagcttatatgagtcagacgacaacaaggagagcttcaaggagtcagaggaggaggacaagaagggtggccacaacggcgacaagggcaacaacggcaaggacgacatcgagggaagcagcgagggaaacaatgatagagatggcaagggcagcagcgacgtcggtggtaaggtgccaccggcttaa

SEQ ID NO: 58122 - DNA, 486 bp, Zea mays
  Clone ID: MRT4577_153001C.1
tctttagctgctctagctctagccctagctagtagctagccactcggtcgtgtagtcatcagccttctgatcgtcacccatggccactgccgaggtccagaccccgaccgtcgtggcgaccgaggaagcgacagaagcagaaccagcagccgctgagcccgaggctgctgctgcggaggaggagcccgcggcggccgagccggccgctgaggagcccgagaaggccgagccggccgctgaggtggccgagaaggccagcgagtgaggccgtgcgccgtgcgcgcactgcggcggcggacagcgggtcgggagatcgatggctcagcgcgcgcgcgcctacatggcacggcgttgctgttcagtacaacgcgaacggaacgggtttctctcatctctgtgtgtgggacagtgtgtcgtagcttagcagtggctgtcgcgtggactgcccggtgccgactgcgagtgacatgggctaataaagtgtgc

SEQ ID NO: 58123 - DNA, 357 bp, Zea mays
  Clone ID: MRT4577_153002C.1
cccgggtagcgatcccactcccgttcagcagctgatcgctcactcttgcggggggaggagtctttagctgctctagctctagccctagctagtagctagccactcgggcgtgtagtcattagccttctgatcgtcacccatgggcactgccgaggtccagaccccgaccctcgtggcgaccgaggaaacgccggcggtggagaggccggcttcccccgccgtcgtgccccaggaggcggagaccgagccagctgccgccgctgagccccaggcggcccccctggaggcggaggaagagacaccaaaagaggcggagcccgagcccgccgccgctggagaggtgaaggaggaagcggc

SEQ ID NO: 58124 - DNA, 403 bp, Zea mays
  Clone ID: MRT4577_153003C.1
ctcgcgccgtgcgtgcacgctgtgcgcaggtccagaccccgaccgttgtggcgaccgaggaagcgccggggtggagaccccggctgaagaggtgaaggaggaagcggcagcgcccgctgccgagacagaagcagaaccggcagccgctgagcccgaggctgctgctgctgctgaggagcccgcggcggctgagccggccgctgaggagcccgagaaggccgagccggccgctgaggtggccgagaaggccagcgagtgaggccgtgcgccgtacgcgcactgcggcggcggacagcgggtcgggagatcgatgtctcagcgtgcgctcgtggcgtgccagtcgcgtcgcgcgcgctggcgcctactgttcagtacaacgcgaacgcgacggtttctctccatc

SEQ ID NO: 58125 - DNA, 989 bp, Zea mays
  Clone ID: MRT4577_153004C.1
cgtcatcggcggcgtgcgcaggctccgcgacgaggccgacgcgcgcatcggtcgcctcgagcgccgcgtcgaggagatcgccgccgccaccgcgcagccgccgccccccgccctctccgtccccgtcgcgccgccgccgcacaagggcgtgcccatgccgatggaggcgccgctcgctaagcccgccttcgtcgctatggcgaaggaggtgccgcagcacaagggcatggctatgtcggagccggtgccggcgaaggcggcgcccgccaaagccggggtgatggccatggacatcgccgacggacacgaagacgcggaggggatggttggcggcggcgtcaaggtggccaaggaaaaggtgaaggagatggttatgagcggcggcggcagctgggaggtggtcgggatctccggcatgggcggcagcggcaagaccacgctcgccatggaggtcttcagggatcacaaggtccgagcctacttcaacgacaggatcttcttcgagacgatctcgcagtccgcgaatctggaggccatcaagatgaagctgtgggagcagatcagcggcaacatggtgctgggtacatacaaccagatcccagaatggcagctcaagctaggaccaagggaccgaggacccgtccttgtgatcctcgacgatgtttggtctctcccgcagcttgaggagctcatcttcaagttccctgggtgcaagaccctagtcgtatcaaggttcaagttccccacgctggtgaaacagacgtatgagatgcagctgctagacgaggcggcggctctgtccgtcttctgccgcgctgcgttcgaccaggagtgtgttccgcagaccggcgacaagagattgggcaggcaggtctcttgagagtgcagaggtctccctctggctttgaaggtcatcggcgcgtcgctgcgcgaccagcctccggagatttggctcagcgccaaaaaccggttgtctcgaggagagggca

SEQ ID NO: 58126 - DNA, 269 bp, Zea mays
  Clone ID: MRT4577_153005C.1
tccgagactttgagtgttgtacatactgacacttgtgaccgagggtgccaaattggtgtcaagaaagccattccatccactcgccgctgtccagcggtccaaaagcaaactgctcggcactgcttacacaggctacacctgaaaaccggagctgtatctaccttgcttttagcaagggagggagggagctcttcttgacctccattgagggcgcccaagagcccgagaacccactcgtacccgacaaagaactgcaggacgatacttac

SEQ ID NO: 58127 - DNA, 726 bp, Zea mays
  unsure (1)..(726): unsure at all n locations
  Clone ID: MRT4577_153006C.1
gggttggtatacccggacccaaactggcatacatgagagtggattgacagagaacatgaagcaacacagagacacaagctggagggggacaaatgggggaccgggccccatttccaccaccagaccagacgacgcacactttttttagcccatgtcactcgcagtccggaccgggcagttcacgcgacagccactgctatagctacgacacactgtcacacacacagagatggagagaaaccgtcacgttcgcgttgtactgaacagcaagcccgtgccatgtaggcgcgcgcgcgctgagccatcgatctcccgacccgctgtccgccgccgcagtgcgcgcacggcgcacggcctcactcgctggccttctcggccacctcagcggccggctcggccttctcgggctcctcagcggccggctcggccgccgcgggctcctcctccgcagcagcagcctcgggctcagcggctgctggttctgcttctgtctcggcagcgggcgctgccgcttcctccttcacctctccagccggcgcttcctcggtcgccacgacggtcggggtctggacctcggcagtggccatgggtgacgatcagaaggctgatgactacacgaccgagtggctagctactagctagggctagagctagagcagctaaagaatgatcgagctgcaagagtgagcgatcagctgctgtncgggagtgggatcgctaccccgg

SEQ ID NO: 58128 - DNA, 2603 bp, Zea mays
  Clone ID: MRT4577_153007C.1
gagccggccggggcgctggaacgtctaccgcgccgcgcagctgtcgcgccggatggaggcggccgaccgcggcatcgcgcgctggctggagcgccacgcccccgcgcacgtcatcggcggcgtgcgcaggctccgcgacgaggccgacgcgcgcatcggtcgcctcgagcgccgcgtcgaggagatcgccgccgccaccgcgcagccgccgccccccgccctctccgtccccgtcgcgccgccgccgcacaagggcgtgcccatgccgatggaggcgccgctcgctaagcccgccttcgtcgctatgacgaaggaggtgccgcagcacaagggcatggctatgtcggagccggtgccggcgaaggcggcgcccgccaaagccggggtgatggccatggacatcgccgacggacacgaagacgcggaggggatggttggcggcggcgtcaaggtggccaaggaaaaggtgaaggagatggttatgagcggcggcggcagctgggaggtggtcgggatctccggcatgggcggcagcggcaagaccacgctcgccatggagggccggccgggctggctctctctctcccccttttcatgattctacccagtttctttttgtcttcagggatcacaaggtccgagcctacttcaacgacaggatcttcttcgagacgatctcgcagtccgcgaatctggaggccatcaagatgaagctgtgggagcagatcagcggcaacatggtgctgggtacatacaaccagatcccagaatggcagctcaagctaggaccaagggaccgaggacccgtccttgtgatcctcgacgatgtttggtctctcccgcagcttgaggagctcatcttcaagttccctgggtgcaagaccctagtcgtatcaaggttcaagttccccacgctggtgaaacagacgtatgagatgcagctgctagacgaggcggcggctctgtccgtcttctgccgcgctgcgttcgaccaggagtgtgttccgcagaccgccgacaagagattggtcaggcaggtctctgcagagtgcagaggtctccctctggctctgaaggtcatcggcgcgtcgctgcgcgaccagcctccgaagatttggctcagcgccaaaaaccggttgtctcgaggagaggccatttctgactgccatgagaccaagcttctggagaggatggcggccagtgtcgagtgcttgtccgagaaggttagggactgtttccttgacctgggctgcttcccggaggacaagaagatccccctcgacgtcttgatcaacatctggatggagatccatgaccttgatgagccagatgcttttgccatcttggttgagctttcgaacaagaaccttcttaccctcgttaacgatgcacagaacaaggctggagatctgtacagtagctaccatgactactcggtgacacagcacgacgtgttgagagatcttgctcttcacatgagcgggcgtgacccgctcaacaagcgcaggcggttggtgatgccgagaagggaagagacacttccaaaggactggcagaggaacaaggatactccgtttgaagctcagatagtttccattcatacaggtgaaatgaagggatctgactggttccagatgagcttccccaaggcagaagtgctgatcctcaacttcgcgtcgagcctgtactacctgccgccgttcatcgcgacgatgcagaacctgaaggccctggtgctgatcaactacggcagcagcagcgcggccctggacaacctctccgccttcaccacgctgagcgggctgaggagcctgtggctggagaagatcaggctgccgccgctgcccaagacgacgatcccgctgaggaacctgcacaagatctcgctcgtcctctgcgagctgaacagcagcctgagagggtcgacgatggacctgtcgacgacgttcccgcgcctgtccaacctgacgatcgaccactgcatagacctaaaggagctgccgccaagcgtctgcgagatcgggtccctggagaccgtctccatctccaactgccacgacctcaccgagctgccgtacgagctggggaagctgcactgcctcagcatcctccgggtgtacgcctgcccggcgctgtggcggctgccggcgtcggtgtgcagcctgaagaggctcaagtacctcgacatatcccagtgcatcaacctgacggacctcccggaggagctcggacacctgacgagcctcgagaagatcgacatgcgggagtgctcgcgcctgaggagcctcccgaggtcgtcgtcctccctcaagtccctcggccacgtcgtgtgcgacgaggagacggcgctgctgtggcgggaggccgagcaggtcatccctgacctccgggtgcaggtggccgaagagtgctacaacctggactggctagcggactgatgtctcgttcctggatggatgctgcggcgtccaaactgaccttgtacatatgtgatgttgcttccccccaaaccgagcgcagggaaactcatcaatccacctgccaattttgacgtgttcagtcagtgttcgtcaaacacccccccccttttcaaataccccccg

SEQ ID NO: 58129 - DNA, 1122 bp, Zea mays
  Clone ID: MRT4577_153008C.1
gcccctcctcgagttttttttttttttttttttttttttttttttcaaccaaagaagactgaacatgcttgatatacccgtacccaaactgccatacatgagagtagatagacagagaacatgaagcaaaacagagacacaagctgcagcggcacacatggggcaccgcgccccactaccaccaccagaccagacgacgcacactttatttagcccatgtcactcgcagtccgcaccgggcagtccacgcgacagccactgctatagctacgacacacacactgtcacacacggagagatggagagaaaccgtcgcgttcgcgttgtactgaacagtaggcgccagcgcgcgcgacgcgactggcacgccacgcgcgcgcgcacgctgagacatcgatctcccgacccgctgtccgccgccgcagtgcgcgcacggcgcacggcctcactcgctggccttctcggccacctcagcggccggctcggccttctcgggctcctcagcggccggctcagccgccgcgggctcctcagcagcaggcagcagcagcctcgggctcagcggctgccggttctgcttctgtctcggcagcgggcgctgccgcttcctccttcacctcttcagccgccgccggctccggctccggctccgcctcctttgccgtctcttcctcctttggcgtctcttcctccgccgccacgggggccgcctccacgggggccgcctcgggctcagcggcggcagctggctcggtctccgccggggcagctggctcctccaccttggcctcggcggcgggggcagcctcctcgggcacgacggcgggcggagccggggtctccaccaccggcgcttcctcggtcgccacgacggtcggggtctggacacgtacctcggcagtggccatgggtgacgatcagaaggctgatgactacacgaccgagtggctagctactagctagggctagaggctagagctagagcagctaaagaatgatcgagctgcaagagtgagcgatcagctgctgatcgggagtgggatcgctcgagctcgagtgacgaagcaatgcggcgagaccggggcgctatatatagagaggccccgccgccccgcctcgtgc

SEQ ID NO: 58130 - DNA, 441 bp, Zea mays
  Clone ID: MRT4577_153009C.1
gcacgggcgcgagctcgagcgatcccactcccgagcagcagctgatcgctcactcttgcagctcgatcattcttagctgctctagctctagctctagctctagcctctagccctagcccctagctagtagctagccactcgatcgctccgtcatcgggggggggtgatcgtcacccatggccactgccgaggtccagaccccgaccggcgtggcgaccgaggaagctccggtgggggagaccccggctccgcccgacgtcgtgcccgaggaggctgcccccgccgccgaggccaaagaggaggagccagctgccgccgctgagcccgaagcggcccccgtggcggcggaggaagagacgccaaaggaggaagagacggcaaaggagccggagccggcggctgctgaataggtgaaggaggaaacggcagcgccccctgccg

SEQ ID NO: 58131 - DNA, 436 bp, Zea mays
  Clone ID: MRT4577_15300C.1
gttagtcgatcaacgaccctaccaccagcatggggtacctggttcctgtggggcgctacgtttccgatggcctctgcctaacgagaacgtgctggacgtacaaaacctctccagaaagatcattatatatgattttttttgccatgtctggaacagccaaagccaatatgctatggggcctctgtctggtccgaatgatcgtggcgaccccagacttgctcgatgcggatatcatccgtacgccgctctccgtccttacggtgcaagtatctaacggatgggcgcacaatatcaaagtctacctccacaacggacagggccctacggctacggttccctttacaagggcatcaatcaacaccccaaggtataagatggtggcgcgcttctcctagcgtggcccgaacaggtagagccgtgggaatatcaaacccta

SEQ ID NO: 58132 - DNA, 1586 bp, Zea mays
  Clone ID: MRT4577_153010C.1
ttgggaccctcgaggctggccgggactgttatcccgggtggtctctaaggttgcagagtggcatcttgccactgccacgagcccacgacgcccgcagccgcagcgaaccagagaggagagcgggagatgaagggcgtcgggggcggcgcggcctccccgggggactatgtctacttcaaatctgtcgtcccgctccacaagatctccattgggtcaaaactgtggaggtactatgactttggacccaaggttgtgccacctcttgtttgtatcccaggaattgcaggaacggctgatgtatactataaacagattatgtccctttgtatgaagggttatcgagtaatatctattgacgttcctcaagtttggaatcaccatgaatggattcattcatttgaaaaatttttggactccatgaatatccatcatgttcacatttatggtacatctcttggtggattcctggcacaaatatttgctgaacaccgtccaaggagagtaaagtcattggtcctatcaaatacttttcttgagacgcacaagtttgctgctgccatgccttggtctccagttgttaattggaccccttcttttttgctgaagcggtacctcttgacaggaatccgagatggtccccatgaaccattcatcgcagactcagtagattttgttgtgggtcaggtggagacattgtcaagagatgatctttcatcaaggttgatgttaaatgttaatgttgcatccgttgggtcgttaatgttgcctgattcactcatcactataatggatacaaatgactactctgcagttccccagcagttgaaggaacagttgaatgaaaggtaccctggtgcaaggcgtgctgtactgaagactggtggtgattttcccttcctgtctcgtcctgatgaggttaatctgtaccttcagctacatctgagacgagttggtgtagagccaaggtcagacctggtccaaggctttacccgaaatggcagcgctgggagttcaaaggatcaaaaagatggaggggacagctttgataatagtggtggagacaatggccaccatggttcaggtggcagtgatcatgacaggcggcattgtgcatcagaatcacaccattccgacgagccaataccaactagcacaatgcttgccaatactgtactagaactggttatgtaggaaatcatggaagcgtgtattgcagcacattggggccactgttgtaagtgggaaagccaaaagagcatctcaaatgatgggagaggcgcttctgtatgtttgtataataataatgtatgcttgtcttatatttatttatttacccagtttagggggtgtttggagcaaagtatttttagagttttgaggtaaaaccatgatattgaagaatactatagtatttctcattgttttgctaagaggtgtttggttacattgtaaaaaactctgttttgaataccatggttttgcagataccatggtatttttgaacatttgaaactctactccaacctaaagtttttatctatgacttattttgcacatgtaaaagaaaaaaggtcggccatggtaga

SEQ ID NO: 58133 - DNA, 365 bp, Zea mays
  Clone ID: MRT4577_153011C.1
agcgttcccactcccgaccagcagccgggggggcactcttgctgttcgagcatcctttagctgctctagctctagcctatagccctagctagtagctagccactcggtcgtgtagtcatcaaccttctgatcgtcacccatggccactgccgaggtccagaccccgaccgtcgtggcgaccgaagaagcgccggtggtggagaccccagctacgcccgccgtcgtgcccgaggaggctgcccccaccgccgaggcctaggtggaggagccagctgccccggcggagaccgagccagctgccgcctctgaacccgaagcgacccccttggctgcggatgaagagacgccaaatgaggaagagacgg

SEQ ID NO: 58134 - DNA, 510 bp, Zea mays
  Clone ID: MRT4577_153012C.1
ccggccgggagcaattttttatggcaagaaggtgagaaaagcctaaacaaacagggcattcaggagactggttcgtcgtggcctgcggagacaacgcataacaaaaagcaggtaaggcaatcggagccctcatggccccgctcttatcatcatcaactcgctcggcaccgccgaccggtgtcactgtcatctgtctctgtcatgggacccatggccagcgcggacgcgccggcacgtcaagcagcaatattccacgggcggcggcggggccggcaccacgttctcgccaatgatttcgtccctttggtacaaggtccaacacacgtggcagagaaagagaaggcgtttccagttctgcaccggatcgggttttgtcgacttctccagtccttcatcgaattcgaattgaatcgaatagttggtccgttggttctatctgccttcgatcaaatcgaatcgtttttttcccgtaatatgttaagaaaaaaaaaaaaaaaaaaatttgcggcc

SEQ ID NO: 58135 - DNA, 594 bp, Zea mays
  unsure (1)..(594): unsure at all n locations
  Clone ID: MRT4577_153013C.1
gcgctagcatgagnaccgccagccgcacagaagggagacgtacggacgaccacgacgcaggcatcacaccatggcgagtcccaactcatacgcccgcgcgcctccggggcgcacaacgctcctacgctactccgcgcccactgcgagcagagcgagcctgtcgctaccttggatgtgcatgaagaagggcgcagtcataaggcatcccatgggactacatcgcctctggctccaacacacgcatacactggagacacacaacgactctaataatggttcctgtgcggctagggctaacgactatcgcgaaccggacatcaacaggggaaaacaaacttgaggcacgagagtctaaactgaagacaggtgacctcttggggggtaaactatccaacactctgggaagcgtggccgacaatcatatgaagagcctacatataatgatcaaaactcaacaacacctgtgaactcttagcatatcataagcctagattctacgtggtaactgttaagaccacactaagtagaatctatcgagctctcaaggatcgatgtgcctacctgtgacgacttttatacgtactggcaaatcat

SEQ ID NO: 58136 - DNA, 973 bp, Zea mays
  Clone ID: MRT4577_153014C.1
ctggggtttttttttttttttttttaaccaaagaagacggaacatgcttgatagttgatatacccgtacccaaactgccatacatgagactagatagacagagaacatgaagcaacacagagacacaagctgcagcggcacacatggggcaccgcgccccactaccaccaccagaccagacgacgcacactttatttagcccatgtcactcgcagtccgcaccgggcactgctatagctacgacacacacactgtcacacacagagagatggagagaaacagtcgcgttcgcgttgtactgaacagcaagcccgtgccatgtaggcgcgcgcgcgacaaggctgccaggccacgcgctgagccatcgatctcccgacccgctgtccgccgccgcagtgcgcgcacgacgcacggcctcactcgctggccttctcggccacctcagcggccggctcggccttctcgggctcctcggcagcagcagcctcgggctcagccgccgcgggctcctcggcagcagcagcctcgggctcagcggctgccggttctgcttctgtctcggcagcgggcgctgccgtttcctccttcacctcttcagccgccgccggctccggctcctttgccgtctcttcctcctttggcgtctcttcctccgccgccacgggggccgcctcgggctcagcggcggcagctggctcctccaccttggcctcggcggcgggggcagcctcctcgggcacgacggcgggcggagccggggtctccaccaccggcgcttcctcggtcgccacgacggtcggggtctggacctcggcagtggccatgggtgacgtacgatcagaaggctgataactacacgactgagtggctagctactagctagggctagaggctagagctagagctagagcagctaagaatgatggagctgcaagagtgagcgatcagctgctgatcgggacgaacacgtggg

SEQ ID NO: 58137 - DNA, 1026 bp, Zea mays
  Clone ID: MRT4577_153015C.1
gcagatgaacaactggctgcatctataaagaagatcatatccataagaagactgaacatgcttgatatacccgtacccaaactgccatacatgagagtagatagacagagaacatgaagcaaaacagagacacaagctgcagcggcacacatggggcaccgcgccccactaccaccaccagaccagacgacgcacactttatttagcccatgtcactcgcagtccgcaccgggcactgctatagctacgacacacacactgtcacacacggagagatggagagaaaccgtcgcgttcgcgttgtactgaacagtaggcgccagcgcgcgcgacgcgactggcacgccacgcgcgcacgctgagacatcgatctcccgacccgctgtccgccgccgcagtgcgcgtacggcgcacggcctcactcgctggccttctcggccacctcagcggccggctcggccttctcgggctcctcggcagcagcagcctcgggctcagccgccgcgggctcctcggcagtaacagcctcgggctccgcggctgccggttctgcttctgtctcggcagcgggcgctgccgcttcctccttcacctcttcagccgccgccggctccggctccgcctcctttgccgtctcttcctcctttggcgtctcttcctccgccgccacgggggccgcctcgggctcagcggcggcagctggctcggtctccgccggggcagctggctcctccaccttggcctcggcggcgggagcagcctcctcgggcacggcggcgggcggagccggggtctccaccaccggcgcttcctcggtcgccacgacggtcggggtctggacctcggcagtggccatgggtgacgatcagaaggctgatgactacacgaccgagtggctagctactagctagggctagagctagagcagctaaagaatgatcgagctgcaagagtgagcgatcagctgctgatcgggagtgggatcgctcgagctcgagtgaccccggccggcctcgaggtacccaa

SEQ ID NO: 58138 - DNA, 297 bp, Zea mays
  unsure (1)..(297): unsure at all n locations
  Clone ID: MRT4577_153016C.1
caaatcaatactaaacctaccattccactttcctttctcanattcttcaaatacctacctccacctattccttccaatctcctcttaactgccatcacctctctctcttgattcccattcatcctctaccacacctactttattttctctttagatctaccactactaccccaattttaccaacgcccatatctcgtctttcaactaaactattccaatccccactttcatacttctactcaactcccttattctatcattcaactctcttccttattaaacccattttcctcaaat

SEQ ID NO: 58139 - DNA, 261 bp, Zea mays
  Clone ID: MRT4577_153017C.1
cgagcggccgcccgggcaggtacaagcttttttttttttttttttttttttttttttgcttttatttgttaataaaaggaaacttgttttattgttaataatgaggcacacgcgaaggcaggggaacaaaataaacggcacccaggccccaaccaccctaagggggggggccagcacactggccgccggaacgagcgaacccaaacccgggaccaagcgcggccggaccaggggccaagcggcaacccgggggaaaccgaa

SEQ ID NO: 58140 - DNA, 709 bp, Zea mays
  unsure (1)..(709): unsure at all n locations
  Clone ID: MRT4577_153018C.1
aacaactctgcatgactccactagtccaccatccgccgcctccccttgcgggctgcaatggacggggtatttgtgctagagctttagaggcgcgcggcgggggtgcgagtgcgagtgcggccgccgacgcgcgggcgaaggaggcagcgggatggggctgctgtcgaaccgggtggagcggtcggagatcaggcccggcgaccacatctacacctggcgggccgtttacgcctactcccaccacggcatctatgttggaggaagcaaggtggtccattttacgcgaaagaaagaaaccgaaagttcagattcatcagacttcacctccagcttaatctcaggggttccgtcagagtgcccaacattccctgactgtggatttcagctgcccagcagtggcgtcgtcctcacttgcttggactgtttcgtccgcagtggctccctctactgcttcgagtatggggtgccatctgcggttttccttgcaaagcttcgtggggggacctgcaccactgccgaatcagacccaccagaggttgtcgtccatcgagccatgtacttgctccagagggctttggaaattacgatatcttcgaaagactgtgaagactttgcactctactgcaagactgggcttctaccgntcgaaggatcctggcattgggactagtgggcaagcttcttctgcattcggtgtgccggtggcagc

SEQ ID NO: 58141 - DNA, 346 bp, Zea mays
  Clone ID: MRT4577_153019C.1
cgaccgctataagctatggtgcttattcacagcacttaacaacgtactatgatatcagagcactagttaggggtcgagcgcttgctaccgttgttgaaccagccacaagctatagcggtctaccaggacacttgcactgacgactgcaacgttttactactgacatactaggtggaatctaaccaactcgctttgagccatcacgcagcggtctaccaacactgcatcattggtggttgccatcccgatatttcggaacagctgtatgccaataagaaagtgagtggtgtgaggttggtagatctccaataatcagacatgacatttacatgcttactatgtagat

SEQ ID NO: 58142 - DNA, 793 bp, Zea mays
  unsure (1)..(793): unsure at all n locations
  Clone ID: MRT4577_15301C.1
acctcganggccggccgggctaaaaacagctctaacccaagcaccagttctagcagttccagatttctccaaaccttttgttgcctgacaccctggagctaaaggatgtggctgtttaccgatgttctgcttggtgtttagacccgtccttggtgcctgcttcaagggagctttggatcgtcgaacctccctttgccgttgatgggatgtcttctggcaggagaacgctgatgtatccaatccgcatcacattctcgtctgccccacggagggatggatccgatcctaagcttcatgctattacttcgggcggggatggttctggtcacgtgcagcagggatcccctcctttttcaagacctccccattcgagtgggagaaggggagaacatggtcattcgggacgtctctcagttcatgagcgtttgggcccaagagatgagaacatgcagcagcggagcattagctccggggtggcagtttcagatttgaggagaactttggaatctgatggggggaccttgtctcctaggctggtagagatgactgatgacatggttcttgtttcaccggtgaaggcgaagcagctgaaagtttattttcgtcaaagattcaagaatgtcctgaaccaggaggaagctggaactcccaattctgtcactgtgcttcctccatccaccacagacgtggcagctgctgacacagatccatctgagtatcctgtttcagatgntgacgctgtgttggcaactctgtctagaacattaacttccctcctgtctgatgtggcagc

SEQ ID NO: 58143 - DNA, 263 bp, Zea mays
  Clone ID: MRT4577_153020C.1
cggaggcgggcattcatttcattttttttattttctttttcacatataaacaatggcctttaatggccattgtttactccaggggggcggacaaaaaaaaaaaaagtcagccagcaacatcagttgtgctgtctgaatcataggagaactcacagcaaaaaaaggcctatcctcacccaccctttcgggtgacggacaataaaaaaagtgcctttcccctgcgcgtacacattcctgcacggtgagggctgtaaacaaagaga

SEQ ID NO: 58144 - DNA, 280 bp, Zea mays
  Clone ID: MRT4577_153021C.1
atttttatctaacactgaagctatcagctccaactaaacaacatttcagtgggtgaggctgccctaacttccattaagggccatggtctcactggcatcacttattagccatgagaatttggttgtagttttcaggtaggttggagtctgcctcatttgcagcttgttgatacttgttccttattatgtattgccatcccaatcaatttgcagctgccatcattacatatatatttaactgctatatatccgagtgtgatctggatacttagtgatttcc

SEQ ID NO: 58145 - DNA, 354 bp, Zea mays
  Clone ID: MRT4577_153022C.1
tccttacgtacggctcctctccgatacctttacattacactctgctgtgtcctgtgttgtgtcagaccaccttaactgcgtgacggtgtgggattgactggtgacggaacaaacgatgcacctgctctccatgaggctgatattgggcttgcaatgggcattgctggaacccgagtaattggggggggggggggtgtttctaaaaataactagccatgtcattccaattatcacactactgctgagatcttgtactcatcaccgatgtcaaacatcttggaaatttattttttagctatatttattattgccattcatactctgtcactcttctatatttttgtaacatatatg

SEQ ID NO: 58146 - DNA, 267 bp, Zea mays
  Clone ID: MRT4577_153023C.1
caaccaacacgctaaccaaaactcgatcgatccagtgcaccatcgacgccgcagatctgtccagcaaaaatggagcaagtggccggcccgtgcagaaacagcagattattttagccaacatgacgtgcttattaaagccgagggaacatggaatctttcactatgagtattcgctaacaactgaaaaaatatcattatcagaggggggcaactttttctttttgcaatattctttttttttctataaaccgcaggagcagcatcctt

SEQ ID NO: 58147 - DNA, 517 bp, Zea mays
  Clone ID: MRT4577_153024C.1
tatgacgtgtgtatgcacgcggacccggcccggaatccccagagcggcccacccgtccgaccaaatcgcttttttttttttaagcgtctgggatcgcatagaaaagctgatctgggaacaagccaaacaacccagaggctgctagccgagacaggggatagagagagagagaggcgcgcagatggggacaccgtcgccgacgctgtgcaacagcttcaccaaactgcggaacgcctgcataggccacccccgtgggatcgggttctgaacgcccaggaagggattacatgggagggggtcagctcgagtagacaaagtctcaaaaagggacatcagcgagtaccctgcgattatgaccgcaaactttgcgaagcttggcgaacaggtaaaacctgtgaaggtggcaagatgcgactggaataatgtcgatggcatggacggacgctttgagccacacattacaattggaccctcgattgctgatgctctgcggccgaagacatgacattccgttggg

SEQ ID NO: 58148 - DNA, 530 bp, Zea mays
  unsure (1)..(530): unsure at all n locations
  Clone ID: MRT4577_153025C.1
cgagcacaanaggaggagcacagaggccgagaacacccagaaggacggggagcacaaggagggcatcgtggagaagatcaaggacaagatcaccggcgagcacggcgagaagtccggcgagcacaaggacaaggaccacaaggagaagaaggacaagaagaagaagaaggagaagaagcacggcgagggccacgaccatgacggccacagcagcagcagcagcgacagcgactgatctcccccctcgccgcctagctacgccgtgcgcttccatacgcagatgcaggtggaacagatgcctggagtaggatacataccagttgctgatgtaatgtttcacgggtgtcatgcatatgtatgtgctacataatcaagggtgaaaaacgatgaaaaaagaaataacagagagtcagagatagcatgtatggtttgtttgccatgtgatgtgtactactaaaattatggctgcacggtgctagcttgcaataaaatgttaatgcagaaattgatcggtctgctatgcttgcttt

SEQ ID NO: 58149 - DNA, 311 bp, Zea mays
  Clone ID: MRT4577_153026C.1
gcccattattccgggggcagatgaaacagaccaaagcaggtaccccaacggagaggcgaaaagggaaacacgccccctggcacaaatttggttgaaagcaaaggggctggaaacgggcaaaaagggccggaccccgagaaacaaggggccaaataaggtggggctaaaacaaaaacaagggaaacggtttgggggaaaagggtaagggacatacaaaaaaccgcaatgccagagcgaataaaacaagttgaagaaagaacgccccaactggttacagacagaccccaaaaaaggggcattgagggccggaa

SEQ ID NO: 58150 - DNA, 450 bp, Zea mays
  Clone ID: MRT4577_153027C.1
atgttgtcttgtcttttgatacctttaagggatcaaaattaagtgatcaatatatatgaaaccctttatctttctctacacgtaaattctgtaatatttagaacagctggattatgtataaattcatattctaaaaaaaatctttcagaaaaagctgaaccaaacatgttggttggtcagccacacttctgtatttgaaatttgtgggacagttgaaatgagagtttgggttggagcgtgatgaaaagtgctgaaatctggatgagaggctacggcccaaatttgatgcttcggttgtggagttgcaaggctgaaggcgcaatctcaccacaatccctcccggcgccgcccgccggtcgctcccgacgctatgttccgccttcgaaattgcattctttcacatctactttttttgtcccggcgcttctttttctgcatcaccccccttca

SEQ ID NO: 58151 - DNA, 342 bp, Zea mays
  Clone ID: MRT4577_153028C.1
agcaccacaaacccgggggagttttttaaaacattgggggttcaaaccacacccgctagcactaacacaatccgcaaaaaacatatggcttatccataacgccgggcacacgagaatgcaatgcagcaaaattccacacactccccagaaagaagatcaacaagcccttaataccgtcaggtaggcaacaagagctgggataaccaacgtctcccaacaaaaggtgctctctgagcattgaagctgaccgcatcttcagggaggacaccgtcattatcctacatcaactgccctgtgttgaaacgatccttggaggatggcacactcccatctttgcctacc

SEQ ID NO: 58152 - DNA, 512 bp, Zea mays
  Clone ID: MRT4577_153029C.1
ctcatctccaagagcacttatgacattgccgagagcgagaagtcctcggttgatgtgaacaccttccttgaagcgcaggccatctgaaccagttctcttagcccgttctgatccagcaagatctactaagtgtagttgggcgcagagatagtcttcattcatctcttcaataggcattccatctgcagtcatgatggggtctattttgcgcatcttgactggttgttcatgttggtacttccagttgcgcgactgagggaaccttgttcgaggcatgcggccatttccttctgagtggtgacatgcacctcagtggatccagctagcgttatgactccatttgacgcctctcggatctgcacagggggtttccctggcacagacagttttgcgtggccattgccattctctgctttgcccacggtagcagcagtggggtcaagtagatccctcacctcttctttcagaatctcgatgaacgatactcgtaactggaactccacttgggtttt

SEQ ID NO: 58153 - DNA, 322 bp, Zea mays
  Clone ID: MRT4577_15302C.1
acctgggggtgggggtgaggaacctaacccaaactttattttcaagaaaaacacaggaatgcccattcccgaaccatataatgtttacatccaagcaaacatgctcacccattggccctcaactttcctcattaaagacacattcctgaacaacccaacaacccaaaacaaacccggtttattccattcacccattgacagggcaaccgctttaagcaaaaggattcttaagggcatggaccttttggacagaagggctcttcattaaaccaaaccaccaagccttaaaattcgggtaggcgtttaccacaaatgcctgggg

SEQ ID NO: 58154 - DNA, 426 bp, Zea mays
  Clone ID: MRT4577_153030C.1
ggaagaatggcctactgtctactacactcctctcacttgctcaggcctggaccgactactctctctacggctctacctagctagctagccttcctgtagcgcggcagagatggctgcctccaccacggcggcggcggaagccctgctgctgctcctcctggcgctcgccgcggccgcggacatgtggatcgtgctctacggggagcgcagcgacgaggaggcgctgccgatgcacacggagtggatggcggggcacggccggacctacaacgccgactgcgaggaggagcggagggaccagcagtaccgggacaacctgcactacatcgacgcgcacaacgcctacgacgacgcgggcgtacactacttccgcctcggtctcaaccgcttagccgacctcaccaacgaccagtaccgtgccaccta

SEQ ID NO: 58155 - DNA, 1597 bp, Zea mays
  Clone ID: MRT4577_153031C.1
ctagccttgctttgtcctcctccgtctcgctctcgctctccgtctccattcccacccaccaccaaacaccaggcccaaaggaccccccgccttcccaactaagagcaccagcgcagcggggagggggaatcagggcagcaagatccgagcagcaggagtggcaagcagcatttgtagccacagctcgctcactcaattgcagctagccgcggttgcggttggactggatcggcggcagggcagggcagggcagggcgcgcggcggtggtggtagttgcagaagtgacggtcaagttttcctcgctccttgcttcggccgagactccgcctgacgctactaccaacatctccacctgaatccatctctatctacctcgcacgaacgaacagagacaggggaggggagggggggaattgaagtgtaacccatcagacccgtccatccatcggtggtggtggtggtggctgctgttactcgctatcaccatctgctgctgcctgctttagtcttttgcttcacttctcttctttctatccttcctccccctgtctgtttgtctgtcttattgccctccctgttcttgttgctgcttgcattgagaaaagagagagagagagacagagagagatagaaagtggttgctagttgtatggtcgtccggtgggcgcgatgaccatggagcacggcgaggattgctgcgtcaaggtggcggtccacgcgcgccccctcatcggcgacgagaagctgcagggctgtaaggactgcgtcgccgtcgtgccgggcaagccgcaggttcagatcggcagccactccttcaccttcgaccatgtctacggcagcacaggcacgccgtcggcggccatgttcgacgagtgcgtggcgccgctggtcgacggcctcttccagggctacaacgctacggtgctggcatacggccagaccggatcagggaagacgtacaccatgggcactgcctgcaaggaggggtcgcatatcgggatcatcccacgagccatggctgcgctgtttgacaaaattgagaacctgaaaacccaagtggagttccagttacgagtatcgttcatcgagattctgaaagaagaggtgagggatctacttgaccccactgctggtaccgtgggcaaagcagagaatggcaatggccacgcaaaactgtctgtgccagggaaaccccctgtgcagatccgagaggcgtcgaatggagtcataacgctagctggatccactgaggtgcatgtcaccactcagaaggaaatggccgcatgcctcgaacaaggttccctcagtcgcgcaactggaagtaccaacatgaacaaccagtcaagtcgttcccatgccatcttcacaatcacattggagcagatgcgcaaaatagaccccatcatgactgcagatggaatgcctattgaagagatgaatgaagactatctctgtgccaaactacacttagtagatcttgctggatcagaacgggctaagagaactggttcagatggcctgcgcttcaaggaaggtgttcacatcaaccgaggacttctcgctctcggcaatgtcataagtgctcttggagatgag

SEQ ID NO: 58156 - DNA, 3004 bp, Zea mays
  Clone ID: MRT4577_153032C.1
ctacccgcccattctccctctcgctctcgctctcgctctccggctccatttccacccaccgccaaacaccaggcccaaaggaccccccgccttcccaactaagagcaccagcgcaggggggagggggccggagggcagcaagatccgagcagcaggagtggcaagcagcatttgtagccacagctcgctcactcaattgcagctagccgcggttgcggttggactggatcggcggcagggcagggcagggcagggcgcgcggcggtggtggtagttgcagaagtgacggtcaagttttcctcgctccttgcttcggccgagactccgcctgacgctactaccaacatctccacctgaatccatctctatctacctcgcacgaacgaacagagacaggggaggggagggggggaattgaagtgtaacccaaggaaaggaaccatgatggtgtggcaggcggaggaggaggattgatccatccgtcaacccatcagacccgtccatccatcggtggtggtggtggtggctgctgttactcgctatcaccatctgctgctgcctgctttagtcttttgcttcacttctcttctttctatccttcctccccctgtctgtttgtctgtcttattgccctccctgttcttgttgctgcttgcattgagaaaagagagagagagagacagagagagatagaaagtggttgctagttgtatggtcgtccggtgggcgcgatgaccatggagcacggcgaggattgctgcgtcaaggtggcggtccacgcgcgccccctcatcggcgacgagaagctgcagggctgtaaggactgcgtcgccgtcgtgccgggcaagccgcaggttcagatcggcagccactccttcaccttcgaccatgtctacggcagcacaggcacgccgtcggcggccatgttcgacgagtgcgtggcgccgctggtcgacggcctctttcggggctacaacgctacggtgctggcatacggccagagcggatcagcgaagacgtacactacgggcactgcttgccagtaggggtcgcataacgaggtaatcccacgagccacggccgcgctggttgacacaattgagaacctgaaaacccaagtggagttccagttacgagtatcgttcatcgagattctgaaagaagaggtgagggatctacttgaccccactgctggtaccgtgggcaaagcagagaatggcaatggccacgcaaaactgtctgtgccagggaaaccccctgtgcagatccgagaggcgtcgaatggagtcataacgctagctggatccactgaggtgcatgtcaccactcagaaggaaatggccgcatgcctcgaacaaggttccctcagtcgcgcaactggaagtaccaacatgaacaaccagtcaagtcgttcccatgccatcttcacaatcacattggagcagatgcgcaaaatagaccccatcatgactgcagatggaatgcctattgaagagatgaatgaagactatctctgtgccaaactacacttagtagatcttgctggatcagaacgggctaagagaactggttcagatggcctgcgcttcaaggaaggtgttcacatcaaccgaggacttctcgctctcggcaatgtcataagtgctcttggagatgagaaaaaaagaaaagaaggtgctcacgttccttatcgggacagcaagctcacccgtcttttgcaggactccctaggtggaaatagtaagactgtcatgatagcttgcataagtccagcagatattaatgctgaagagacattaaacactttgaaatatgctaaccgggcacgtaatatccaaaacaagccgattgtcaatagaaatcctatcgctgatgagatgaaaagaatgcgccagcaggcattggggccccccgggccggcggggggggtccaacacacgagagctcctcttgtcttgctcagcaatcatatcgcacgagatactattgactccaagtacagaccagtccagtactgttgtacggcctggttccgtggaacagagatgggcaagcaaaagattgtgctcaagttgcccctggatgacgagaggaagaggaggaaggccttcaaggcagctgtgggaatgaacggtgtgacgtccgccacgatggagggcgacaagatcaccgtcgtcggcgatggagtcgaccccatcacgctcacaaccatccttcggcgcagcctcggctacgcggagctgctcagcgtcagctccggcgacgacaagaagaagggcgacgggtacggctacgggagcgccggtggcatgatgtacggtggcggcggatacggtggtggcaaagagggcaaggagagcaaagagagcagcggcggcaagagcagtggcggcggtgggggctacggcggccattaccaggcgatgccgtcggtctcgtaccctgccgcctaccagcagtacaacgccatgccgccctaccccgccgcctactcctatcctgcagcatacccgcagcaagaacaggaccctggatgcagcatcatgtgaaaaaacatcctacaagttaatctgaggagttggttgaaggtggccgaacacatggagatcagattaacatggttgggttcgtccggacaagatgatccatgctgccttgagctgtgcaacagaggatgatgatccaggatgtgatgggcattatcatccgtgtaattatgtacagggttggccagcaaagttgacggattgatctgttggagttggaggtgttggtggaatgggaggcagagctgttccgcaagattatgattcaagtgcagactaagtagcagcaccgatgtttcctttttgtttctttcgtttttggtaaagttgtagtgtttgttgaagaaaaggattgcaataaaattagtgtttatacactaaaaaaaaaaaaaaaaaaaaaaaaaaaaaaaaaaaaaaaaaaaaaaaaaaaaaaaaaaaaaaaaagggggggggggggg

SEQ ID NO: 58157 - DNA, 460 bp, Zea mays
  Clone ID: MRT4577_153033C.1
tctgcgccgtgtcactgttggccctcgcgacgcgttcagggcgggcgggcagagaggatgtagcgtgccgggcgcctggtgccactcatcatcaccagagcggggcgacgtccgggtacagatgggcgaccagatgctgatcctgttcccacaggagacggactgcgagctcctggtggacgccggctactacagcggctgcaacacctcctcctacgtgtccagcttcgacgacagtaggaccggggatacgctccatcgcttaaccgcccacttgttcgtagcggcaacgaggccattttccgttccaactactagctcatcggagggcccctcggctggcgcttgcgtagccggacgctgacctcatatacgcgcccgtgcacaagctgggctacggtcatattaatgtgacgccaactgtccagctggcatccaccccggcttcctcgtccggtgc

SEQ ID NO: 58158 - DNA, 252 bp, Zea mays
  Clone ID: MRT4577_153034C.1
tataatcggcatgcatgagcggctgctgctgtcggcgctgccccatcacgttgccatgtatatgaaagaagacatcaatgagcactccttcaacaatttccagatgaagattgggctgaacatgggcccagtcgtggcatgtgtcatcggggctcggaagccacagtatgacatctggcggacacagtgaatgtctctagtcgtatggacagcacgggtgtccccgaccgattccagggaccacggacctgt

SEQ ID NO: 58159 - DNA, 469 bp, Zea mays
  Clone ID: MRT4577_153035C.1
gggtacctcgaggccggccgggcaccggcatactgactctctcgagaccaatccggagtacctaaagaacgacgccagcgactccggcaacgttaccgacctcaaggacatgcaggttggcgtcggccgccggttccgggggctcaagctctggatggtcatgcgcacctacggcgcggccaagctccaggagcacatccggagcgacgtcgccatggccaagatgttcgaggacgccgtgcgctccgacaaccggttcgaggtcgtggttccgaggaactttgctctcgtgtgcttcaggatcaagccccatggtggaggaataatgacggaggaggacgcggacgaggtcaaccgtgagctcatggagcgcctcaacaggaccgggaaggtttacctcacgaacacggaggtcggagacagatttgtgctccgattcaacgacggcaaataactgaacgaggagagg

SEQ ID NO: 58160 - DNA, 262 bp, Zea mays
  Clone ID: MRT4577_153036C.1
ctcatgccctatttatacacgtaattttatacatgttgtgtaagcctggggccaccggggtccaaggtgtggtcttggggtcctgtaagtcacgacatgacggtgcactgtattgttgacttgggtccgctgattttctgctgagagccgatgtcgaggactaatggatgtccgtactcccgagcccttagaggaggggtcgtccataccgtagttgttgttacaactccgatggattagcttgtgagccactgtgcttctc

SEQ ID NO: 58161 - DNA, 616 bp, Zea mays
  Clone ID: MRT4577_153037C.1
ttcatccatcgctttgtttcgctcgctactctggggtttgtctccgtcgcgctcgccttcctctcttcttacctgtcgccaggtccctccggtctccgcatatctcggctgcggcgagagggtgagacaatacgatggcgcagaaggcttgaaccgggatgcgacatgtctaacgcaggagtggcactgcctatactgtcaggaagagctacaggcacaaaggctacacggttaactaagtgtaacgtaggccgagacgaccagggagaccgcctctacccatgcgtcgacatcgacatacacacgcatatgcaggactaaaacacagacgtgcaagcaaagaaatgaaccgacccgaggtaggagtgctaaacggcgacagccgaagaagcacagacaagctcgatcatgtataccttatgaagctgatgctcctccacggtgaaaaggagaatggtctatccagacacaaaccagagacccaggagggggctgaaggcgatttacgtggcactgtacgctactgatgcaagtgaaatcatactggcacagataaaggtggcggtctcggtaggcttaagagatcatgacatgatggactcataactactactgt

SEQ ID NO: 58162 - DNA, 409 bp, Zea mays
  Clone ID: MRT4577_153038C.1
aatactaaacacttgctacacataatcttactcataaacttgttgcaacacaagagtcttaaggctagacgatacctcatagccaagaccacgctcttaggtcaccagatatgctatctcatgttcagactcgacgtaccctagaactagcatataaactactcgggagaagaatcctcctgcccatcctaatctccctgggacggcctctcaagcttaataccaacatactctttgttgtcaccgagaaccctcctgagctttccaagatcgaacctgggggccctgagtatcatgaccgtgcggatgaacacaccgctgagcgggtagatccttgaagtcgaacttctaatccccttaccaataacatttgggatgaactttgaaacaagtgatttgatgctacatg

SEQ ID NO: 58163 - DNA, 323 bp, Zea mays
  Clone ID: MRT4577_153039C.1
aaaaaaaaaaaaaaaaaaaaaaaaaaaaaaaaaaaaaaaaaaaaaaaaaaacaaaattacggacaccttcatgataaaaaaattaacgttctcttgcttcccccttatataaattttcttttcctccatttacaaccaatttactttctaatacccttacatttaccccaccttataatacttctatcccttaccctttttaaccttccttactttattaacctatttccccctacctaaccttctttccataaaaacccccaccccttcttccttttctttaaatcacccccttctttaccttcttatttcccaccccccct

SEQ ID NO: 58164 - DNA, 578 bp, Zea mays
  Clone ID: MRT4577_15303C.1
cattgggtacctcgaggccggccgggacattttcccctgcaccgaagttccctaaagaagctgtgctcttacatcttcaatggccgctaccaagacttgggattactaatttctccggatgcacccctccaactaggcatatgctgactaatatcctctgcatgtctgaccctacctccgtgacacttctgatttcccaccgcttcatccccggaacagcatcgctcctccactaccgttagtaccagatcaccacccacctgatgatccgatccatgaagttcaagagcctgctgcggcagatctcacattacttctacagcgacctacactactaaactgcccaaggctccccgttgcaggagctagatgaatactaccttagtctgctcttcaaggacacacatcctccgcaccatacacatcatgcgcagcaccgtcatgctcccgagagatccaggattgtccgccgcatgctagaggacaggtgctattgcactacctctgcatgccgtactagtgcccgaacataccatgtattcatgtgctgaatcctgcacttcgcagatactggctac

SEQ ID NO: 58165 - DNA, 949 bp, Zea mays
  unsure (1)..(949): unsure at all n locations
  Clone ID: MRT4577_153040C.1
ctactttttgcatatgcagctaatggattgcatgaaaaagctcatgccatatacatggnatatgaaaaagagaaggacttaaacctaccttagaaacatatacagctttacttgacactcttaggagagcaggtgacacagagaagctaagtggagacatgngaaaactatggttgatgaaaagtttggtggaacacgagtcatattccatatggtaattgattgtttagcaaaacatgggctgtatcttcaggttagggatgttatatatgagtttggaaagatgggcttaaagcctactgtcatgacatataatattttgatgaatgcttatggaagaggtggacaacattacaaattgccccaactcctgaaagagatgacagccctggaactcaaaccagactccattacatattgtacaatgatatatgcatatgcccgtgtccgtgacttctcgagggccttctattaccacaagcagatggttcgaaatgggcaaatacctgatcctaggtcatataaaaagttgttgaatactttggatgtgaaggctgcaagaaagaatataaaggataagagtgccatacaaggaataattaagggcaagtctggcttaaaacctaggaaggaaaagaaagatgagttttggaagaacagaaaaaaacagtctatgctgaaccatggacaccagagaaaagaatttttgtgaagtttatcttatgtgtacattaaattgtgttcaagatttacatcctgtttcatggtcccctggattttcactgttgaaacgttcaagattgagactaaagggttatatacatatgttttagttttctgttctcagtagcctcaatctactttaatgttttgcctttcaacatgatcaactctgaaaactcaaataaatgaacttcatctgtttgttattctttattaaaaaaaaaaa

SEQ ID NO: 58166 - DNA, 295 bp, Zea mays
  Clone ID: MRT4577_153041C.1
gaaacctgattggttatattctaaacaaagcacaaaagaacgaaaactgagcgaattcgttacaggacggcagcagataagttaaacacacaaagactaccgtgtccaaaaccaacatggaaacagtggccaggggcgccgttcacatttattctcagcatacacaaacagaagggttggtttgccaccaaaggccattggttacgaccctccggagggaggcataaaaatcgcggagtactgggctttgaacatgtggcggatcaggtcgacgacccggtagatggagcaaaaa

SEQ ID NO: 58167 - DNA, 381 bp, Zea mays
  Clone ID: MRT4577_153042C.1
ggctccgaacctttgggctgatttatgtgcttgagaccccgatgatggcgctggtgacgaatccacctccttctcggaactcgacctaattggcgaccccgcggataccgatcttgtactattcattcccttcagcgatgacgtaacggaactactaaccattaacctacccgtctggaaccgcctaaccaacggtatcttaagcccagccctcgtaacgaaaggaatatgcgcgaagaagggaactatgataaagccgagtgccctccgggttttcgacgcacatgatttcctcaccatcctcgatctgtatatggcgaaagggtattacatgagcctaatcaaaggcaatcataaacataagattcctaagagtagtag

SEQ ID NO: 58168 - DNA, 157 bp, Zea mays
  Clone ID: MRT4577_153043C.1
gcgggatgatgaggatgtatattttgatgatgaatggggagaggtagtaatctcctaccttcggcttggaaaccaccaagaaagtggctggctttttacaaatttcaactggtttgcatgtgacgaggacaaggcactgaatgatggtttgggttgc

SEQ ID NO: 58169 - DNA, 321 bp, Zea mays
  unsure (1)..(321): unsure at all n locations
  Clone ID: MRT4577_153044C.1
gagagacgacccacgcggccggcaaccagcncccgcgcancaaagacgagcgaggcagcccggagggcaagnccaccagcggcgaggaagacgccacccgcagcagccacggggacgacaagggcgacaaggcccagagcggggacaccgacaggcaggaaagggaccgcgcnagcacgagcgcggacgaccgcagagcaggaggggcgcccggcggcaacgacgacacgcggcacgncacccncgagaacgnggaaaggaggacgagggagcncaaggaccacacggacgccaacaacgggaacangcagggcgggaaca

SEQ ID NO: 58170 - DNA, 895 bp, Zea mays
  Clone ID: MRT4577_153045C.1
cctcgaggccggccgggccggcaactctcggttctcccgtgcctctcgccgtctcgcgtcgcaacgactggccggccgccgggcgccgccgacctacgtgccaaggtccgcatattcggaaccttcgccggcgagcacccaccaggatttttttgtacatctaagatgtacagggcctcgaatttcatacctgatcctaatcaggtgctcctagatgccaaaccattaagatcgttagctccaatgttccctgcccccatgggagtcaatgttaatcagtcaagtacgccaccattggtctgtgtcactccggttggtcaattttcagcagggtttggtgcaggcaccagtgctaatggtgccattgatgccacccctatctctgcatacaaaacaaggtcaaacatatcacttgatggtgatgatgatccttactcgggtaaccaaactgaacggaagcctaggagaggccgacctcccggttctggtcgtgatggctcaaatggtaagttaaagcgccctaagcccacttacaagaattttgttgctggcaaagagcttgcctttctggcagcttcatccgatcccagggatatcgtggaagcagttcacatgacctttgaggcactccggcgaagacatctgcagatggatgaaacacaggacgctagcaggcgtgcagacctgaaggctggtgccatcatgatggcaagtaacatcagggcaaattcgggcaagagggtaggaactgtccctggagttgaaataggggatattttctatttcaggatggagctgtgtgtcattggattgcatgcacctagtatgggaggcattgattacatgactagtaaatttggaaacgatgagatcctgtagccatatgtatcgtttt

SEQ ID NO: 58171 - DNA, 303 bp, Zea mays
  unsure (1)..(303): unsure at all n locations
  Clone ID: MRT4577_153046C.1
tccccgntccggcnagttangcngcnggcggatnaacggtnaanagtcntccgngnagatntccgnngctcccgagacgcatcgcgcnncgccgcncggcgatcctcgctacctgtaaacaggtacagaaccccgagaggaagagtggcgaaatcggtgaagcacaacaacgtcatccccaacgggcacttcaagaagcactggcagaactatgtcaagcatggtcaaccagccgccgcaacagagagcgcatgtcgcanagagctggagtatcccgcgatgtgtcctagcatgtcatgcact

SEQ ID NO: 58172 - DNA, 876 bp, Zea mays
  Clone ID: MRT4577_153047C.1
tccggccggcaaccacactcggttctcccgtgcctctcgccgtctcgcgtcgcaacgactggccggccgccgccgccaccgccgacctacgtgccaaggtccgcatattcggaaccttcgccggcgagcacccaccaggattttttttgtacatctaagatgtacagggcctcgaatttcatacctgatcctaatcaggtgctcctagatgccaaaccattaagatcgttagctccaatgttccctgcccccatgggagtcaatgttaatcagtcaagtacaccaccattggtctgtgtcactccggttggtcaattttcagcagggtttggtgcaggtaaccttcctgcctttggatcgttcactactttcagtgccacttcaaatggtgtttcttatgcaggcaccagtgctaatggtgccattgatgccacccctatctctgcatacaaaacaaggtcaaacatatcacttgatggtgatgatgatccttactcgggtaaccaaactgaacggaagcctaggagaggccgacctcccggttctggtcatgatggctcaaatggtaagttaaagcgccctaagcccacttacaagaattttgttgctggcaaagagcttgcctttctggcagcttcatccgatcccagggatatcgtggaagcagttcacatgacctttgaggcactccggcgaagacatctgcagatggatgaaacacaggacgctagcaggcgtgcagacctgaaggctggtgccatcatgatggcaagtaacatcagggcaaattcgggcaagagggtaggaactgtccctggagttgaaataggagatattttctatttcaggatggagctgtgtgtcattggatggatg

SEQ ID NO: 58173 - DNA, 267 bp, Zea mays
  Clone ID: MRT4577_153048C.1
ggggttgtactatttttttattttatttttttttaaatcgggttggttttttcaccccatcaaaagatatcccaggaacctgccacaacattggtctaatggggccctgcacccaggaacgtaaatttaaaaaaaaaaaaaaacgtctgacgggtgaaaaaaaatctaacgcttttttttagacgaaaaaaatttgaattggtggggcatcccatttattcccaagtggaaaggttcggaaaagaattgaatttccggtggttctga

SEQ ID NO: 58174 - DNA, 398 bp, Zea mays
  Clone ID: MRT4577_153049C.1
gccggccgggtcggacagggagttcatcacgtactctactattagatgacagtgggtgcgcaaccaggagaaggaaacactgaggatcagtcggcagctcatggctctggatgatggtgcgcagttagtctctttgccttcctgcgtgctgtctgtcgggtcttgggcctgtactagtggttaagtaggtataacatactgtattttttaacctgtttcgcagcctcttttggcgtgaagtgtttgcttgcttggttccatgtcattctgtgcccctggtgttcagcgccttagtttagggtatacggtttgtggccggttgcactgttaaacctttgaacttttcgttacgttggtgatgagatttggttcaaaaaaaaaaaaaaaaaaggccccta

SEQ ID NO: 58175 - DNA, 791 bp, Zea mays
  unsure (1)..(791): unsure at all n locations
  Clone ID: MRT4577_15304C.1
cttgcacttcagttgagggtaggtccttgctcctttacagctaggaagggatgctacaaatacttattggatccaaatgaccgagatggtcagttctatggttgtccaggagacagttagccaaattctatccggtctggttcacagctacgagggcaaagaagactcaaatccaaatgataacttggagaggcttgagatggcgcatatcaagctggaggcagctcttgaaacatgcagcaagtggcacgtcactgatttgtcattgctgcgattttggcgcaagaagctgaagcgagctgctaaagagtgtgatgacacgctatataaatacaagaagatgatcctcgaagatgagcagatggaacaggaggcaaggaactacaacataaaattgttcacggaaacgagtacccatcgcttctactatggttggtgccctttgctacggaagagcacagaatagaagcgtgcctggtatttatcaagaaagacagaaatacgctnggaggatgagtttttctttagtgtaatactgcagctttcagaaagacagacatagttgggatcgcagttaagtgctttgcagttgttcccccaccattttcagcccacagttgatactatcaagaaagaacttactcagctgactacacaggacttttcatgggtgccatatgttgatctatggcacagaaaacactgggacaatcctccttaggtttagcactcaatggtctccgccagatccattgtgttgcaagcagcatgatcagcagcatangcttcag

SEQ ID NO: 58176 - DNA, 139 bp, Zea mays
  Clone ID: MRT4577_153050C.1
cgccctctctttttttttttttttggatgccctgagacacggactattacataaatttgtctcaaccccaagagcggatcagagaggctttggcgtcattcatggttcaagatagcatccgatgcccctcaaatgacac

SEQ ID NO: 58177 - DNA, 178 bp, Zea mays
  Clone ID: MRT4577_153051C.1
tttattctggattaattggtttaggtaggcagattctagaactgtctacttaccatatttaccgaaagtttttaggtttagtccgtagtgtttttttaattcgagaaatgctaattttaaattttcattgtaattgggataatatttttgcattggaaaatggcatctatactgcttt

SEQ ID NO: 58178 - DNA, 355 bp, Zea mays
  Clone ID: MRT4577_153052C.1
tcttcctaaaacaaagcctaattaacttatactaaaaaatcctcaaaatcaaactaaacaggaaacaaactgcaaaaacaaaaaacctaacatatacaaaagtccaccccttctaacaaatctaatctaactatccccttccttccaacttaattactcttttttattctcccctaactacaatcaaacgcccttcctttaaaaccttctcaatcggaaaaaccccgtcttctccaaatttatctacttttcatacaatatccatttctctatctacattatcatcaaatactcccttcccaatctcctttcctaatactactcctaccttatctcctattataacccccccttt

SEQ ID NO: 58179 - DNA, 245 bp, Zea mays
  Clone ID: MRT4577_153053C.1
aaaccccgcccgacgcacgcatccacacaataccacacaccttctcacccttattctcccgttccagcgcctcataacatggcacgcccctctttataacaagaccgcgccaccctaccacacctccaccctccaccatctacactatcctccgctcctaccttgtctgactcttctactacaccaacctcttccccactcactccaaccactttaccatcatgcccaagcacatccaactctcc

SEQ ID NO: 58180 - DNA, 405 bp, Zea mays
  Clone ID: MRT4577_153054C.1
aattgggtaccgggccgcccctctacgcggccgctatattttttttttgcttttttaccagaaaacgaaagagagctttgggtgtgtttgtacatagagggggaaaaaatttcctgtccctcccgttccagggagagctgctcgctgagggaggaggaagatccaccgcaagaacccttccaggtctgtgctgggcccaaccaccaccacataaggcacccactgaaagtgcatctcaaaaggcaggccacagaaaggctgacgtggtgagaagagaggaggactaattcccctggaaggcttcttgggcagcacatgaagcagctctgtggaaggatctgttgctgaagatgccctgggaaaactcctcctgggcctgctggaagctggcccctgtccgtcggt

SEQ ID NO: 58181 - DNA, 559 bp, Zea mays
  Clone ID: MRT4577_153055C.1
aaaaaaaaaaaaaaaaaaaaaaaaaaaaaaaaaaaaaaaaaaaaaaaaaaaaaaaaaaaaaaaaaaaaaaaaaaaaaaaaaaaaaaattttactttagaccgaaaccccccttaagggcggatttttgcttgttttccttcccccttgggggccgctttgggcttgcttttcttggggcccatttccccctttttttctgctccttttccgactccattggcccttttttttacaccgcttaatttggtttaacccctggctttccccaccttattggggttgcagcaaatccccctttccccggttggctttttagcaatggggccttccccgttcgcctttcccaccatttggcccgcctgattggccattggcccccccctgtatcggccctttttgcccggggggtgtggtggttccccacagggggcccccttcctttgccggcccccttcccccggctcttttgttttttttcccttccttgctcgccccgtggggcggttttcccggttatgttttaattggggggctccctttcgggtcccggtttagggt

SEQ ID NO: 58182 - DNA, 575 bp, Zea mays
  Clone ID: MRT4577_153056C.1
tttttttttttttttttcggattgaactttattcgtggctatctgagatataagggatacatcatttggcaagtagaacttgtctaggtctctaagtccctaattgtacccgccatcaaccaaattcacatgctggtctatcgactcatccagcttatttgttgctcttggaagaccagatgggagtagctccaccatctctgtacaggacaagatttccgtcgtcttggacagcgacaaaggtcttgttgtcacccttgggggcagcagtgttggtgtgccaagtggccttgccattcttgtcatagatgcagaagttaccgtcgccttgcatgatggcgccctttgcgttgctgatctgctggtcggtgctctgccaggcgcagcggttgttgtagtagatggcgagcttgccatcgtcttgcatgcggagctcgacggagcgatctttgctgaagatgctcatgccgaccatgagccagtcgccgttgtcgagagtgccgtaacccattgtgagtgagtgatgttaagtggttggtcaaaagagttgatgagtgaagatgtgctgatgtgcc

SEQ ID NO: 58183 - DNA, 277 bp, Zea mays
  Clone ID: MRT4577_153057C.1
aaaaaccctataattaaaataaaatagaaaaaaaacattcaaaatctaaaaaaaaagcatgggcaaaaaactcaaacaaaaggggaccttaaaaaaaaactggctcaaaaacggggggggctaacattgaacctaaaaaaggatataacttggggaagcccatgaacttggggggccccaaaacgaacttgagggggtcgttggccctgaagaaaggggcggggttcgaatccttggcccaccattgggtttttttaaaaaaaaaaggacccctggg

SEQ ID NO: 58184 - DNA, 312 bp, Zea mays
  Clone ID: MRT4577_153058C.1
gtctcatagttgtgttaagcttgcgtagaattgcaggtctctgtacgggccagtttctctgccttcttccaggatcaggggttagggtgcaagaagccatttagggcagcaaaacaagtgacatgaagggagggtccctgtgtgtgtgtgtgctgatgtttcctgggtgccctggctccttgcagcagggctgggcctgcgagacccaaggctcactgcagcgcgctcctgacccctccctgcaggggctacgttagcagcccagcacatagcttgcctaatggctttcactctctcttgtgtgttaaatga

SEQ ID NO: 58185 - DNA, 868 bp, Zea mays
  Clone ID: MRT4577_153059C.1
ggccgggccgtctgagtaatcaaatccatcatcatccacgccctggcgaaaccgaaacaccacccaacaggtaccctgccgttcgtcaggcggttcacggccaaggaggtggaggccgccacgcgcggcttcaccgcggtgctcgacgccgccggcacggcctacagggcgcgcttcgccggcggcctcgtcgccaccgtcgtcaggcgccgccgcgacgctgacgccgccgacgccgacgacgaccatcgccagggagagggaggaggaggagggaccacggacgccttctacctggagctgcagctgctggcccgcctcaaccaccgccacgtcgtcaggctgcgcggcttcgcgctagcccaccacgcaaggttcctcgtcttcgatcacatggagaacaggagcctcaaggaatgcctccacgatccgctccggacgccgctggactggcggaccaggctgcaggtcgccattgacgtcgcggcagcactggaatacctctactaccactgcgaccccccggtgttccacgtgtccgtcaactccggcaccgtgctcatggacgccaacttcgtcgccaagctatcggatgtcggcgtggtcagccacgacgtgaggctcgccaccactgactccttccaaggaaccgggtcgagcggaggcgggcgggcctggcgttccagtacggcgtgctggtgctggagctggtgacggggcagtccccgggcgccgacggcgagctcgtgcgctgggcgcaggaccccggctccgccgcctcgtgcaccgggatggtggacgcccgacctcggcggcgtctacgacgcccgcgagctccgcgacctcgtcgccgtcggcaggctctgca

SEQ ID NO: 58186 - DNA, 2117 bp, Zea mays
  Clone ID: MRT4577_15305C.1
gctgcttgagaacgtaagattctacaaggaagaggagaagaatgacccagagtttgcacagaagcttgcctccctagcagatctttatgttaacgatgcatttggaacagcccacagggcgcatgcatcgaccgagggagttacgaaggttcctccaacctccctctccctcgcggcccgcgcggccaccagggcagccgccgccgccgccgccccgctgcgcaggggaggcctcgccacggcgtgccagccggcacggtctctggctttcgcggcgggcgacgcgcggctcgcggtccacgtcgcgtcgcgatgccggcaggcgttctccgggcgtggcacgcgggccatggccaccatggcgaagaagagcgtaggggaactcacggaggccgacctcgaggggaagcgcgtcttcgtgcgcgccgacctcaacgtgccgctcgacgagaaccagaacatcaccgacgacacccgcatccgggccgccatccccaccatccagtacatcctcagcaagggcgccaaggtcatcctctcaagccacttgggtcgccctaagggttttacacccaagtttagcttagctccccttgtaggacggttgtctgagcttcttggcattcaggtgcaaaaagccgacgatgttattggccctgaagttgagaagctggtggcggccttgcccaacggtggggttctgctgcttgagaacgtaagattctacaaggaagaggagaagaatgacccagagtttgcacagaagcttgcctccctagcagatctttatgttaacgatgcatttggaacagcccacagggcgcatgcatcgaccgagggagttaccaagtttttgcagccttctgttgcagggttccttctgcagaaggaactcgactaccttgtcggagctgtttcaagccctaaacgcccttttgctgccatcgtgggtggttcaaaggtgtcatccaagatcggggttattgagtccctgttggagaagtgtgatatccttctcttgggtggtggtatgatcttcacgttttacaaggcacaaggtctccctgttggtgcttcattggtcgaggaagacaaactcgagcttgcaacgtctctacttgcaaaggctaaggaaaagggtgtctcccttatgctgccaaccgatgttgtcattgctgacaagtttgcccctgatgctaacagccagattgttccagcatctgcaattcctgatggttggatgggcctggatattggcccagattctgtcgcttcattcaacgcagccctggatacaaccaagacggtcatctggaacgggcccatgggcgttttcgaatttgacaagttcgctgtaggaaccgaggctgtggcaaagaagctggcagaactcagcggcaagggcgtcacaactatcatcggaggcggagactccgtcgccgccgtcgagaaggtgggagttgctgacgttatgagccacatttccacgggaggtggcgctagcctggaattgttggaaggaaaggagcttccgggagttgttgcgttgaatgaagccgccactgtgactgtatgaagcatgctttcattttgtttcgtcttcgtcttcacgtgccgttgtatacttgctacattctcgcttgcacttgcacctcctcagccgctcgcccgaaatgtaagagaccaatgttttatagagctaatggaaatcgtttgaacaacgacccgcggcaagggggtcacaactatcatcggaggcggagactccgtcgccgccgtcgagaaggtgggagttgctgacgttatgagccacatttccacgggaggtggcgctagcctggaattgttggaaggaaaggagcttccgggagttgttgcgttgaatgaagccgccactgtgactgtatgaagcatgctttcattttgtttcgtcttcgtcttcacgtgccgttgtatacttgctacattctcgcttgcacttgcacctcctcagccgctcgctcgaaatgtaagagaccaatgttttatagagctaatggaaatcgtttgaacaacgacgaccctaatagtatgtgatttaccgagtgttctttcctcggtaacgtaactagtgatat

SEQ ID NO: 58187 - DNA, 1522 bp, Zea mays
  Clone ID: MRT4577_153060C.1
aattcggcacgagggtcgcgtccatccatccatccaccaaccaccaccattgtcatcaccctgctctgcaacttcgagtcacaggcgcggcctctgacaccgcccctccgactccgatcctctgtcgttcggtgacactgacatgggctgctgcctccaccgccgcctctgcctcggcggcacgggtaccctgccgttcgtcaggcggttcacgcccaaggaggtggaggccgccacgcgcggcttcaccgcggtgctcgacgccgccggcacggcctacagggcgcgcttcgccggcggcctcgtcgccaccgtcgtcaggcgccgccgcgacgccgacgacgaccaccaccgccagggagagggaggaggaggagggaccacggacgccttctacctggagctgcagctgctggcccgcctcaaccaccgccacgtcgtcaggctgcgcggcttcgcgctagcccaccacgcaaggttcctcgtcttcgatcacatggagaacaggagcctcaaggaatgcctccacgatccgctccggacgccgctggactggcggaccaggctgcaggtcgccattgacgtcgcggcagcactggaatacctctactaccactgcgaccccccggtgttccacgtgtccgtcaactccggcaccgtgctcatggacgccaacttcgtcgccaagctatcggatgtcggcgtggtcagccacgacgtgaggctcgccaccactgactccttccaaggtctctctatccgctccccaactcctcccaccccccacgacgtggccgcgctcacctatcttcttgctgcgttgttcgctcgcctgtgcctgtgctgtgcatgcagaccgggtcgagcggaggcgggcgggcctggcgttccagtacggcgtgctggtgctggagctggtgacggggcagtccccgggcgccgacggcgagctcgtgcgctgggcgcaggaccccggctccgccgcctccgtgcaccggatggtggacgccgacctcggcggcgtctacggcgcccgcgagctccgcgacctcgtcgccgtcgccaggctctgcaccagggacagggacgacagggacgagggcgctggcgtcgtcaccattccgcagatcgtcaggtacctccaggggaagctggagcggatcggatgccaggccaggttcggatgatgatgatgacggtgatggttcgcctgcgttgcgtgcgcgggcgatcagcgtatcatcatcgtctttgttcttctttaacagcctgtctgtaccatcaaatgtacaaaagcgcgtggcttttcttctgtggatgcccagaatctgttggtgtcgatcagtcgatagaggaaccaaagtgagttgctgactgcaattggaagcggagtgcagttttctcttctgatggacatttttttcgagatgttttgctgtgctttttgtgacgtgacaagaacagagattgccatggcagttttgaatctgagttctgagatgatagaaaacatgttctgctc

SEQ ID NO: 58188 - DNA, 708 bp, Zea mays
  Clone ID: MRT4577_153061C.1
ctctccgtctgcgtcgaccggaaacggcggggcagttcccgactgcgactgtcctcttctctctcctccgcgaccgctctctcttgaccggagtcagagtctcgagtgcagccgactcgccgtcttctccgcttgcccgtgccgccatggatggggtttcgacggagcctcgccacccgctcctgcaggccgttctggacggcgacctccgcctcctcaaagagatggcgggcgtcgtggcggcggacgtcggcgtctgggcgcgcgcgctgactgtggcggtcatggaagggcggctggacatctgtaggtgcctcgtcgaggaccacggcgtcgatgtcaaccagcgcaccttcacaggtgacactcctttggccatctctgcgacttatgggacgcctgccatcacgagatatcttctggatcgtggtgctgatccaactttagccggtgccctgtggccacctcttcatgctgctgcaagttttggacaatgtgaaatagtggaactgctgctttcaactggaattgatgtggatcatttcgattctgagtatgggaccgcattgcatgttgccgctactaatgctcaagatggttcaatgaatattttgttgcagcatcgtgcagatcctaataaggtttaccgccttgatagtaccccgttaaggctggccatgatttctgaatcgctggaatgtgtgaagc

SEQ ID NO: 58189 - DNA, 481 bp, Zea mays
  Clone ID: MRT4577_153062C.1
ggggggaagccaggttttttttaaccaccaattacttgggccaatcgcttcccaatttttatcaatttaggggggggggggggggaaaactgtttttgggaacccccattgccttccccccgccggctcccccctttttttttaaaaaaaggaaaaaggtccttccccccccctcagtttaaggggtaacccttagggaacccgctcccccaccgggtttttgataatgcctttgcctgccaaaaataaccggccgggccggggtgggaacttttttgcccacaaccgccccggggggcttcaagcccggggctgggtgccttatccccggggggggccggctttggggggccccccatcggcccccttattttttcggcccgggacttggggggcttgggcagcttggcccccaacttgccccaggggggagccccaacccttttattaagggggttgggggggacatacaccttttttt

SEQ ID NO: 58190 - DNA, 546 bp, Zea mays
  unsure (1)..(546): unsure at all n locations
  Clone ID: MRT4577_153063C.1
ccagtgtgaaatggataactctgcagaaagttcnngcccttaagcccgtggtccgnncggcccgagggtacaaagacnntttttttatttatttatttattattctttttcttttcttttctttttattttttttttttttttttttttcttttttttgggtaatgtccccaggccggccgccaagaggggggggaccagggccaggggggccacctgcgggaaaaagggagccgcacacaagggcacacaaaatcgggagccacggaaacggtacacccagaagacatggggcccccaaaagagagaccaaaaacacaggaaccaaaaggagcaaactaaaaaccgggaagaaaaaaagacaaaccggccagccccaaaaaggaaaaccccaacgcgcaaagagaggaagcaaaaaccccgagcgccagggggaaaactcggtcagagacaccctgggaaaaggcggccaaaacgggggagcgggatccgcccactcagaggcggaaatccgggtacccacaaaagagggggggaacgcgggaac

SEQ ID NO: 58191 - DNA, 294 bp, Zea mays
  Clone ID: MRT4577_153064C.1
gcactcttgcactgaacacttgattgccgcggttaataaccccctagctgaatcacaatggatcggagcattttccatgggtccagtggccaccacacgacggtgactacgacgaacgcgggcgctcctgtgtggaacgacaacgaggcgctgactgtggggcctcgcggtcccatcctgctggaggactaccacctgatcgagaaggtggcgcacttcgcgcgcgagcacatcccggagcgcttggtgcacgcacacagtgccttcaccaaagactacttcaagtgcacccac

SEQ ID NO: 58192 - DNA, 299 bp, Zea mays
  Clone ID: MRT4577_153065C.1
gttgccgtaaccgccgccaggttgcgcacgccgtagacgacgtcactacaccgtagccgtcggctgcaccagcgtatatgtcatatatggatacatgatggcgatagctacaacgttctggtcaacggcatgaatggtttatacatggtctcgacgttgctcatctttgtgggggggggggggggtatacctataaatccttttctagcattgtggaaaaaaggtgatgctttccttgtgaatgatcttatggtgccttattatgttactctctatatctgttttcatttgcaaaatat

SEQ ID NO: 58193 - DNA, 1168 bp, Zea mays
  Clone ID: MRT4577_153067C.1
cattgggtacctcgaggcccggccggaaatctcattcctctcctctctcctccccccctctcgctcgagctctgttggaggcaggagggcaggccagggcgccaggccaggcgaggtggttcggttgacgagttcttcctcttcctcgacatcgccgatcccgccacgcgctgcccgcagcggaggtgagacacaataatcttaggtgaggagcatagttcaaaagtcaagatagaaagggcattggacactggaggaacgttgtgttggtggtaactgaggtttgtgcttgtttgtagatggagaggttaagcaccaaccagctctacagttctggtgttcctgtaaccgtaccaacatctctgccttgtataccagtctctctggatgagagcttcccgaggcttcccgatgcacagagtgttttgatggagagagaattgaggagcactccactaccacctcaccagacaactgttgctcctatccgtggtctgtttcactccaatactggatctgttggtcctttgtgctcacctccgtctgtaaggttctcttcgcattcaaatcctgagcaataccccaaccacaattcatacaattctcaagtaccaagcactgcaagttcctcaacgctgaattatgggtcacaatatggaggctttgaaccatccataaccgatttcccaagagacattgaaccaacttggtgccccgatccagttgagagcattcttggatactctggtgatgtccctgctgggaataatttgactgggaccacttctattggagcttcagatgatcttactaagcaaactgaatggtggacagagtttatgaatgaggattggaaggacatggttgataacccgacttccacagaaactcaaccggttgggcaacctgtgcaatcatccaactcagttcaccaatcagctacccaacaaacagtttcatctcaatctgttgaaccgttggcagttgtacctcacccactgctggctccaatactggcaagcacgcatgagatggactcctgagcttcacgagcgctttgtggatgttttcattataccttgtttgtattgatatgatataacaaatctacacttgaaatcttaaaaaaaaaaaaaaaaaactcctaagggtgtcctgaagctaatga

SEQ ID NO: 58194 - DNA, 235 bp, Zea mays
  unsure (1)..(235): unsure at all n locations
  Clone ID: MRT4577_153068C.1
tcgagagtcggagnnttgttgggnnttgggctcccatgctgggtgctanctccggttgtttggtggtggtaccatttctctccagctcggtgtgtctcagttttggatatcttagnntattgaagnggtttatgagagattggtagaatgnattataattcctatataatatcaaataactctttatttattcaataatataaaatataatataatattttaaaattaatttact

SEQ ID NO: 58195 - DNA, 311 bp, Zea mays
  Clone ID: MRT4577_153069C.1
cccgcccgactttgcccgctgtttttaaaagaccaatccctgcataactcattcaggcgaaaaaatggctggccttggggcacaagaacctggggggggcacaaaaaacgggcaattttgagggaataaatgtctggggccatcgacgggctggaaatgaaatcaggccaaccggggaagactggctgttttcaagccatgattttggcccacctcacataaggggtggccacaaccttccggacatttaaaagggtttcagggggggcggggaaaatttcctccggtttaaaatcctcaaagataatggg

SEQ ID NO: 58196 - DNA, 220 bp, Zea mays
  Clone ID: MRT4577_15306C.1
gcatcagggccctcttctattccactctcccagaacccatgtttcattacttgtcactgccctaaacacaccctttcactccctgaatcaagatcatggtgaccacttaggtcgactgctcacctcaccgtggtcaacccattcagtgagcacctagaagaaagaattgaagtggaagtggaagaggagtcaactcctcaatctaaggttcctccaactg

SEQ ID NO: 58197 - DNA, 439 bp, Zea mays
  Clone ID: MRT4577_153070C.1
agataattggaagctgcttcagcttcttgactgtgtcttacactagtaaatttcttgtctacatcatgatacattaataccttcttaaaatctatactgcatggtactttatataaattactttgattgtatacattatctaaataatacactaaaggtaaaaaaacgatttttttatgaattcagttaattcgtatatatacaaaaataaagtaagaaatgtgattaagtttgaaatgttagttttacgattgtgccacttggtttatgaatatctgtgtatgtacttttaagagtaaaacaacagcatgttaaggcctaagtgcatctaagttattctatatttattgatcataattaacaataaaacacgaggaagctgcaaattgtttcattattttcttcttcgtccgatgtagcattccatttatgtgtgctc

SEQ ID NO: 58198 - DNA, 120 bp, Zea mays
  Clone ID: MRT4577_153071C.1
aaccgcagcgacgcgatatcccaaaccagtagcggttgatccgcgtctcctcttatcctcacataggccagaactcgcacgcatcccctcccaaaattctccacggtcgcaactcgcaac

SEQ ID NO: 58199 - DNA, 287 bp, Zea mays
  Clone ID: MRT4577_153072C.1
ctcgtccagtcgtccggcggtcggcctaagacagctgcccagcgcccagcagccgcgacaaaccagcgcaacgccccacgacggagccagcgcccagcgactgagccgcgacggagccagcagcccagcgcctaagcccgaagttccggtttcttgccttcgtggtaagttcatcctagataagaacatgcattgtcctatcacagtcatgttacgtagctagctcttcttgctattcgtttccagttgattggatctcttgtctttgtcatgttgtccccatcgac

SEQ ID NO: 58200 - DNA, 333 bp, Zea mays
  Clone ID: MRT4577_153073C.1
ctgggttgtgtttaaatgatgaattacgacatctttataatcatttcctgctagaatcagcagaatggaaattcaaatgcacctttttgtttagacgaaattcaaatacagaaacctgacagtgagaacaaatatccttatgcataacaacggtagtgccagtgtgccattatacaggaacattgcactaatccttcctcagttcaatgcactctcggtgtgtgccaaagctgtgaatgaccacaagttttaatttatctccagtgtatatgtctcgatcagtggctgatgcaaaaacgtccttcaccagatcaaccgcatgagattcagaca

SEQ ID NO: 58201 - DNA, 359 bp, Zea mays
  Clone ID: MRT4577_153074C.1
tcgccacatcaatcatccagcacgcctgcaatggtagtctacatctctatttagtttgcccattcacccgttctttatggtcacaagtgttatcttgtaacgacactgaactgccctgtacagattctccatcaagtccaagattgagagtgggcacatgagtcgttaacatatatatacctctgcaaacacctgctttccaatgtcgatgcacatacatgtaacccactgcagattctggccatccttgtcttccttagaagcccctagtcttctagccttatattctgaatacgtgagacaagcggccaatcctcgcccactccttcactgcaacgcctaagcaagtcacggttgcc

SEQ ID NO: 58202 - DNA, 327 bp, Zea mays
  Clone ID: MRT4577_153075C.1
aattcggcacgaggggcatgccggacgggacagccctacatcctgcagaccaacgcgttcaccggggggatgggcgaccgatagcagcggatctagcgctggatggaccccagcaaggagtaccactcctactaggggctctggagcctctacatgatcgtgttcttgatgggggaggtgacaactccgattgttcagagagaccgagctccgacctgcgacgagcggtgcccgctcagccggccaaagaagctctactccaagctgtggaacgccgacgactgggccagccgtagaggccgctagaagacggactggaccaacgcg

SEQ ID NO: 58203 - DNA, 371 bp, Zea mays
  Clone ID: MRT4577_153076C.1
cccacgcgtccggtcttctccatccggtgttcgattgtgcgctgtcgcaacctctgtcgggactgccctttctcagtccgcttctacatctgcagtgagacgcgtattgaatctcatcgaatccatgggcagctactcgaataccaacacaagcggcggggccagcgacaaggaggacaagaacgaggacaaggtctaaggcaaggactcgtcgaagccatacttcaaggagaacgaatgggtcctcgcctaccactgccacgtcctctacgaggccaacgttcacaggatcgaagaccatgaatacgaatggcactactttggccattatctcagctggaataagaactgggatgaatgccttgcaaatg

SEQ ID NO: 58204 - DNA, 444 bp, Zea mays
  unsure (1)..(444): unsure at all n locations
  Clone ID: MRT4577_153077C.1
caccgtgtccctgatttctggaatatgttatatgcaaagtactgaccatgaacagaaaccaaacgtgtctgtcttttattttattttttattaataaactctgggctactatattttgtggaaaagaatcttgctgtgtgttagttttttatttcctgcaggttgcaatattccctagagtgcatccaaccaagcgttttaggacatatttggaatcaatgaatcatagagatttatgtctgttcttgtaaaattattttggcattcgtgtgttatctgatgcacgggtatagatgttagatgaggctatgaattttagccacaaagaaatattggtagattgttcataaaaaaatatttcacaatggtatatttctcctttcattttcccctgctgtaaaaagatcatggttcacaatggatgccgctttgtnacccannana

SEQ ID NO: 58205 - DNA, 272 bp, Zea mays
  Clone ID: MRT4577_153078C.1
gaatcacaagatgctggacaacctgtggtactacgtggtggtcgggactcgtctggagacgggcttctagaagctcgcacatggccaccaccgcccgcccgttcgtgatcaacaaagacgctgacggcggcagctacaaacgggcgcagtatatgccgtaaaccccgacgacgccggtgacaggcgcttttctccttcgtcgcggtacacgagagccggttgacgctgggccacgaactgacgtgggcgcgctacttgcgctccgcccggtg

SEQ ID NO: 58206 - DNA, 243 bp, Zea mays
  Clone ID: MRT4577_153079C.1
cagatcgttcgtccactcttccccgtctacttgtactatatacacacatacggtgaattatacagttatctttctgacaacctccttacataccaaaacccacgtgaaacccatcttaatcgacttcctacacatacccttttacctaaatgccataataaagaataaccccctacccatctctcttcacaacattttaacatcctgaatttctaatgtgactctccctttatcatcgcatta

SEQ ID NO: 58207 - DNA, 526 bp, Zea mays
  unsure (1)..(526): unsure at all n locations
  Clone ID: MRT4577_15307C.1
cgcctgcaggttccggtccggaattcccgggtcgaccacgcgtccggacggacgcacggactgggacccgggcagtgtggagatataaccctgcaggcagtcgcaggcgagccgaagcgaagcaaagctatggccctgagcgatctggtgctgctgcgatggctgcgggacagccgccactcgcgcaagctgatcctgttcatcgtgttcctcgcgctgctgctagacaacatgctgctcaccgtcgtagttcccatcattcccagctacctgtacagcattaagcacgagaaaaatactacggaaatccacactgccaggccagcgctcacagcctccacttgcgaaagcttccacagcatcttctcttactatgacaactctactgcgtgcacggcgaatgccacggngggcctcccaggaggggacgcacccaaggctaccaccacacagcacactgcgaccaacacgactgtncctcccgactgccccggtgaagacaacgaccttctaaatgagactgcgc

SEQ ID NO: 58208 - DNA, 369 bp, Zea mays
  Clone ID: MRT4577_153080C.1
ccgacgcgtgcgcgcaagagttcgaaatgagcgctaagaggatgctattgctgcccttgagtctgcagaacttacagattagataggagctgatcatgaaaacggagatcatcgaacctataaggtgaatgaagcaattgcagcatgtaatagagctgaatgacgctggtgttaaaaatcgggatcctatatgtgatggcagtcatcaatacaaagcatctggacacatgatgtacagcaacgcacgctatctgggagctaccactgagctgttaccaaacatttctgcctacctattagcaacaagctgtgagtaggatgtaaccaactgtgtaaactgaaccgtgctgctgatgtgcagcatcaact

SEQ ID NO: 58209 - DNA, 321 bp, Zea mays
  Clone ID: MRT4577_153081C.1
tcttttttcttttatataatgggaggagttctgggtggggttgaacaagatgcacacaggctatgccagcatagccctggggtgtagcttcgacgaatgcgatggtgaaaaaatctttgaagatcagatgtcacatggcaaaaatgtcatagctagctcataaggaattgctgaacagtgcttataggggactgagtgctatggcctgcttgtggtctggtaacacaaatatgaaacttgcttgggagacctgaataccacctgacatatgtcagacaccgaagtactaaaaactctaatggcgtgtattccgcggggata

SEQ ID NO: 58210 - DNA, 1574 bp, Zea mays
  Clone ID: MRT4577_153082C.1
acggtcggaagtctaattttagtaactgcctcccatctcatgcgttcgaggacaagccgaaaaggagaaagtaccccgttccgtcggccgcagtgccgcacctgcacccaccgcacgccgagtcacgccccccctggaccagccaacgtgacactccaccgccgccggcgccgcggcagcccgtagcaaccgccaccgcctgcccatctcctctctatcccgcgccgcatggccgcgtacttcaaccactcctcgtcctacccgccgccgcctcccccgccgggcacttccccgtacggcgcgtaccgccacgcctacccgccggcgccggcacccccggccgcttacggcgcctactacgaccgcgcagagcaggccctcccggcgcgggacgaggtccgcaccctcttcatcgctggcctccccgccgacgccaagccgcgcgaagtctacaacctcttccgcgatttccccggatacgtctcctcccacctccgcacgggcaaatcctctcaggcgtatgcgtttgctgtgtttgcagatcaacagtctgcactagctgccttgagtgccacaaatggaatggtatttgatcttgagaaaaattgttctcttcatgtagatctcgcaaaatccaattccagatcaaagcgcttgagatcagatgatacttcaccttattctcctgaaaaaagaaataggaaaccaaggggatttcctgattcaggtgctggaagcaatatttacatatctggaatgggtagtacttcacacagcttgagtggttatccttctgcacaaagttacacaagccttgagtctagtacttctctcagcaaggacccatccacatttgcccctcaaaataatcctccatgccctactctttttgttgcgaacctggctccagcttgttcagagcaagagctgatagatgttttctcaagttgtgcgggatttgtgaaactcaagatgcaaaacaagcttggagctccagttgcatttgttgatttcaaggatgcaatcagttcaactgaagccataaatcgtctccaaggagttatcctgtactcatcatctggcgagggaatgcgtttagaatatgcaaaatcacggatgggccttcggaagcgtgataagcacccctaagtgcagctgaaagacgacacggcagttgtattttcattcagcacaagcggcagctgagcatgctcaatgatgtctaatagcagacgacctgtcctgacacctgagtccaatgtcatcttcatgcagcgaacgttttgctcatgagttaggctatgaggtccttcagctgcgtaacattatgttacttggtctggttgtatcacttattattacatgtgcacctctttttttcctccttcggaccttgcctcctagtcatcttcagattttaagctaggattatcccttatttacagttgagttattattagaatctattgtgcctgaaaggatcaatctgaactatcaatctgaacgagagggtgaattagttttttctactaaaaaaaaaaaaaaaaaaaaaaaactcgagagagggtcgcggt

SEQ ID NO: 58211 - DNA, 1053 bp, Zea mays
  Clone ID: MRT4577_153083C.1
accctactaaatgttatatcagtaacttcatatcctcaatgaagtgcctctttactcacatagctgaaaattcttacaaagcactcatcttgcacatctttggcacactttgcgccctatcaggtgctggaagcaatatttacatatctggaatgggtagtacttcacacagcttgagtggttatccttctgcacaaagttacacaagccttgagtctagtgcttctctcagcaaggacccatccacatttgcccctcaaaataatcctccatgccctactctttttgttgcgaacctggctccagcttgttcagagcaacagctgatagatgttttctcaagttgtgcgggatttgtgaaactcaagatgcaaaacaagcttggagctccagttgcatttgttgatttcaaggcagatatgggaaaaatgatttcttaaaaattaagccaagaagacttcttaaaccttgagatggtatttgctctagtgaagcaggttatgaaaggagaacatgtattacaatatcattgcatcattatatagttaattccaattatctcagtttggcatgttaaacaatcaagatgaactcaatcaattaaggatgcaatcagttcaactgaagccataaatcgtctccaaggagttatcctgtactcatcatctggcgagggaatgcgtttagaatatgcaaaatcacggatgggccttcggaagcgtgataagcacccctaagtgcagctgaaagacgacacggcagttgtattttcattcagcacaagcggcagctgagcatgctcaatgatgtctaatagcagacgacctgtcctgacacctgagtccaatgtcatcttcatgcagcgaacgttttgctcatgagttaggctatgaggtccttcagctgcgtagcattatgttacttggtctggttgtatcacttattattacatgtgcacctctttttttcctccttcggaccttgcctcctagtcatcttcagattttaagctaggattatcccttatttacagttggagttattattagaatc

SEQ ID NO: 58212 - DNA, 791 bp, Zea mays
  unsure (1)..(791): unsure at all n locations
  Clone ID: MRT4577_153084C.1
gccgaaaaggagaaagtaccccgttccgtcggccgcacctgcactgtacccaccggacgccgagtcacgcccaccctggaccagccaacatgacactccaccgccgccggcgccgcggaagcccgtagcaaccgtcaccgcctgcccatattctctctatcccgcgccgcatggccgcgtacttcaaccactcctcgtactacccgacgccgcctcccccgccgggcactgccccgtacggtgcgtaccggcacgcctacccgtcggggccggcacccccggccggttacggtgcctactacgaccgcgcagagcaggccctcccggcgcgggacgaggtgcgcaccctcttcatggctggcctacccgccgacgccaagccgagcgaagtctacaacctcttacgcgatttccccggatacgtctcctcccacctccgcacgggcaaatcctctcaggcgtatgcgtttgctgtgtttgcagatcaacagtctgcactagctgccttgagtgccacaaatggaatggtatttgatcttgagaaaaattgttctcttcatgtagatctcgcaaaatccaattccagatcaaagcgcttgagatcagatgatacttcaccttattctcctgaaaaaagaaataggaaaccaaggggatttcctgattcangtatgactcaagtagctttttgggcagaatggcatgaaagaaaccatctgtattttcacaccacgaagatcttggtgcttacagcttatgggaggtccactacaatcacttgaacatataag

SEQ ID NO: 58213 - DNA, 1545 bp, Zea mays
  unsure (1)..(1545): unsure at all n locations
  Clone ID: MRT4577_153085C.1
gggaaaaaaanaaaaaaaaaaaaaaaaaaaaaaaaaaaaaaaaaaaaaaaaaaaaaaaaaaaaaaaaaaaaaaaaaaaaaaaaaaaagatgtttggccggccgcgcggccgatgattgtttgttttctaagctcgttcgccctctctcttctctccgtccaacgacggcgcgattcagatccaggcatacaggccatccttccgccgccgcggactgcgcctaatcttccttctccagcagccgggcgttcccgtcgtcctcgatcgtcccctggactggatcgcaacggagatccagccggacctgcggtggtcccttccttttctcgatagcataatgagctcgccagtggagaggtgattcgtcaggctggtatcaagttcctagtccatggtgcctggatgagcagtagagatgctactggccgtggaaggaggagggttcttctcgtcttcagctacaggttacagccatggcctcgccctcttgctgctcggacgcaaagctgaggagaagcccgtcaaggtttcgccgtggaaccagtaccggctagtcgaccgggaggccgagcaggtgtaccacctgccctccgccaaggaccaggctcctgggaaatgtgctccctttgtctgcttcggatgcacggctaatggcctcgaggtggcgtctccttccaaagcggtctccagcaatgcgctcggtaggggtacctcacaggaagaagcatcttgttcagcacacaaggcgttgacaactagtgcttccatcagtggcagtgagagacgtggctgtcttaagagcaactccaaaagggattctttggagcaccgtatagtggtgagcgagggggaagaaccgcgtgagtctttggaagaggtgcaaaccttgagatctagcatagaacggaggaaagttcagtggacagatacatgtggaaaggatctttttgagataagggagtttgaaacaagcgacgagagtctgtcagatgatgacccagaaaatgaaggtttccggaaatgtgagtgtgtgattcagtagatttcttgtgtgcacaacaagcctgacaggaacatctcctcatgggaagcccatgtcctgctgagaaggacatgccatatgttcttctgggaaggatatgccacacccagtgatttcattgcaactggaacgatcgatgacagtcgaaacaaagcaaacggtgatgaatcgatattgtgctagattatttgttggttctacgcttaactagtctgctcggcagggttatagtttcgatgcccacctgtacaataccaagatcccattcctttctttttgttgtcatgttttgtttctctgactttccatcacctttttcacgcccgctgtaccatatgaggctgccctgttacttctgccatggatggtggatccctgacttcatgctgttcccttttgttttgcccctaacgtgttgagtgatgtcttgttgacattttcgtccaaattggtaaaattcatttttcgttcaaaaaaaaagtcgacgcggccgcgaattcgga

SEQ ID NO: 58214 - DNA, 302 bp, Zea mays
  Clone ID: MRT4577_153086C.1
tcacagatggtagatgaacagatggagtaatgttttatagagtagtaagacatctaagatcgtagatgaacggagggagtaatgttttgtagcgagtagtaggacgtcgcagatcatagatgaaatggagggagtaatgttttttagtgagtagtagaacatcctgtaagttgattgcagtgttatcaagttgtctgattaatcgcgattaatcagactgattggtcccatgactccaattatattccctgactcaatttgtttgaccagatttcatggttgtcccacctatcatgattagt

SEQ ID NO: 58215 - DNA, 330 bp, Zea mays
  Clone ID: MRT4577_153087C.1
atggaggtctcagacatggaacttaatgagactagtgttgaaatcatttggatattcatggttgttgaaaaaatggttatgagatacctcatcatcagcgatggggtgactcgaagtgacgtgaaatgtctctcgaggtttcagatgattgagctagtctacaaaaatggtgttgagcaaagttgcaaccatggtgaagatggtaatgaatacaagttagagatgctcaagcttagagtgaacatgaacaaaatggagttaggagaaatcctagaggcagagatatatcaattgtgctttgcttttgttggtcaaggtgcatatagatag

SEQ ID NO: 58216 - DNA, 1309 bp, Zea mays
  Clone ID: MRT4577_153088C.1
cattgggtacctcgaggccggccgggccgcgatccagatccagccaggtacttccgccgccgcgtactgcgcctatcttgcttctccggcggacgggcgtacccatcgtcctcgatcatcccccggactggatcggaacggagatccagccggacctgcggtgatcccttccttttctcggatagtatagtgagctagccaatgaagaggtaaaattcgtcaggcttgtatcaagttagtagttcatggtgcctggatgagcagtagagatgctactggccgtggaaggaggagggttcttctcgtcttcagcttcggggtacagccatggccttgctctcttgctactcggacggaaagctgaggagaagcccgtcaaggcttcgccgtggaaccagtaccggctagtcgaccgggaggccgagcaggtgtaccacctgccctccgccaaggatcaggcgcctgggaaatgtgctccctttgtctgtttcggatgcacggctaatggcctcgaggtggcgtctccttccaaagcggtctccagcaatgcgctcggtaggggtacctcacaggaagaagcatcttgttcagcacacaaggcgttgacaactagtgcttccatcagtggcagtgagagacgtggctgtcttaagagcaactccaaaagggattctttggagcaccgtatagtggtgagcgagggcgaagaaccacgcgagtctgtggaagaggtgcagaccttgagatctagcatagaacggaggaaagttcagtggacagatacatgtggaaaggagctttttgagataagggagtttgaaacaagcgacgagggcctgtcggatgatgatgcagaaaacgatggtttccggaaatgtgaatgtgtgattcagtagatttcatctctgcacaacaagcctgacagaaacatctcatgggaagcctgtcctgctgggaaagatgtgccacggagactactttgccactgaaatgatcgacgacagtcgaaacaaaacaaacagtcatgaatcgatatcgtgctagattatttgttggttatatgcttaactagtctgctcagcagggttatagtttcgatgcccacctgtacaatatcaagatcccctttctttcttttctgtcacattttatttttctcgctttccattgtgttttcacgcccgctgtaccatatgaggctgccatgttacctcctccagggattttggatccctgaattcatgctgttccattttgttttgctcctgacgtatttaaaaaaaaaaaaaaaaagcggtggcttgttgat

SEQ ID NO: 58217 - DNA, 283 bp, Zea mays
  Clone ID: MRT4577_153089C.1
cccacgcgtccggtacgctgtctgccctgggcgcctggcctttgctgctgctagctgcaacctgcaatgctcgtttgcgtgtctcacggccgccgccgccgcttaacataatcgttttaattggtttggttttgttgattagcacggacgaacaacaggcaagtaagagctcttcaatcaattcaagctgtacccggagaggcttattaaattctaataatgcttattctttcttccaaaaaaaaaaaaaaaaaaataaaaatggaacagttacaaagaaatt

SEQ ID NO: 58218 - DNA, 300 bp, Zea mays
  Clone ID: MRT4577_15308C.1
ggcaaaccaatgccatggactttgggtaccaattttttcaggactcaaatgggaagcatggcccttgcctatcctaaatgggggacatttttttggactcgctggtaataaactccctttcggagtcgaacgatatggaccacaactggttcgtggagggcctcctgaacctcctaatgctcttctcctccattctgggagccaaaattcagtatcacattgaacccaaagtggcccccattattacggtgccaattgccattgaacaccaagccagccacttgttgttttggaccaaaa

SEQ ID NO: 58219 - DNA, 1378 bp, Zea mays
  Clone ID: MRT4577_153090C.1
tctcttctctccgtccaacgacggcgcgattcagatccaggcatacaggccatccttccgccgccgcggactgcacctaatcttccttctccagcagccgggcgttcccgtcgtcctcgatcgtcccctggactggatcgcaacggagatccagctggacctgcggtggtcccttccttttctcgatagcataatgagctcgccagtggagaggtgattcgtcaggctggtatcaagttcctagtccatggtgcctggatgagcagtagagatgctactggccgtggaaggaggagggttcttctcgtcttcagctacaggttacagccatggcctcgccctcttgctgctcggacgcaaagctgaggagaagcccgtaaaggtctcgccgtggaaccagtaccggctagtcgaccgggagaccgagcaggtgtaccacctgccctccgccaaggaccaggctcctgggaaatgtgctccctttgtctgcttcggatgcacggctaatggcctcgaggtggcgtctcctccaaaagcgacctccagcaatgcgcttggtaccggtacctcacaggaagaagcatcttgttcagcaaacaagacgttgaccactagtggttccatcagtggcagtgagagacgaggctgtcttaagagcaactccaaaagggattctttggagcaccgtatagtggtgagcgagggtgaagaaccgccccgggctgcgggagtgcggcacgccctgagatctagcatggaacggaggaaagttcagtggacagatacatgtggaaaggatctttttgagataagggagtttgagacaaggtaaccatcttgtgaggtaacttatcttcaagttttcaagtaacaaagataccacaaagttcgagccatcttaatgagtagtctccaaccaaaagcgacgagagtctgtcagatgatgacccagaaaatgaaggtttccggaaatgtgagtgtgtgattcagtagatttcttgtgtgcacaacaagcctgacaggaacatctcctcatgggaagcccatgtcctgctgagaaggacatgccatatgttcttctgggaaggatatgccacacccagtgatttcattgcaactggaacgatcgatgacagtcgaaacaaagcaaacggtgatgaatcgatattgtgctagattatttgttggttctacgcttaactagtctgctcggcagggttatagtttcgatgcccacctgtacaataccaagatcccattcctttctttttgttgtcatgttttgtttctctgactttccatcacctttttcacgcccgctgtaccatatgaggctgccctgttacttctgccatggatggtggatccctgacttcaa

SEQ ID NO: 58220 - DNA, 441 bp, Zea mays
  Clone ID: MRT4577_153091C.1
cttcccttccttccccttctccatgttacatctggtatcagaggtccgatcttgagtttgctgccgatctggagatggctgcatcacacgggtactacaccaggctacagcgacgtcagggcaagatggatccgtcgtccaagttcttgttggatgagatcgagaagaagtttaccgccctcgacctcaagtgggagcaacacttcctcgacttcaactgtaccaaggaggagcgcctcgtcgccctggagcaatcgagcatagatctggagcagtggcgtcccaaggttgaggcatccctggaggacgtcaagctggaattatgcaagatgaacaagcaatgggatcagacgatgctggactgggcgaccgcagatcagggcatcctcggcatacctgaaccctgttttggacttcatcgtcaacacacacctgccttca

SEQ ID NO: 58221 - DNA, 259 bp, Zea mays
  Clone ID: MRT4577_153092C.1
tattgctgcatatcgtgccaagggcaaaagtgaagcaggaaagaagggccctggcaggccaacaggctcaaagaagaagaacgaaccagaagatgaggaggaggaggaggaagaagaagatgaagatgaggaggaagaggatgaagatgaagaataaatggctatcctttaatgatgcgtgtggaatgtgtgtgtgtgctcaggcaattattttgctaaaatgtgaattcaagtgcagctcaatactagcttcagtata

SEQ ID NO: 58222 - DNA, 832 bp, Zea mays
  Clone ID: MRT4577_153093C.1
cttgtgcagccgcccctctctctctaggtttggaggacgcccctctcactcctccacccatgggcagccgccaccccacctcccccatcaaaccatagccgccccctcctcaagcccttctctccaaggtgccattcctttcccgctcggatctacgtcgcgttggtgcatgtctccaattggattttggtggagggaagaagaagggaggaaagggggaggattcaaggtgattttgagattgtaccttgtttaattgtgttgtaatccaattgattatatgtttacctatccgaatcggtagaggtgctgtcctgaaattttgtgggtgggcgaacagcagtagttctagggatttctgggaatttttcgtgggtaattagtggggatcagtgggtgaatcatgtagagctttgtcatacctttccaacgggtacttatgcgctcgattcggagttataatttaggagatatcgttgtttgaatccggttatgttgctgtccaaaaaaaacagatttttcaggtgggtgaacagcagtagtattagcagtttctgggcatttttcgtgggtaattagtgttaaccagtatgataataatgtagggctttgtcttatctttccaatgagtacttatgcgcttgattgggaattatattttaaaagatatcgctgtttgaatccgggtatgtcgctgtccaaaagacaaaaaaaaacagattacagggttcatcttgtggactgttttgggctaattagatgttggaatttaattataaattgtgtaccaaatttttggggaattttatgtagatgcctctggagtctttgt

SEQ ID NO: 58223 - DNA, 722 bp, Zea mays
  unsure (1)..(722): unsure at all n locations
  Clone ID: MRT4577_153094C.1
tgaggatgcccccgnccgaaggaggggctcgtgcgttgcctgaggtagggagctcttgccgaggtnccagcgacacgccagagggttgatgtcccggacccacgtcgggnccggctcacgtgaaggaatacgacgttccccatggagtaagtgaatatgggaccgtactctttcctccatttctcgtagtagggcagcaccgccgggcggtagtcgtgcacgatgccgccgccaccgccgccgccgctgccgctactgcgtgccgacgcgcgcgcagccttcgcagcggcgnccgcctctccctcatgtcggcgaggttgccgtacgggaacgacggccgcggcccgccgatcttctggtcctcgaacttggcgaggaccttctgcggcacgagccagaggatgtggtagaggtacacggcgaggccgcacgcccccacgcagcacaggctcagcagcaccttcacggccatggccatggccacctccattattatatagcttcgcgcgcgctacgagagatgtgatcctcgctcccctctccctgatggcgtgagacgacttcccactcttctctctctctctctctagcttgctacaaacgagctatgagtgccaggcccaggggttgatgaaggtggtggatggtggtatgtatattgagaggtgagggtggccgggtggtgtccccagctgagtgaggaactccccggcccggccggc

SEQ ID NO: 58224 - DNA, 293 bp, Zea mays
  Clone ID: MRT4577_153095C.1
gctcagcctccggcgcgtggcgcgcggactgctcgccgcggggtgcacctccatctaactattggcacgagctaatcatgtccgtgctcatgggcttagatctagttcgtcgctaggtcaagggcccggtcaccgtgcgccagcaactcttgttcgactacacggaggcgcaacccaacacaacggagctcctcggtggagcgcgaggcgccttactagaggcgggtcactaaacaagcgcgtacatggcgtcgctccttcctgattactaccacaaccgcaaggttgggcat

SEQ ID NO: 58225 - DNA, 276 bp, Zea mays
  Clone ID: MRT4577_153099C.1
aaaaggcattttggttttggttatttacaattatgcacgatactggtgtttgaatacatggacattgtgcttattcaacaacaatgagggccaagggtcatacaaggaccgcaacccaggaagcttgccagaaaaaagggtgccgaaggggcactaaaaaaaaacccgctacaaacaaattaaaaaaaaaaaagggaccccagggggggaaaaaaaaaagggcccaccctcccgtttagaaaaaaagggggcccccgcccaaaaacggcggggggt

SEQ ID NO: 58226 - DNA, 162 bp, Zea mays
  Clone ID: MRT4577_15309C.1
acatcatcacactccgttttgtatcatggaaatgaaaagccaaaatactctaataggaactctaaaaaacactgtcaaatgcaattattctataaataactactccgacttctaaaatcccaagaaccacttccattataaaacctaacctttatgataaaa

SEQ ID NO: 58227 - DNA, 249 bp, Zea mays
  Clone ID: MRT4577_1530C.1
atggcgaccaaggaacatgcggtggacgtcggtgggcggtggtggagctctcggttcgtgcgggcagagcgagagagagggcgagggagctgggcagagggcgcaaatgggagaggggaggtgggcgagcagggcgcggggctcaaaaggggcgcgggggctcggacgtggacgaagaaagcgcggtcgtgggtgcgtccacggcggggagatcgtgggcgaaagggttttcaattcaaattcaattaa

SEQ ID NO: 58228 - DNA, 407 bp, Zea mays
  Clone ID: MRT4577_153100C.1
attaaaaaatttttaagagtttttttagataatatatttgttttttttttttatttttttattggactaaaaaaaacacaacccggggacattcgtactaatacttggtacaattcttcccacttaaaaactgacatgggaggggcgggcatgcaggaaacaaaagctagttcccgctaattctgttttgttcgccccccgggggcaaaaacccaactgaaaatgccaaaagccggtgcaccaaaaaaaaaaccaactatgggcggggtgaaggaaaaaaaaaagatgacctggaaccaaacaaaaatgccgagcttacaccccaactaaaagaaaaccaaggaagattgtgaggcaggggacataatgggggggggagccacagggaccaaattaaacggggcccg

SEQ ID NO: 58229 - DNA, 548 bp, Zea mays
  Clone ID: MRT4577_153101C.1
ttatagacgacacaccagcatgaacacaccaccgcagcatgaccagtgggagcaacaccaacaactgcacggtcacatgctaccacaaacactttgcaacaacacagaagcttatgttcaacaacaacaacaacaaccggaggaccgccgacaacaaccacgtcaacatgaccaaccacaacattaatgtgcaggccaacaacaacgtcaccaaccatcaccaggccctgtgcaacaacacgaaccgagccctgcgtcacaccaaggaccgagccatgagcaacagcatacacaacaattccagggtcatgacaagcagtgtcaaccaccacagactgagccatatcagacgggccaggcaaaaatcacaaccgccacaatgtccttgacaggagcagcaacagactgcaaggtgcagctctaactactatagcatatgctcaaatctaaaaaaagtaatgaattcctaatgcagtagtgcagacctttggcaatgtcttttgtccaattacgtctgctacaaccaagtctctgacatgtattgcagc

SEQ ID NO: 58230 - DNA, 1445 bp, Zea mays
  Clone ID: MRT4577_153102C.1
gataaccagcatgatataaaatatagtccttattatcctgaggatggtagccttgcccttaacaaaattagacaatcttttagtggcattaagcttgacattgcctccctgttggaagccaatgccatccttgatgacagggcgtctcccactatagagcatgcttctagcaaatttaaatttttcattttctaagtcatgctcattaattttagcactaagttgagctatgtgatcattttgttgtttaattaaagctaggtaatcatgaatagcatcaacattaatgtctctacatctagtacaaatagaaacatgatcaacactagaagttgagggtttgcacacatttagttcatcaatcttagcatgtaacatggagtattcatttctaagattggaaatagcatatcagcaaacacattaaattctttgccttagcaaataaattttcaatttcaaatttaaaggctgcaagagaggcattcaatttatcaatcttaacaatcaaactagcattatcatttctaagattggaaattgaatcatcacatacatttgatttctcaaccttaacatttaatttagcattttcatttctaaggttagaaatagtgtcatggcaaatgttaagcttactagttaattttttacatttttctacttcctgagcataagcatttttaaccttaacatgcttcttattttctttaattaggaagtcctcttggctatccaagagttcatccttctcatgaatagcactaatcaattcatttaatttttctttttgttgcatgttgaggttggcaaaaagggtgagcaagtcatcctcatcatcactagagctatcctcatcactagatgttgcatacttagtggaggatctagagtcgaccttcttccttttgccgtcctttgccatgaggcattgtgcccgacgttggggaagaggagacccttgttgacgacgatgttggtggcgtcctcgtcggaggaggagtcggtggagctctcatcggagtcccactcccggtatacatgggcatcgccacccttcttgtaatatttcttcttttctttcctctttcccttcttgttgttgcccctatcactatcacttgataatggacattttgcaatgaaatgaccgggcttaccacacttgtagcaaactttcttggagcggggctcgtagtctttccccctcctttgcttgaggatttggcgaaagctcttgatgatgagcgccatttcctcgttgtcgagcttggaggcgtcgatggggagcctacttgacgtagactcttctttcttctcctccgtcgctttgaatgcgacgggttgcacctcgggtgtggaggtggcgcctcgctcgattttaattcactctaactcaaattttagaaccaagttgtgttgtttgagttaagttttgcagatca

SEQ ID NO: 58231 - DNA, 186 bp, Zea mays
  Clone ID: MRT4577_153103C.1
cacgccgtcgcggcattaatactgacgtctgtactcaaatcagccagctcaggaagcattgcagtttcataccatgttatgcacatgtgtacgacgtgcattgataatgattaagcaaccatataatcctagagtaatgggctggttatctatctttactacctaatatgtctttatatggtaagc

SEQ ID NO: 58232 - DNA, 1161 bp, Zea mays
  Clone ID: MRT4577_153104C.1
caatcatccatccccgcatttctccactcaacccacaccccaaagagaggggaatcagtctctcccatcccatcaccaaccctcctcctccttgcctaggtactcgcagcagcgtcggcaagcaaggttctcttctcgcgccgcccagatctgagcgctcccatggccatgccgtcctcccgctccccggcgccgccgccaacggcctcctcctcctactggtgctacatgtgcgaccgcttcgttcgcgccgccgcttcctcctcctcctcacccacttcgccgtcctcctcctcccccgcctgcccgtcctgcggcgggggcttcctcgaggagatgggcgcgccgccgccccgcgcccgccggccccgccgcgccgcccgccgcggcgccgactcccgcgcctcgcccttcaaccccgtcatcgttctccgccgctccccgcccgccgacgccgacgccgatggctcctcctctcccgccgccgccaccggcagcagcttcgagctgttctacgacgacggggcggggtcgcgtgggcgcccgctcccggagagcatgtcggacttcctcatgggctccggcttcgagcggctgctggagcagctggcccagatggaggccggcggcggtctggcggcgcgcgcccgtgacgcgccgccggcgtccaaggccgccgtggactccatgcccgcgctccgcgtcggcgccgcccacgtcgcggccgacgcgcactgcgccgtctgcaaggaggccttcgagctgggcgccgaggccagggagatgccctgcgcccacatctaccatgccgactgcatcctgccctggctcgcgctccgcaactcctgccccgtctgccgccacgagatgcccgccgacaacgccgccccgcgcgctgccgccgccgccgccgcggacgaggacgccagggtcggcctcaccatctggaggctccccggcggcgggttcgcggtcgggaggttcgccggcgggccgaggcccgacgagagggagctccccgtggtgtacacggagatggaaagcgggttcaacttcaacagcggccacgcgcccaggcggatctcgtggggcgccaggcaggccgcggccacggacaggggcaccgtccgccgcttcctccgcagcgtcttcgcctgcttt

SEQ ID NO: 58233 - DNA, 183 bp, Zea mays
  unsure (1)..(183): unsure at all n locations
  Clone ID: MRT4577_153105C.1
gcacaaacgccgctcccggnntccgaaagnnncaaaccagccaccagnncccaccaccaggggcgctctgggttcgcctccgctgccgattcgaggcacccgtcctgtcccctcgcaaaaccctatctccagccaccatgaagggcaaggctgacccctccaagaaggaccagggcaggcttc

SEQ ID NO: 58234 - DNA, 181 bp, Zea mays
  unsure (1)..(181): unsure at all n locations
  Clone ID: MRT4577_153106C.1
gctcgaatatgtgggagatgcttnnngtgtactgtaccatcgggatgcgaatgttttggtttcactatgcctattggacagctttacatacgacgggacactatctgtttgataagttcttacaggtgtaccagtgcagtatggctgacaagccttctcaggactacagtcatagcttgaa

SEQ ID NO: 58235 - DNA, 239 bp, Zea mays
  Clone ID: MRT4577_153107C.1
cggacgccgcgcgcgcgtcgctgcagcgcatccgcgggcggtccgctgacgtgggcgtggagctcagggacatcgtgcaggccgcggaggaggaccggcggcacgagtccggcgcgttccggcgcatcgtgcgccgcgagtaccggccgcacctggtgatggccgtcgccatcccgctcttcttcgagctgacgggcatgatcgtggtgacgctgttcacgccgctgctgttctacacc

SEQ ID NO: 58236 - DNA, 447 bp, Zea mays
  Clone ID: MRT4577_153108C.1
ccggccgggaagcaagaagttgccatagatccatcgctcgccctcctgaatctaacctcatctcatccaccctactcgatctgctccctccacctggagaccatgactccccgaatgctctcagggctccactttctgctgattcacatcaacacacgcttggtcctggccgtgcattcccataactgatggctcgacacccgaaacctctgcaccatcatgcacaactgcacgccacgacccgtgaggcgcttggcgttatgccttacggccccagccactgatagtccgccaacctgtcgacattctgacaaagcctgaaccccaactgccactagtccgagcgcctctgattggatcacttctgcaggcatgatgaatgctgcccaagtgcgactgctcaacctgcacgaatcatggctctgtaatgcataatatatgaactgc

SEQ ID NO: 58237 - DNA, 1170 bp, Zea mays
  Clone ID: MRT4577_153109C.1
gctcgccggagcccgaacagtccaatcccaacacggcgacgacgccagcggaaatcgcatcgccctcttcctctttccctcgctgtgcaatctcccccaaactcccctctcgaaccctcgctctcgtcgccagagcaagcaaagcgcagttgctgaaacccgtgcgctgttgatggatgatgaccgttcccatggatagtgctagcgcagccccgtcctctgcgcgggactttgctgagcgtctccttactaggaataatgaacttgaagatcagcttcgcaagtccgctcaatccaaagtcccatcagatcccagcatatggcttcagatgcgtgacaactttgagaagattattctcatagatcatgacctatctgaacagaaagaggtagagtatctcctatggaagttgcattacaaaagaattgaggacttcaggaggagcattagtgctgcaagctcagctgcatctcagagtgggaagagcaacgctaatccagatcgagtcaagagaattaaattaaccttcaaaagcttcctttcagaagcaactggcttctatcacgacttgatgttaaagatcaaatcaaatttgggccttccactcagttactttccagagggcatcgacaatgcaaacaactctgcgcgagatgacaagacaacagtgcagttgaagaaaggtttgatttcatgccatcgctgcctgatatatttgggagatcttgctcgttacaagagctcgcaaggtgatggtgattctgctagccgtgaatacgcagcggcatctagttactacatggaggctgcttctatctatccttccagtggcaaccctcatcatcagcttgctatactagcatcttactcaggcaacgaggtggtagctgtttataggtacttccgaagcttagctgcagatactccttttaccactgcacgtgacaacttgattattctttttgaaaaggtattggaccgcgtgtgaaaccaccatcgagagcaatttatttcatctccatctatttcatctattcttattggttatttagatgcaacatttaagtcacatgttagtctatgaaattgtgttatgaaactcttcattgagagcatattttattcttcatttcatattactctccaaaaaaaaaaaaaaaaaagcggcc

SEQ ID NO: 58238 - DNA, 779 bp, Zea mays
  unsure (1)..(779): unsure at all n locations
  Clone ID: MRT4577_15310C.1
agcaccacatacanacccgcgacaacccccgaaaaacaccgccaacatgcccaagtccaagcgcgcgaaggttgtacatcttaccaagaccgacaagaaaggcaaggagctctccttgaagctctttgccaatgtccaggaagcggcggacaacttcgagcacatcttcgttttcgcagtagagaatatgcgcaattcgtacctcaaggaagtgcgcgctgagtttgcagacagcagattcttcttcggcaagaccaaagtcatggccaaggcgctcggccagacaccagcagaggagcacctcaccaatctttcacagctcactgaacacctcaacggcaacgtaggcctccttttcacaaaccgtgagcccagcgagatcatcgaatactttgccaactactcccaaaccgactttgcgcgtgccggtgtcgtcgctacacagaccttcactgtacccgctggagtcgtttactcaagaggtggagagctgcccgaggaagacgacgtaccgctaccgcacagtatggaaaccaccatcaggaaatggggtatgccaacgaggctcgacaagggcaagatcattctggatgctccatacacgattgccgaagagggaaagcctatgaacagtcaccagactgccctgctcaagttgttcggtgtggctatggccgacttcaagattgacctcaaggcctactactcgaaggcgacagagtcggtaacagaggtcggagctatggaggaatagcctcagattgaatacaattgcattg

SEQ ID NO: 58239 - DNA, 308 bp, Zea mays
  Clone ID: MRT4577_153110C.1
aaaaccgacaagaccatagcggagggcaggaggacacgggtggtggtggccccattctgtccggggaggagcacgacgagacatggcctgtctgtacgaccacagatgagaggatcacaactgggccgcctactggtccctctacaaccacatacacgttcctacagtggcgggtatcaacgaatcggtgcccgggagcgtcaagttcgccttgaagtcctgggagcacattcttgacacatgggtgggttttttggagaagcatgaaggtgagccctgacctacttattttgatgccgactatacat

SEQ ID NO: 58240 - DNA, 318 bp, Zea mays
  Clone ID: MRT4577_153111C.1
ggtcgctgacctctgaagcctgctccacgttccgttttttgttgccgaagcgatgggtgaagagcggcattgacttccaccttgacgttaaacacgaagtctaagcacaacatacacttgtccttgttccataacatgaacaccatgtgcactctaacgctccaacgtcgtcttcagctgtatggtcatctcgcttgaccctatcccacaccaagcacacatttcatctgactcgtgtgaaattcatcgccgttgacattgttttgctgaacccagtgtactgcaggcttacttatattttcgaaccaatgggacctc

SEQ ID NO: 58241 - DNA, 295 bp, Zea mays
  Clone ID: MRT4577_153112C.1
tcgagcggccgcccgggcaggtacaagcttttttttttttttttttttttggtttttttttttgtttttttttttttttttttttttttttttttttttttttttttgaacaaattaaatttctagggtgttttaaaaatacttcggtttggcaaaaaaacactattttttggcaaggagagtacttgttcgaacagacaacttatgttgtttcacccccacaaattttgtgtttttggaaaaaacaactgggctgggaaaatcatacgtgcgacgttaacaaccttggggggaa

SEQ ID NO: 58242 - DNA, 288 bp, Zea mays
  Clone ID: MRT4577_153113C.1
ttcccgaattgacccacgcatgcactctaacgtccatacactctactccgcagccttgccgttctcagaacttgctattgtcttcggcactgggttaatcttaatggggtcacgggttctaatctgattccaattccaatgctcaaggaccttacagccaaattcatatagttaaagcatggcgtacatgatctgatctttcaaccactaaactaattcatacactcggtttccagacacgttcttatcaaacagggtgatattcctataaatgtgaatatcatactc

SEQ ID NO: 58243 - DNA, 166 bp, Zea mays
  Clone ID: MRT4577_153114C.1
gggacatggtgtcatgagcttacaaaccagaaacctgcacaagggcttcttttcttgaatgcgggtcagacccttaaaggcacatgtgccgacgcatgcctgcaagacagacaatccaccagtaaggacaagcattattggacaagctcatgagtgatcctcaagc

SEQ ID NO: 58244 - DNA, 158 bp, Zea mays
  Clone ID: MRT4577_153115C.1
ggcgggtttgcacctaggaagatctgagttaacgggaggatccgatcattacgcgagaagagagtgtgtgtgtgtgttggtggagatgggcacagattaacgatacattgataagcgcatgagaagaagaggatgctttgtagtgatttatatgccta

SEQ ID NO: 58245 - DNA, 514 bp, Zea mays
  Clone ID: MRT4577_153116C.1
gggtgttggttgtggggtgatgaatggtgatcccatttttggcaaaaacatgtagaagacccggataaaattagactagcagatattagaccttttagtggggaagtacaaaatacactagtggagctgtagaagagtcactttgcggccttccctccagcgaagtgctgggagggagaaacggaggcgggggggtgggggggagggacaggtcggggggtaaatatggggggggggaggcagtaagagggtgtggcagtagagggggggggtgtgaagacgggggggtgacgagaggagggggtggggggggaggagtgggcgggggtgagcggaggaaaggggggggccggtgggggggggggggtcgaggggggggcgggtgtgggggggttgggggggggggggggggggggggcgaggagggaggggggggagggggagccggtggggggggggggggggggtggttgaggggtggtgcgggtgggtgggggggttgaggtgggggggg

SEQ ID NO: 58246 - DNA, 191 bp, Zea mays
  Clone ID: MRT4577_153117C.1
ggcgacctccctcacgtcgaagcacgccggggatgaaaacaaggcctacacgggttccgtttggtccagcgccaccaagatggggcctcccaccctccgtaaggcgtccaccaccttcgccccacccccatatattgttcggaaccagcacctgcgcccggccaaagacaccttcattcccgcttcccccg

SEQ ID NO: 58247 - DNA, 1299 bp, Zea mays
  Clone ID: MRT4577_153118C.1
aagccggccgggagcgggcagtgccggaccgtggctcgctagaaaaacacaccaccgacggtttcggacccgatgggttcctctgctcgtgctcgccacctcttctttctcgccgccttggtggccgtcgcggcgcctcgctcggcggacgcgtggggcggtggccgcttcttcttcagcaagaccacgcgtgccgaagccactgctgagcccgacaagaaggccgccggcggggacaccgttgccgcgccggcgttctcgcgcccctcgaccgccggcagcggcggccgcgggtacgggctctacggccgcctcgaggagaagtacccggcggactacttccgccgtggcgtgcaccgcaacaccgagaagctgacgacgacgaccggcggcgagcgcgtccggacgacgttccccgaagacagcggcaggggtcggccgcccaccgacgtgccgggcgccaccgaggaagaggggggaggcgccggaggagacctcgagggcgtccggccgtacccggaaaacggcagcggcaggggccgcccgccgtggtactacacggccttccaccgcggcaggcagcaggagcaggagcagcgggacttcgggatgagcgacacgaggctgtaccagaacggccgctactactacgacgtggacgccggcaggtacggctacggccgcgagtcgaaccccatgcggacgcgccccgacgagggagagttcggctccgggtacggccgaccccgcggccccgccggtggcaggcgcggcagtagctacggcgacgcggcgggttaccagcagcggtacggcaacgacgaggagttcggggacggagccatggatcagaacacgaacggcgccttccaggaggaagcaggccaaaacggacgacgatacactccatgagcttgcatcgtgtgtcatgcgtcagagatacactcagtcgtcgtcgtgtgttgctagcgtggttactatcgtgtgctccatctccgagtaatctcccatgggtcgatgcgattgagtacttgtaacttaatcgtgggcagaaccagctgcctgcctggtttcgcggacgtctacgcgcaccactggtgacacaagcaatgagtgaataaggtgtgtgtgtgactgtgtgtgtacaatgtaaactgtattgcagataaaaatgtcactatatatccacctactattcaaaaaaaaaaaaaaaaaaaaaaaaaaaaaaaaacaaaaaaaaagaaaaaaaaaaaaaaaagaaaaaaagggcggcgcctcgcgtatctagaactagtccgt

SEQ ID NO: 58248 - DNA, 411 bp, Zea mays
  Clone ID: MRT4577_153119C.1
ccaccgagccactcactagtgcatagaacgctgacccacacgtcctttcccacgacatgcgttgcgaactaagctaactatacctctcatgcaccactgtgattgccacaaaacatgatgccgctctagacaagattagccatgcttagggtggcccacaccatgaagactcacatggcccaggggctcctattgcagcaaggcatatagagccaatcatccggatgtcggaggcccatccaccgactcatcgtatgagccacgtgtctcaagaagatgctgacatggccatccgcgtcttgcttgactcttttatttcgactcagaagttcgacgtgccaaatgcactcctgaagaacttccgcgagtacacgacatccaagacggactacaacgagctgctcctgctgc

SEQ ID NO: 58249 - DNA, 393 bp, Zea mays
  Clone ID: MRT4577_15311C.1
aagaaacacaacaacccaccggagattcttacctcaaaacacctattctatcacgatatgtcttccaaccacatcaacaaccgcctaacttagcctgaacatcatgcacttcaccattcactactgcttgtccttaaatctaaagagcagcatgatcctcagagggatccaagtggacatatctcatgactacaatcacaatactcattctgattatcaagagaatgacgacaatcaacattctgcgcatataaacatcagggagccctcactccacaaaaggaagctccacacatatacttcttttcccacatcaagctctcatgaaggcacctagaggtcttatccccatactttcacaatggacatcaacaagtctttcacaaattcaac

SEQ ID NO: 58250 - DNA, 657 bp, Zea mays
  unsure (1)..(657): unsure at all n locations
  Clone ID: MRT4577_153120C.1
tgccagcgatccttctccatcaccatgacaaattccagccgcatcagcaccaacaggaacagacacaacaaaagcttgatcgcaggtctgccagtgccggcttggaagaattgataatgggctgcacgtcgtccacaaacacaaaaggagaaacttcaattgctcacccccaagagacagagtggccttacccgtactggccatctgataaccaagatcatcatggatagtagtgacaggacagataaataatggcgatggatgctaaaggaacactaaccacaaccacttttactggattgcattgggttttgtctgcttgaatatgcagcgttacttttcttgaggatgtacacctacgttcgatctatagtggagggatcggaagaccagagaaaaaacagatctctgtagatctccctcaaaaagaaaatgagaatcaaattagtncgtgtgtgctccccaagacaggagagacaaaatggccaacggaaagaggagaaaagatcgatgggaggaaaggtatcgtttgtgctgacattgaagggatcatgtgtgggcccctagatgtattagaccaccttagtcaagtagtacaactataatcagttcacggtttatcgtagnttttttttcttcgtgctacctaatttccaa

SEQ ID NO: 58251 - DNA, 1144 bp, Zea mays
  Clone ID: MRT4577_153121C.1
ttgggaccctcgaggccggcccgctccgggacctcctcccgccggtggacttctgctgcgcgtacggctccacgctccttcaggcacgccccgacgggacgtccatggtcgattacatcatcggcgtcgctgaccccctccagtggcactccgagaacctggaaaggaaccccgcgcactactcccgctggatggccggcttcggtgcaggcgccatcactggactggcggatcatgttggggtcggggtgtacttcaacccatttgtggaatggagagacaagaggataaaatatggggtggtaaggatgagggacctggcaatggatgtcttgacctgggacaggttctacctcagtggtcggctgcagaaaccggtccatgttcttgttgacaactgggatataaggacggtcaactcaattaacctagaaatggcaacttcagcttctctactccttttaccagcggagttcacggagtacgacctatatgctcaaatctgcagtctatcatatatgggtgatttgagaatgctgtttgcggaagacaaagataaggtgaagaagattgttgagggtagttttcagtcgttccaattgatgtacagccccctcttgcaagagtatattgctgaaggcctattgaagacatcatcccatggacaatataaaactttccggcaggattgcggtccatctactacacaatgaactgttctctgttcttccgtggacgatccaaagccaaatgcaaggaaggcacacattgcacggaaaagaagtaccaccacgcacccgtagtttcttcccaaggagatggcagcaaactgtgtccggagggccctgaggcaccgagtaatggtttcaagcgtgcggcaagcagtgtgtggtctgctcgcctctggcggtgcagttgctgctcaatacctcgggaagaagatggcgaaggcttggcgatctagagtggcttaagccaatgctgccccccaccccacacacccacacccaatggtgtacgctaggcttttgccagttctgggtttcatgcagtgtatggcaatcagtatcgtatgtttttcaccgctgaaagcctgataccggctgaaattttgtaggaccagaaacgtcaatgcttcagaatc

SEQ ID NO: 58252 - DNA, 219 bp, Zea mays
  Clone ID: MRT4577_153122C.1
atgccgtacctcgccatggccgccacaccagaagctcaaccgcatcggcatatccagcttgggagttggatctgtgagcttcacagtggttcggtgtgggtgtctgtggctccagcgcaagggatggaccaccgggactcactcaattgcttgatggagcaatggcgccgccgcgtaccgtgggcagctcgccttgaccaccgattggagttgcattag

SEQ ID NO: 58253 - DNA, 593 bp, Zea mays
  Clone ID: MRT4577_153123C.1
aacaaaacatatttttatatttttttatatatttgattatatgttgtatatatattacataatatagtgattataaatatacaacatataatcaaatatataaaaaaattaaaaatatgtatttgttcttatttgttctcatatataattttatcgatccaacattttaacaacaactggtacttttaaataagattcaaacattttagtaatacgatctaattgtttatctttttctaatataattgcttgtaatgtagaaatactagtagaatttcgggaatgataataattagttgctagaataccacataagaaacctaccaaagttgccaaaactaatggtaccgttccagcaatattaacagttttatcttcttgttcatgtactgaaagaggtgatgaaactgatgttggtgtaattgatggtgatttatttaattcattaataacagtttcccaatgttgttcattatttaaattattagatatagatggtaatgtctcatcatcatgttcatcttcatcttcatgttcattacttagatgtgataaattatgaaatgaagaacttgatgataatggaatttctg

SEQ ID NO: 58254 - DNA, 378 bp, Zea mays
  Clone ID: MRT4577_153124C.1
tcgatggaggtttactagctaccaacggtcaactgggctgaccgaagagaatcggcggggtctaatggtgattagagtatctatccagcacagacgcatctatccagctagaaggactctctttgtagcgcttgtttatgagttgacaacggcacttcgatactggtgagttgcagactgctacggcacccattagtctatcacaggtaactgcaagtagaggaagatcgtgtatggtgcttgtctggaagcggatgatcgactccgaggcattgacaaataaattgagctcaatgccgtgagggcttcaataggacaactgtccgtgccatacaataatcttttgactggatagagttcatttaatttgatctgcat

SEQ ID NO: 58255 - DNA, 2515 bp, Zea mays
  Clone ID: MRT4577_153125C.1
cattgggtacctcgaggccggccgggactggggtacctttcttccggccggcctcttctgtgtcttccccagtccccactccaccccgccgcagggctgggatggtctgtcgtcttgtcgcgtccgtgatccgtcccttggcctctcgcagcggacagcggccctccgccccctccaaatagcaccgaaacccctcgcgtttaaactattccctgatccaacccctcctcaaactctgacgacgcctccttccgtccgtcctctataagggcgccgccgaggagagagaacgatgacttcagctctccggcggaaggcggcgcagatggcttccgcggcgacacagtgcttcagctactcctcgttgccggccacgtgggctctgcggcagcggggcggcggtgccagcgtgctccggctctcttcccggcggaccttctcggtctccgcggcggccgggttcgacaaccagaaccgcgagtatgtgatcgtcgggggagggaacgctgcgggttacgccgccaggacgttcgtcgagcatggcatggctgacggccgcctttgcatcgtctccaaggagccagttccaccatacgagcggccagccttgaccaaaggctatctttttcctccggacaagaaaccggctcgcctacctggtttccatacatgcgttggatctggtggacagcgacagactgctgaatggtacaaggagaatggtatagaggtgctgtatgaggatccagttgtagcatttgatggcaaaacgcaaaccttaaagacttcatcggggaaagttctgaaatacggctcacttattatttctactggatgtgaagcatcgagattacctgagaaaattggagggaaattacctggagttcactacatacgggatgttgctgatgctgatgctctagtatcctcattgggaagtgcaaagaaggtggtggttattggtgggggctatattggcatggaggtagctgcagcagcttgtggctggaatcttgacacaactattatattcccagaggaccacattatgccaagattatttacaccctcgcttgctaagaagtatgaggaactgtatcagcaaaatggtgtcaaattcataaagggagctcttatcgaaaaacttggagctggctctgatggaagggtgtcttctgcagtacttaaggatggatctgtagttgaagctgatacagtaattgttggtataggagcaaaaccagttgtcagcccgtttgaagctgttggagttaaccctaaagttggtggaatagaggttgattccttgttcagaactagtgtacctggcatctttgcaattggagatgtagcagcgttccccctgaagatgtacaatagaattgctcgagtggaacatgtggatcatgctcggaagtccgcacaccactgtatagagacgctcctaacatcccagacaaaagcgtatgactaccttccatacttctactcgagggtttttgagtacgagggaagttcgaggaaagtctggtggcagttttatggcgacaatgtcggcgaagcagtcgaagtagggaactttgatccaaaggttgcgactttctggatcgactctgatagccggctgaagggtgttttcctcgagagtggaacctcagaggaattctcgcttcttccgcagctcgccaaatctcagcctgttgttgacaagtcaaagctccaggccgcgacttctgttgaagatgcattagagattgcaagaagctcactccggtccagcgccacggtttagatctcagaatctagtactttcttgaacccgaggctgtgcgctgctcgagcggttcatagcgtcgagaccacgtcagcaataacgcacaattacatagaatctattcccactggggttgtaacattcttcagtgcacctgggtcggccatttccagcttgaaataaacctggttgccctttgaggggttgatgaaaaaaaaaaaaaaaaaaaaaaaaaaaaaaaaaaaaaaaaaaaaaaaaaaaaaaaaaaaaaaaaaaaaaaattggtccactttccgtttcccgttccaaaaaacctgctccctcccaaccaccaagcccatggggaaccacttcaccaacaaccaaatcgccaagttcaagaaggccttcagcctattcaaaaaggaaggtaatgtttgaatcacaaccaagaatgtgggcactgcaatgcgctcactgggcaaaaaccctacaaagattaatctccaaaacataatcaaagaggccaatgttaatgaaaacgctaccatcaattccccaaaatttcccaacctaatgcttccaaaaatgaaggacaccgactctgagaaaaagttcaaggaggcctaccgtgagttagacaagaaccaaaaagctttcatctcaaccgccgagctccaccatgtcataacaaatcttggcgaaaacataactgataaggaggggaacaacataatccgcgaggctaatgccaatggtgat

SEQ ID NO: 58256 - DNA, 429 bp, Zea mays
  Clone ID: MRT4577_153126C.1
ccggccggaagagagagagagagagagaagagcttcgccggggatcttcggctaatcgccggtctggccgtattctgtgggcagggatcatcgctggcacacaccacatgtgtacatggcctaccggggaggagggcaggactcgccgggaatttgtcaccgaacttggggcgctgccacggatctgctcgacgccgtggtcacaaagtttggtgtcatttctgctggagcgaggtttcgagtcccccgaagaccaacttggtacctaggatctcaagtctaaggcaagttgtgtccttgatcacttttttcattacccattaatttttctcgcccccaccgcgacatgctcaagttaatttgatgggacctaataggtttccctattattgattatcccacaccttgcaaacaaatgaattattgggt

SEQ ID NO: 58257 - DNA, 641 bp, Zea mays
  Clone ID: MRT4577_153127C.1
gagactcgattgattctattctatcaagtttagtcctcgagtagtaatcttgcacaacggacgacaaaaacaaaccatgcggaagcgaagtcgccaaggtcaatggcacttgtacatctagatagttgttgaacgaaataaaagactttggaaccggacgagctaccactaccaacctgcaagcatatcgcgagagggaagcaaagaggagtgaaggcaaggtgtgcctttcagcgctaacggatacagacgcttccaaagcaggagtggaaggtgccatggtctaaggccaaaatccaaattccctcatcgcttgagctggaagccagctacactcttccatactaatcgagagaacacctacggcatgatgaggacaaccaagcgatgaggggataactttggtacacaacccttaaatatttgcgatcttatttgtccagaaacaagatgcaaatattttacctctgctgtaacatctccagtttatcgttatctgacagtggtactccctcaaaccttctataatggggaagcttagacagtctgctctttgataaacccctcaaaaaacatttaattcatgtaacacagaaacattggggtttcttttgctcccggaccaggtagtatgctgcgct

SEQ ID NO: 58258 - DNA, 828 bp, Zea mays
  Clone ID: MRT4577_153128C.1
ccggccgggtgaatatgatgcacctgtcaagttgttggtgaaacatttacatgcgatggcggaatcacctgatgaacagctagtggtggtatcacaggtgcttgtatcagatatcaatataggttatgaagaaatagtcaatactcaggtacttgctttcaatggccagcctgttaaaaatttaaagaacttggcgaccatggtggaaaattgcaaggatgaatttttgaagtttgatctggagtatgaccagattgttgtcctcgagacgaaaactgcaaaggctgctacccaggacattctgacgacgcactgtataccttctgcaacgtcggatgaccttaaggcctagtgggaggagaagggagcatgacgcagccctgggcctgagccagggccatcaggtgggccaatagtttgggccacaatttcggctgaattgattagcgcagcgtacgatccgtgatgaagaggaaccccaatgtttatctgtttaagttaaatatcttttgaggggttgtggatgtgagagtgctggctggtgtctaaagctccgccattatagaaggtttgagggactgtcactgtcagataacaataaactggagttgttacatgcagagtcatcgtgaaaacgatagtgtctagtaagaagctgagtttgttttttctttacatgatttcattataactacaccaaattattgacggggaaaggaatcataattggtcccgtgatttcatggaacttcatctttggtgtctaaaaaaaaaaaaaaaaaaaaaaaaaaaaaaaaaaaaaaaaaaaaaaaaaaaactcgaagaggg

SEQ ID NO: 58259 - DNA, 350 bp, Zea mays
  Clone ID: MRT4577_153129C.1
aactgaggcacggctcctgagtctttgaggcagcattgcctgtagttcaagcacgcagcaccccttacaggctccttatcttctgtggatagggatgccgatagacacgatcttggtttaccgcacaccaatcaagatgggggtccgtacgttctaaatgcgaagtctattgcgcgcaggtgccatctgctaactatggatgcaaacccccaggtcaatcacctagctctggagcgtttcggaccggagcctggtagaccaccagttcaccttggtgtgagtcttacaagccctcgcggtaataatggtgatagcacccatctgcgtgaaataaaatctaataacagtcg

SEQ ID NO: 58260 - DNA, 358 bp, Zea mays
  Clone ID: MRT4577_15312C.1
ccacgcgtccgggtccggcttaagaagctttgtgcatgaaaagacccctgagatcatgcctgctattaacaagttcttcactgaccccaagtgaagcatgttgatggttctactgctacttgccattggggattgtacccttttctggcagttcgatgtgttgtgccgtccataaattggaagacatctcttactcttattaaaagtaccgtatgagtgcttggtaatggcttgctatatgtatgatggtgaatgagtttggtcgtccctctttgatgttcatactccagtcatctgtcatgtggatttgctgtgcttcaatgataaaactgtcagccaacgttcatttggataccca

SEQ ID NO: 58261 - DNA, 2539 bp, Zea mays
  Clone ID: MRT4577_153130C.1
agtggaaggaagggagcataacgcagccctgggccagggccatcaggtgggccaatagtttgggccgcattttcggctgaattgattagcgaagcgtacgatccgtgatgaagaggaaccccaatgtttatctgtttgagttaaatatcttttgaggggttgtggatgtgaaagtgctggctggtgtctaaagctcccccattatagaaggtttgagggactgtcactgtcagataacaataaactggagttgttacaggcagagtcatcgtgaaaacgatagtgtctagtaagaagctgagtttgttttttctttacatgatttcattacaactacaccaaattattgacggggaaaggaatcataattggtccgcgatttcattaaaatatttttataagaaattttaataaatttttattatatttttttttaaattttttaaaaaaattttatataatttgccggcctatggaaatagtcaatacccaggtacttgctttcaatggccagcctgttaaaaatttaaagaacttggcgaccatggtggaaaattgcaaggatgaatttttgaagtttgatctggagtatgaccagattgttgtcctcgagacgaaaactgcaaaggctgctacccaggacattctgacgacgcactgtattcctccgacgagttcgggtggcctgatcggctggtgggccaggggggcgtccccgagacgaaaactgcgaccactgctacccatgacattctgacgacgcactgtataccttccgcgaggtcggatgaccttaaggcctagtgggaggagaagggagcacgacgcagccgtggacctcgtccacgccgagccagcggacccgcaggtacagctccagtagcggcggaattgttatcagcggtggccgtttcctcaccaaggctcactccgtggagcactatacccaggttaagcttaagaaacgcggctccgacaccaagtaccttgctaccgtcctgaccatcggcactgagtgcgacattgcgctcttaactgtcaatgattgttggttatcaattggaggagataccatatccgtgacaagtggagtggtctctagagaaatactttcatacgttcatggttctacagaacttctaggattgcagatagatgcagctattaattcaggaaattcaggtggcccagcttttaatgataggggaaaatgtgtcggtatagcatttcaatctcttaaacatgaagatgccgagaacataggctatgtgataccgactccagttattacacatttcattgaggactacaaaaaatctggagaatacacagggtttcctatactaggagttgaatggcagaaaatggagaatcctgatctccgtaaagcaatgggaatgaaaccagatcaaaagggtgttcgtgttaggagggtggagcccactgctccagaatctggatgcctacaaccgtctgatattattcttagctttgatggtgttgacattgctaatgatggaacagttcctttcaggcatggcgagcgcattggcttcagttatctggtttctcagaaatatactggcgagaaagctcttgttaaagttctgcgtgattcaaaagttcatgaatttaaaataaggctagcaactcacaaacgactcgttgcggctcatgtgaagggcaggccgccgtcatattacatagttgctggttttgtttttgcagctgtttctgttccatatcttcgatccgagtatggaaaagattatgaatatgatgcacctgtcaagttgttggtgaagcatttacatgcgatggcagaatcacctgatgaacagcttgtggtggtatcacaggtgcttgtatcagatatcaatataggttatgaagaaatagttaatactcaggttcttgctttcaatggccagcctgtaaaaaatttaaagaacttagcgaccatggtggaaaattgcaaggatgaatttttgaagtttgatctggagtatgaccagattgttgtcctcgagacgaaaactgcaaagtctgctacccaggacattctgacgacgcactgtataccgtctgcaatgtcggatgaccttaaggcctagacgcctagtagtgagaggtgggagcatgatgcagccctgggccatcaggtgggccaacagcttgggccacattttcggttgaattgattagcgcagcatactacctggtccgggagcaaaagaaaccccaatgtttctgtgttacatgaattaaatgttttttgaggggtttatcaaagagcagactgtctaagcttccccattatagaaggtttgagggagtaccactgtcagataacgataaactggagatgttacagcagaggtgtgaaagcgatagtagctagtaagaatccgattttttttttattcacatgattacattacaactactacatcaaattattaacggggaaaggaatcataattggtaagtgattacaatggaacttcatgtgtcaaaaaaaaacaaaaaaaaacaaaaa

SEQ ID NO: 58262 - DNA, 276 bp, Zea mays
  unsure (1)..(276): unsure at all n locations
  Clone ID: MRT4577_153131C.1
gcggttttgtttggggggggaaacaagaactttcactaagtcataaaatgtnggggccaaactggtngttgtctacagcttctctactggttagaactccttttcacagctcagtggtccttgctttttgtaattcttgaactttcctcttcactggtgggggggggggggnttctntnctttcccctgttcatctgctgttgcgcttgtttgttttgggcccattgtccgtgttccttggtgccgttctgccggtgtttgttgcgccgtcttttg

SEQ ID NO: 58263 - DNA, 404 bp, Zea mays
  Clone ID: MRT4577_153132C.1
ggtgtgtgccccatcttccgcatgccttgggtcaacatcatggccaccagtgccatcatgctgggcacaaacggttcagagaactggtaaaactgcattgttttttagacctatgaaggcgtgtgccccatcttccgcatgtactgcttcaaatgccaaagggcagctcaggatcatgccacaattatcttctgagctattgcacagatagactagatgtcatcttcaaagattgctttatttttgagattgtacctgcatttgattctcttttgtagctttgtactatcagctaccataagaattggactttaggttatgctattctgattgtgcaacaaactttagagttccaacaaagcatttgcaaaccgatgctttataatagagattggttttgacat

SEQ ID NO: 58264 - DNA, 592 bp, Zea mays
  Clone ID: MRT4577_153133C.1
gccggccgggcttgcgaacacctcagcagcctagcgacagttaccatctccatcgatctatcttccggatactgacctctaccgatgtctgatagacgacaaggaggataagaagcccgtgaaggtcggcgcccacatcatccttgaagcctagggacagcacggcaatgccgcgatctttctcataaagaggtccacccaggtgccagaagctattcaacgcctattgccaccgccaggctgaggacttagaatgcacatatgcattcctgaattgcatggcctgtaggtttctctgaagatcaaacccctcatcctctagaaatggaggacgtcgtccagatcgacgccatgcttctacctaatcggagacagcgctcctatcaccacctagaagcaaatgctgcggagcctcttcttgctcttcgctctgcgtaatcttgacataagtgaatgattcttttcatcgaacttgagatgctctggctcctagtgccattgctgatagacatcctgagcctctatttaaccgtatggtttggtactttgctctgtcatcactcgtttatctatccctaatacatgccgccat

SEQ ID NO: 58265 - DNA, 432 bp, Zea mays
  Clone ID: MRT4577_153134C.1
aaaaaaaagggggcttaaacaagcaaaccaaacggggggcaattttttttaaaacaaaccctttggggggaaatccagccgggaaaaccaagggggggggtaaaaaaaaaggccaaaaatgggccccaccagggggaacaaatttcgccgcaccccaaacacttgatccccttaaaaccctggaaaaaaaaggggaagggcggataaggggccccccccctggaaaaggggaaaaccaaaaacgcctaatcctttaggggcccaccaacaaaaaaagggggggccttcaacttgcaaaggaaaaactggggtgcccccccgccccccttttggaaccaaaccggttttttggggcccaacacaggaggggaaagactggggggatttttggagggaagacaaaaaagaatttttggaaaaaggggggggccc

SEQ ID NO: 58266 - DNA, 329 bp, Zea mays
  Clone ID: MRT4577_153135C.1
tttcgaacacgaggcacattatgtcacaaacctatgcagatgcatatgcatatgctacacacacaggtacaggtgcaagctagatcctctcaaagaaccaaatcaaagggcgtccaaaaagcttcactcaagaggcttcctgctcctgctgctctccactcccaccaccgttgctggcatcagcagtcatggcaccaccaccatcgcttggcaactccccgccaggtgcttcaggggcaacgttcacgtgctctgttgtcgccatggcaatggcaggctcaggctgtctcgggacatcagcgcccaggcgcccatcgccgcttggcagc

SEQ ID NO: 58267 - DNA, 1607 bp, Zea mays
  Clone ID: MRT4577_153136C.1
acagaatgtttatgatctgttaatttattttgaactaaaaatatgtaaaacaaaaggtgagagaggtccaatatgttggagatctgtccatgctctagtagatttattttagtgtttcacattggatgattaccacgggcgttcaagtgcatgtctctccctacagtcaggcaagtgtcgacaaatttgtggaagttgttgacggatccaccgtcaggcccgaaggccttgaccaccctgggttgcaggtcccgcgctgtagccctcatccgtgccccttcctcccctgtcagcagtgacgccaccgccgccgccacgccacccctcgtcatcggcttgtcctcgtcgaacgccgtgccgaagcaccacaggcgcgccaccgcacgcgcattcatcagctggtcgccgaagaatgggcggcaggccatgggcacgccgccggccatgccctcgacgacggacccccagccggagtgcgtgacgaacgcgcccacggccgggtgccgcagcacggcggcctgcggcgcccacggcacgatgagcctggagtcggcggcggccttggctcgctccaggaactccggaggcagcagcgcccacgcgtcctcccgcagcgaccacagaaacggcgcgccgctgtcctcgagcccggaggccagctcgcggagctcgtccggtggcagcgcggcgaccgtgccgaagctgacgtacgcgacggtgcccgcgtcgcgccgggcgagccaggcaagacagccgtggcggtcgccgtcgtctgctagcgcggcggcggcggcggcggcgccggggaggaggtggtagggccccatgggaaggcagttggggagcgcgtcggcgagggccgccgacacgtcctccgggaagaggcccgggaaggcgttgagcgcgacggcggtggcggcgcggggtacgcgctccgccacgcggccgaggagggtcgtcatgacgcgatacatgtcgccgccggcgccggcgtccccgaaggggaggtcgcggacgcggtacatcccgaggccagggtacgaggccagaggctcatcggcccggctcgccgcgtggtcgccgatgtccttgcggatggtgtcgccgatgacgtgcgccaggagcgcgcacgggcctcccgtccagaccgcgacccagggcaccccggcgtccgcggccatggacatgaaggcgtccccgacgacgcaggtcacggcggcgccgccagccgcggcgcgggctgtttcaagcgcctgccgaagcccaccatcctctgcggcgtcgaggaagagttccatccggcgccacgatgggattcccgggccatcccctccccctgacggcgcctccacgaagcgcaggttcgacggggcagcgccggcgccggtggggagccgcgccagggagtcggtggtggaaatgaaggagaaggtggcggaaggcgccgcggtggcgagagcgcgcgccaccatcaggaccttcggggcgtgggaggtgaagggaaaagccaccacggcgacgtgcggcaacggcgaccccattgcagctgcacctcgattggcggacagtgagggccggagaagtgcgaagtcccggccggcctcgag

SEQ ID NO: 58268 - DNA, 711 bp, Zea mays
  Clone ID: MRT4577_153137C.1
cggggaaactgtttaatttgggggaaggacctcgagttaggtttagtggaaccccagggggttttctgaactgttagtgacacatttgaatagtactccaaggactagtttgtaaggaaatttgaaaacacccgccagggacctcgatgcaaagtcgtttcccatttaatcatttctatttaatctttttatttaatcttgaggcgtgacttaggcacttaagctggaataattcgggcggttctgccacagcagctgatgaagatatatttcaaacctctccaaaacctctcctattatatcatatagaggaaaccgaagccccaccatgaagaaacttttaaacacaacaacttcctcctccttcggctcctgcatacgagctgccccctgtcatctgctgtagcgaaccgcccgctgtcgccccatcttcctctgaagaagccacagttcagcgctactttctctatctcgcaccgtatcttcggtgtcgcgctgggagttgccatcatatccgtccccctcgccaccaagttcagcctgatgtttggcgtttgagagcgatttgctgcatcttatgaggaactgcatttccccgttcctgtgactgtttcatcgttcgtctgggttaccttgcacacaactttaggtgcagttggaatacatctttgtcatgctgacagacttctgtaatacagtaataagtaaaac

SEQ ID NO: 58269 - DNA, 454 bp, Zea mays
  Clone ID: MRT4577_153138C.1
ggaaaaccatgatcagtcagcagatcaggaagagagttataaccaaaatctgggattacaggagcaagagaaaactgaaagtgacttaactgagaatttggagtattcaccaactgaaggcacattggagctaaaagaagacatgagtgaacctcaaaaggagaaacttccagagagcttccttgctcatgatgttagttccattgtagattctaaccaacaagaaagcatcacaaagacagaggaaaaccaaaaacaacctgtagatgactcccatcctcagttgaacagtcaagacctacgtgatcaaggaaaccaagatcaggacacaaatggagaagaggaaggagagaaagagccaggtgaagtgggtacccacaatgatgaataaaaacgggagacagaactttccaatgagccttctaacaacaagcaggaagaagacaagtcccaa

SEQ ID NO: 58270 - DNA, 622 bp, Zea mays
  unsure (1)..(622): unsure at all n locations
  Clone ID: MRT4577_153139C.1
cagagaataaaagacctgcactattcttagaattgcaagtacccacaatatgaacagaaagcatagcatgtgagaacaagaatgtgataaataggtccagtaaagcaggctgcatttaggtaatgaaaagcctggaagcctagcatgtgaagttgggtttttagccatgggttgtcctgatgaaattttgcatttaagcagccactttggcgtcagtgtgcagaatgaactggagcaatgaacagagtaagtggaatcaacaaagacgactgaagaaaaacacccagtgagctcagctttacttagttaagcttcacatttatgggtggccaatctgtactgatgccagggtaggtgccaaatagatggttgtgaatatgacacagtcctgccctgcccctaaagatcttacaggagagaaacgcaatttctccaagtgccctgngagcagagggctaggagagaaacggaaatgaaggtgaaagaggtcaagcatgaccattctctatcagcaaggccagtaccaactcctggggcttacagagttccctagagctttcagcatttctaaaccagttcttgaagacatcacagtacacttgtatatatgtctntctctctt

SEQ ID NO: 58271 - DNA, 379 bp, Zea mays
  Clone ID: MRT4577_15313C.1
ttcccgggggaaatggaaccctctgaatctttgggctttggttggaatgggcaaatgtttaacacagggggggaagggcacacacacggggagttgggtgcggggttctgggtttgggcctaagtatatgatgatgatcacaatgatactagttgaatgtgtgacgtgagagacgatcgcaacaacgaccttaattttagttctagatgaaaaagtcaactgtggccttgatgacttaagttactatgactataaatgctgctgtgctgggctttgctactatcgtaaatgttctacggcttgctattaactagactgaactcttggtggtggtctgggaatctaccttcggtcttatgataaggtcttgtgtgctgtc

SEQ ID NO: 58272 - DNA, 196 bp, Zea mays
  unsure (1)..(196): unsure at all n locations
  Clone ID: MRT4577_153140C.1
tcgatcccgcgttctcgcgttcgcccccgctgggatggggggtggggggggggcnccatggccgtctcagtcgccgtcgcctggcaaaatccactagcagtgcgtagcctcctgcccatcttagagacggcggatttcttctcggccttttcctcgccttgctgctgcgcacttcctcttcctttctggggggggg

SEQ ID NO: 58273 - DNA, 371 bp, Zea mays
  Clone ID: MRT4577_153141C.1
gcatcagcacgcccaacagcacaggccgcaacagcaatataccggaaactaccagggcggcggacaatactacgaggactacagcgagaattatgcccagggtggtcaagatggcgcctacttcgatcccgtgtcaaactcgttcgtcatgccctacgctcagcccgtctcgcgccgcgccatgacacctccgcccttgggacagcgcttccccggcccacgcggacccaatcgccagttccacggctcgatgggtggtcagcgcatgcccggcccaccaggctcttacggaggatctcggccgggatcggcctcctctagccgtatgggacctcgaccaggctcatctgcctcggcagcgtactacaacc

SEQ ID NO: 58274 - DNA, 622 bp, Zea mays
  Clone ID: MRT4577_153142C.1
ccggccgggaattacttaatctcataccccaccctacacacggagacgactggaactctattcgaacgaacgtacagcaggacgcctgggcgccgcatcgatcacagcaaccactactgactgactgatgactaccatcacgtactccataccactgatatcataaggactagcggcgagcctagcgctgctcgcttactactactgacgacgacaactgcgactgctcatttcgccagcgctgacgcggacgattacttgaacacgtccacgcaggactccccgcacacggaaccactacttcttcttagatgcaatgacctcatctcccgtgctactcccttccacacctgcatggatgcacgcgcgaatgcacgacgttccaacctgcacttgacggaggagtaaccaccacctaccgcgccgagagcaaccacaacataataaccggaggctactactcaaggtgcagattaaccgcccaactattgcaattgcaattctcatcacccaaatatatcttccgccatcatttattcctctaatacaagcgtactggagatcaccacgaacccatccttcttgtattattaagcattgccgatggatcacttatattact

SEQ ID NO: 58275 - DNA, 510 bp, Zea mays
  Clone ID: MRT4577_153143C.1
tctccctctccatgtgctccctcgtggtgctccctccatggcgcccgagcgctctgtcctcggatcggagcttctctgcgcgccgcagccaagcttccttccccatggcgctcggcgcccaagtccccagccgcgccctcgagctccctttccctggcgcgtggagcgtcctccttgctcctcagctgcttgctcgccctctgcgcactgcttcctgcacgtcgccaccttccagctcgccggacctcctgcgcgcgccggatcccagctcgtcggccgctcgttcctctccgctgttcgccgctgttggagacttttctcaaatgctaagagttaagaacaagacaacataaaaagtgttaaatattaaagtccttcgttctttaagacattatgtcccttcagatataataagttccggacgaaggttatgaagaaaaaaaccttcgtaagctcgatagataataaaaaagaattcatataccaaatacgaagaataatttagatatt

SEQ ID NO: 58276 - DNA, 445 bp, Zea mays
  unsure (1)..(445): unsure at all n locations
  Clone ID: MRT4577_153144C.1
gacctttcaaaaacccctacatcctgccatccatccgcggtccgccgccgccgccatctcctcccactctcttccccccactcctaccaaaccctattcaatatccatttctccatcctgcgcgtggngcggccccgccacccgggccgtcctcgccgccgtccgccgcccggcagcggccgcgcgcctccacgccccgcgccgccgcgtcccgcccgccttcgccaccacctcctccccgctcccgtccgcgcggtaagttcagtccaacgccccctacagccgttcggcttggtggtgacttgagcccggcagctgggactggcgtgtcgtttccgcaggcctctgggggcgctgatggggcccccgtgacggagcgcgcggtgatggcgcggctcaacgggcatcccggagccagcgggcgcgcgtgctgacagctttccca

SEQ ID NO: 58277 - DNA, 235 bp, Zea mays
  Clone ID: MRT4577_153145C.1
ttgtttatcgccagaaagctcacgctaatgggggcattttatcacggacgacgctggtcacccgccggccagaaccatataacctatgatggctggcacgcaaccaaccaaacaggataagactgacgacgagccttggttcagagaaacagggcactggatttagagcccttcagagccagtatcgtcgtgcaccagtggcgaccaggccaaacccttgaacctagccatgaag

SEQ ID NO: 58278 - DNA, 486 bp, Zea mays
  Clone ID: MRT4577_153146C.1
tgttttttttgttgtatcgcaacaaaccgtatcatacatatccacggggggttctgcttgttccaaaattccgaagtccagctacttcacccactatccctaggaagtaaatgcttacttcacgactcatctagcataacactgatgggcagcctatccccaaatgtccatgtgtggaggagtaaaccttaacctctgcaccgttacaccaaggtgcgaaacaagatgacacgctgagctggcagaacctgatttgcatctgcagcctcagctgcctacctaggcagcactcgagggcaacggacacacaggtcagagatctctgccttacaagcagttccaagctcttaccgacgccgatcgaaatggggctcaatttgtccgccagcccatccttctcgacaggagctgcagatttgccgtcctcgcttatggtagatgacacccttcgagcttgctagcttagctagattgttggcatgcggc

SEQ ID NO: 58279 - DNA, 535 bp, Zea mays
  Clone ID: MRT4577_153147C.1
ggcgtgaaccacgatgccgacttggcatggaggatggcaatgacggacaggggcgcttacatggagcaccgtctggcctacatggacaggttgcacatcactgacctgaacgcgggcacgctggaccatgcgaatattcggctgggtgccacatccgacggcctgcttttgtggagacagagggcaagatctactacaagagcactgggtctatggcgcacgccgtgcactctgttaacgctcgggccggagaatcgacagtgcacgcatcacactcgctacaacgaggcacgttacacatgctgtcgggagaggacccggacgtgctggaaatgagcacgatggtcatgggcatgatgtcacggcaacgggcagggcattcgccgctactggatattgtacgagcacgccctaggtcggccatcgcaacagctttaccacgtgccccggaccttcctgcggcagaaggacaagatgctggtgctgatctaggaggagtttaggcggtctggcgctatcatgatcctgacggtga

SEQ ID NO: 58280 - DNA, 1352 bp, Zea mays
  Clone ID: MRT4577_153148C.1
ccacgcgtccgataaaatcaaatccaattgcatttgtcaaacctggcatatctagaatataccgtcttatccgttcaaatcgaaattccagaaacaaatttgtccactcgatagttcggaaattcgagtctgatagccggagtcgcagcacagttagctttcttgtatactgtgctgaagttcttgcctccctgcctttcacatgctccgatgaaccactttacttgatctatgatataaatcgaattattcaccttaaagctggaggagttgagagcaatttgaaaaggtggacttctatgtctcagtctcaagatacagtggatatgccaacgttgccaggagagaggcatgttgtcatgcaaggagcctggcggatattatgataacgtgggctatgcccatgaaagggtgaatgacaatccttgcagtacttcagatgtggacattgccaaagttcagggagattgccatgatgcaatagcccttcagctacttctgaaattgaagagacatttgaaagttgtttatggtttagatgatgcccgctgtcagtcattttctctaaaggagcctccgaaatctggagaaacattctccaggcagaatgtttcttttaatattggcagcactaacatcagtctgccgagctgcctgcaggacgtagcctctgtttaccaggatttcaagacagtgctccacgaagattccatggactttgctgtgttcatcccttcagtccagattaggaagcgcccaaccccgagaaatacgacaaacccaaccccaagaagtacgacgagggtcaggagaacggctgcctcgagtgttacaaaagcccgtggtggcgcacgtggcgacgactccgacgactccgatgatgacgactggaccgggggcccaagagtgcttgacttcagtgggggtggccgtgtgacaaggcagagggtccaagtatgatgactggtcttggtgcttttgtacattctagggaaacctatagcgggtagcagctgacacgaggagagttagggttgagttttaggtttaaagtcgtttagggtacatagaagcagaaaaggaaaggaagatagcctttttacttagatgccattgatttggagcactccttttcttgctctgcccctgtcctgtttgtaattccggtcgggctttggcaaaactgacaaacagggttgtgctccggcttctgatctgattcaatgggaatgaaattattccttttgctttgcctgtataataaggcagcagttaagcctatgtttcgtgtaattgtctggcttgctaatgttatatatctgtacgtcgaaaaaaaaaaaaaaaaagcggcc

SEQ ID NO: 58281 - DNA, 226 bp, Zea mays
  Clone ID: MRT4577_153149C.1
tagagatgaattctgcgggggagaataagaagacaagcgggggtttctgacatggcacctaagaaggcagcggttgtctagaaagcggtcgaggaagttgatgtggatgatcgtggtggacggtgacaaggctggtgatggggagggctacggtgactaggacgactatggggaaggcggtgacgaggaggatgatgatgaggaggtggatggggaggagatagtt

SEQ ID NO: 58282 - DNA, 417 bp, Zea mays
  Clone ID: MRT4577_15314C.1
atttggtgctacaacaagcatggtgcatcctgcaaccagtacagacgaatcatcaagtttttacacaccagtttccacctagcatatattgacaacttttcacaaaatacatagggtacttagtggtcagatctttgtctggtgctccaagatggcaagatatgcttctgtgatatctgacatcgtaagaaattgagttcctgaagaatatttgcttggaaattcacaaaattacattccatcaatgttcggtaagcattattatggtatttattcaacttggttggttctactgtctaaaggttcagacaagttagcaaaactttatgtgacccactattatatgatgttacaacatggagaatattgtcgcctcaagaaaggaaacaccaacaatcattcttccttttttgatta

SEQ ID NO: 58283 - DNA, 1363 bp, Zea mays
  Clone ID: MRT4577_153150C.1
gatgctgaaagccacttactgccgagagcactgtgaaacctcctgtccggtgtgaaataaatggcagaagtaaagtgcctgttgctgctggtgctggagacaccaacatatgtggtggtattattcaattgtattggagttctattcttgaaaggtgcttggatacaaatgatcaagttcgccagagtgcacttaagattgttgaagttgtactccgccagggtttagttcaccctattacctgtgttcctcaccttatagcacttgaaatggacccactggaggggaactcaaagttggctcatcatctgctgatgaatatgaatgaaaagtaccctttattttttgaaagccgtttgggtgatggactacaaatgtcatttaaattctttgaatccatagtcagcaaccataagatggcagcaaacataaaatcaaatccaattgcatttgtcaaacctggcatatctagaatataccgtcttatccgttcaaatcgaaattccagaaacaaatttgtccactcgatagttcggaaattcgagtctgatagccggagtcgcagcacagttagctttcttgtatactgtgccgaagttcttgcctccctgcctttcacatgctccgatgaaccactttacttgatctatgatataaatcgaattattcaccttaaagctggaggagttgagagcaatttgaaaaggtggacttctatgtctcagtctcaaaatacagtggatatgccaacgttgccaggagagaggcatgttgtcatgcaagagcctggcggatattatgataacgtgggctatgcccatgaaagggtgaatgccaatccttgcagtacttcagacgtggacatggccaaagtgcaggttgacgtggatatggccaaagtgcaggtgcgttagagaagttctgggtggtagggtccattattttaattgatccatcggggaggctgctgccgtgaaccctttttcatcttattattttcactaattttttttttggccagggagattgccttgatgcaatagcccttcagctactgctgaaattgaagagacatttgaaagttgtctatagtttagatgatgcccgctgtcaggtatggcttgctctttatttgtagattggtactgctattatgggtgcatttacatgagacatggtgcaattgtgttttgaaaatacagtcattttctctaaaggagcctccgaaatctggagaaacattctccaggcagaatattccttttaatgttagcagcactaacatcagtctgccgagctgccttgcagacgtagcttctgtttaccaggtactaaatagtgaacttaagattccttggcaaac

SEQ ID NO: 58284 - DNA, 295 bp, Zea mays
  unsure (1)..(295): unsure at all n locations
  Clone ID: MRT4577_153151C.1
gtaatgtgagtaagcaccatngtanagatagccagtgatgttgaatgccggaaaaggagaaacaaatgaattatagattgggatcatagaacttcagagagcaaactaggttgattgtgcaatattttttaagaacacttagtatcctagataatatgtgaaacaaacaatatgatttactccttagcttgagaatacgcctgtggagggaaaaattaagtttttaaccagccgcatagaagccttgtttgttttgtgaccctagaaaccagctaggcacaagcagcacctgggc

SEQ ID NO: 58285 - DNA, 584 bp, Zea mays
  Clone ID: MRT4577_153152C.1
cccccctcgagttttttttttttttttttttttttttttttttttttttttttttttggaataatttcattcccattgaatcagatcagaagccggagcacaaccctgtttgtcagttttgccaaagcccgaccggaattacaaacaggacaggggcagagcaagaaaaggagtgctccaaatcaatggcatctaagtaaaaaggctatcttcctttccttttctgcttctatgtaccctaaacgactttaaacctaaaactcaaccctaactctcctcgtgtcagctgctacccgctataggtttccctagaatgtacaaaagcaccaagaccagtcatcatacttggaccctctgccttgtcacacggccacccccactgaagtcaagcactcttgggcccccggtccagtcgtcatcatcggagtcgtcggagtcatcgccacgtgcgccaccacgggcttttgtaacactcgaggcagccgttctcctgaccctcgtcgtacttcttggggttgggtttgtcgtatttctcggggttgggcgctttctaatctggactgaagggatgaacacagcaaagt

SEQ ID NO: 58286 - DNA, 453 bp, Zea mays
  Clone ID: MRT4577_153153C.1
ggggagcaaaacaaacctcccattttttttttttttttttacaaaaaaaaaattccttccaagccccccggaggtcacaattacaacccccggggcccaacacaggggggaaagggaagaaaaaaaaaaagaaccctttcaagcaatccaaacctttcccaacaggcaggcaattgatcttaaagcccgcttcttattttttgaccaactggaggcccttggccttaaagtccccctccattaaacccattaagcggtcccaatcccggggcgtgcccattacatacttggccttaatccccccccgctttccctttacaaacttggcgcttaccttcacggacttgaacaccccctttttcttattcatttaaaaacccctgatttccccgagcttccccgaccagattaacacccacggttttttaaaccttaagattgccaccccctttt

SEQ ID NO: 58287 - DNA, 438 bp, Zea mays
  unsure (1)..(438): unsure at all n locations
  Clone ID: MRT4577_153154C.1
ttcggcaccgccggattttagttcatctttgcaggagaacccttattatctcacataatgggctagtggagactacccggactgtacagacttggcctaccatagtgcaattgatgatggtgcagacatcattgactgtcctattcaagtgacaaatgatggagttcttatgtgcatgagttccactaacctgcttgacactacgaatgttcagagaacaacttacaactctctggtttctgttgttccagatattcagcctcaaccaggaatcttcacattcaacctcacttggtccgacattaacagtaatgttttaaaacctaaaatatcttctccagtgagtggttatttccttgtaaggaacccaagatacacaaatcaagggaagtttttgaagntatctgactttctagcaatcgcaatggataaagactt

SEQ ID NO: 58288 - DNA, 523 bp, Zea mays
  Clone ID: MRT4577_153155C.1
gctcggtacccctgctgcgagctcccctccctctctctcgctgacaagccggccccacctgccagccacggcctctcacgtgctccctctcgctggcagtccggccccaccggtcagccgcttcgtcgtcttcctcgcgtacgacgcaccgccgtcccctccatcgccgtcccctccatcgctgtccccttgcccatcccctcgccgcataggagagttcggcaccggcccatcctcgccgcttgaccgcgtccttgcccggtaccgcccccgccgtgaggtctcgtacgtcgccgctgtgcggcattaatgccggcgctgtgcacctcaccggcgctcgccgagctccgccgctccccttccctcgggcgcctataaaaagttcgtcacaggcaccttcttccccgaaccggcctcagccaccaccctcctcccctggcccgagctcaattcgcgaagcgtggccgtcttttcctctctggtgagccctcccaccctcttttcctccctctatggcggccca

SEQ ID NO: 58289 - DNA, 345 bp, Zea mays
  Clone ID: MRT4577_153156C.1
tcgtataacagtacccagagagccatggcgggtcgtcctcctcgccgtcacggactttgactccttctcgctgcgcaaagaacgcgaggtccagctgcagcgcggcgcaaccgggacgtggcggataaggcttgatgaacggcgagcctgacacaggacctcggaatgcaacagtgtccatgaccggcgacgttcgtgccgatggacaactgccccaatgagagcatccagttttccagatgcaatgccagagtaaagttcagtagtggtaactgcacggatgacctcggcgagatcaggagcctgtcgctgaataaagttccggagtagctgtcgcttgcatgc

SEQ ID NO: 58290 - DNA, 417 bp, Zea mays
  Clone ID: MRT4577_153157C.1
tttttttttttttttttttttttttttttttttgttttttttttgttttttttggggcgggccaaaccgtgataatctcccttaatttccaacggcaccgcatgacccggggaaccaaggaaaccagggaagcaaacttcccacagacccgacccgcccacgccccaaaaggaacccacccataccaggacacgccaaccatatttcccaactacccaaaacgcacaaatgtgcggaaagggccaaaaaccaaagggacccccaacccaatgaggaaaaaccccccaaacccaaccagcccggaggccccccccgccaagaagccccacccccaggtcccgacagcccgaaacccccaacgccaggaaaaacccccttccaaacacccacaccttgccccccccaaaacctggtcac

SEQ ID NO: 58291 - DNA, 666 bp, Zea mays
  Clone ID: MRT4577_153158C.1
gcgcatgtgaacatttgtgcatttgtcggacgttcagatctggactcacgatgctttcggtaaaacttgcctctgctctgatccacctccaccttcaacgacttggcaccctcgaaggtaacccaatgtgattcagcctccttgtgctcagatctatgtgtttgaatgcaaattcatgtgttagggttgttgtttgagtgaatcccctttggttagcatgggttcatggttccattcatcgtgtggatcttggattcaatgatccacagttcattttttctgtgaagcttttgtgcatatatgcatatatgtgaatccgtactgaggtttctaggaagtgatttctcctctgtttagtggcttcgaatggataggaatggatgacagcattataggatgtgaatgatgaacttactcatttgttttcctgagttctttgcagagttcctataacttaaaatgtcagatgtggtatttactcttttttgcttaaagggatgaataaacagtccattttcagtgtttagttgaaaagtcatgatacttggcgttccttgcaaacgtgagcaacctggtgaccaacatgatggtgtcttttttttgcgttggatgccagtttatgctgtacttatgttacacgaaggaatgcagggccctattaaagga

SEQ ID NO: 58292 - DNA, 314 bp, Zea mays
  Clone ID: MRT4577_153159C.1
gaggcgctgacttatcctaccactcttatcaagtcctgatcgagttaggggggcttggggtattgctaaggtgcgatggcagctgctgatgtcgagtacctttgcttcgtacgcggacatgcctgggccaccagcaacgagtcgctgcagaatgccttcgcctcctacggctagatcctcgactacaagatcatcaccgaccgtaacactgcgaggttccgcggtttagtatgcgttaccttctcctacgagaactccatgctcgacgctatcgagaacatgaacagcaatgagctctacgcacgtatcattac

SEQ ID NO: 58293 - DNA, 1278 bp, Zea mays
  Clone ID: MRT4577_15315C.1
tcgttctggacggctacttcggggcggcgggttcgggtacgtgtacaagggcgtgctcgcgagaagccaaaaggaggtggccgtgaagcagctcaaggccgggagcgggcagggcgagcgcgagttccaggccgaggtggagatcatcagccgagtccaccaccgccacctcgtctccctcgtaggctactgtatcgccggctcctcccagcgcctgcttgtctacgagttcgtgcccaacaacaccctcgagcaccacctccacgggaagggtgtgccggtgatggcctggccggcgaggcttgccatcgccctcggctccgccaagggcttggcttacctgcacgaagattgccaccccaggatcatccaccgtgacatcaaggcagccaacatccttctggacgagaatttcgaggctaaggtcgcggatttcggacttgccaagctgaccacagacaccaacacgcacgtctccacgcgtgtcatgggaactttcgggtatttggccccggagtacgcgtcgagcggcaagctcaccgacaagtcggacgtgttctccttcggcgtcatgctcctggagctcatcaccggcaggagaccggttgatcccacgaactacatggaggacagcctggtcgactgggccagacccctcttggcgcgcgcgctgtccgaagacaacttcgacgagctgctcgacccgcggctggagaacagggtcgaccggctggagctggagcggatgtgctcctctgccgcggcggccgtccgccactcagccaagcggcggcccaagatgaaacagatcgtccgtgctctggaaggggacgcgtcgctggacgacctgaacgagggggtgaagccagggcagagcatgatgttcagctccggatcggagtacgactccggggccaactacgcggccaacatcagcaagttcaggaaggtggccttcgagagcagcgagttcagcaacgactacagcgggacaagcgagtacggcgccgactccggggacgcggcgacccagcggcagcaacatcgctgacctcctcgtccgagatgcgtgtgtggtgtacaatatttataccaaggggtcgatgtcgactgtcggatactatcagagatacccaaccctcgatcgtgacagctttagtacatgtaatgatgctcataaaatgtcatgtaacgtacgtatttgtgtgtgaaaaaaaaaaagttgctgcagtccgctgtataggagcctaggtatagggaggagtgcatgtcacgtct

SEQ ID NO: 58294 - DNA, 583 bp, Zea mays
  Clone ID: MRT4577_153160C.1
ttccccttccgtcctcggtcggcgcccaacgctccttccattgcagccgagggcggtcactgtcacggtgggcagagtgacacgccatacgcctttccgtcccgctccgctccacttgcgcgcacccaccctggcgctcggcgcttacaaccacgggctgctggccttctcccccaacttccgcctacggggcggggggcacctaacattacggcccgcgagccctctcctgctgagctgccggaaaatttgtcggccatctatcaacttaggtaatgtaatgggagcttcttcaaccacatctgataaagcaattaccagtgcccaagttgtttcatcatcagatcagtgattcaacaccgctgatatctaccattgagcaactaacttttggagatcaataagaggcggctactatcacacgattgaaatcactacaggaccttgcccttgatgtcacaaaacgaagtgtgtcaactgactcatctgacacacaaacaaagtctcacataatgcaatttgtgctctaggcctaagaccctgacatgttactaacgattcggttaaccatcataaacaacct

SEQ ID NO: 58295 - DNA, 359 bp, Zea mays
  unsure (1)..(359): unsure at all n locations
  Clone ID: MRT4577_153161C.1
gnncgttctcacgagattgcaaacatgggaacagaatcagggctacatgacaagtcaaaagctgcttccaatataccccaattaatttgtacggggaataacctaaaccggcttcaaagggaactcacaaaaaaaaaagtgggccttttaattgaaaataaaatttgggttttctcacgaaaaaatttttccctttacactttccaaaaaaaagggggaaaaaaactggaaaaactttaatttttgacccatttcaacccaaaaaccctgaccgaataccctccttactgtccgggtggagttgtgaaaccccacgccggtttaatttttggggccccagcctcaatattacaaaagcc

SEQ ID NO: 58296 - DNA, 269 bp, Zea mays
  Clone ID: MRT4577_153162C.1
gaattatggagtcgacccacactttcgtacgggttctcgaaacactagacaccgatcgtggctttcatctttaccaccacacgcgaggcctacgggcgcagggagagcttcctcgccaaggctctctgtgtcgccccgcggccgtcattatacacccgcaaatgcctgcctgcccagcctatgcatgactgatgccgactagttgtgcaaggtcatcgaacatgacatttataacgtgcacgcgcttggccgctgttcgaaatatgacc

SEQ ID NO: 58297 - DNA, 508 bp, Zea mays
  Clone ID: MRT4577_153163C.1
tcgaggccggccggagttccacctcagccggagacagctcgtctctctcactgatccacagcccacagcaggctagctctctagcggtctagccagtccacgcagcgcagggatggcgtcggtcgccgtggcaacggacccgtcgctagcggccccggaagccaagaggtaggcccgccgccggtgtctcgtacgtggagggcatgaacgcctacagcggcctcgaggggctcgacaaggagaccatgctcgctggcgcgcaagaccgctcgactactccttcaccgatgtcgtggtgccgctcacacccgcgctgaggaagcgctgcagggggatcgttcggcgactcgatgaacgacgtcgacaagatcttcaggatcgccgatcaccatgattggtctcctgctcggattgtgcggccacccattaatgctgctcctgttgtacgacctcgaaccagaagtctaactggtggtctcgacctgatctttgaggcgggagacttccc

SEQ ID NO: 58298 - DNA, 496 bp, Zea mays
  unsure (1)..(496): unsure at all n locations
  Clone ID: MRT4577_153164C.1
tgggtacctcgaggccggccggngcccacgcgtccgcctgtcagtttccctctcccctcccgaaaccggattccgtaccgaatctggtctcgccttggagccgaggttgcacgcggttcgtcctgcggccatggaggacgaggagcacgaggtgtacggacaggagatccctgttgacggcgaggacgtcgacatgtccgccggcgacgacgcgaccaagcttcaggagctcgatgagatgaagcgccggctcaaggagatggaggaggaagccgccgcgctccgcgagatgcaggctaaggtcgccaaggatatgcaagatcccaatgcaaccacatctgaaaacaaagaggagatggattctcggtcggtattcgttggaaatgttagtctgctgtcatcaagcctttctatcaaagttttggcatctggttcagtttcagcacaagttctagtgttagcttcgtgggggaaaaaaaaaaaaaaaaaagcggcc

SEQ ID NO: 58299 - DNA, 543 bp, Zea mays
  Clone ID: MRT4577_153165C.1
gggtccaaaaccggatttgcgaacccacctagcagctgaggttagcacgcggcgcgtcctgcggccatggaggacgaggagcacgaggtgtacggccaggagattcccgttgacggcgaggacgtcgacatggctgccggcgacgatgccaccaagctgcaggaacttgacgatatgaagcgccggctcaaggaaatggaggaggaggccgccgcgctccgcgagatgcaggccaaggttgccaaggagatgcaaggtgtagatcccaatgcaaccacatctgaaaacaaagaggagatggattctcggtcagtattcattggaaatgtaagttttatctcttctctttatgtaaattaagaggactcgtgtacagttcaatggctatataatattatctgggggttttaatataatattgtttgttattttcccactttcagtagattgtatgtttattctgtgctccactagaaatctaatttctatgaggattgtattagtttgcagtttatttgtataaaattcatttgttgaacaagg

SEQ ID NO: 58300 - DNA, 1158 bp, Zea mays
  unsure (1)..(1158): unsure at all n locations
  Clone ID: MRT4577_153166C.1
gggaaaaaaaaaaaaaaaaaaaaaaaaaaagggtacctcgagaccggccgggctaataatcggctatcctgtcagtttccctctcccctcccgaaaccggattccgtaccgaatctggtctcgccttggagccgaggttgcacgcggttcgtcctgcggccatggaggacgaggagcacgaggtgtacggacaggagatccctgttgacggcgaggacgtcgacatgtccgccggcgacgacgcgaccaagcttcaggagctcgatgagatgaagcgccggctcaaggagatggaggaggaagccgccgcgctccgcgagatgcaggctaaggtcgccaaggatatgcaagatcccaatgcaaccacatctgaaaacaaagaggagatggattctcggtcggtattcgttggaaatgtaagttttattggctctttatgcaaattaagggaacttatgtatagttcaatgggtatatgatattattgggggagggngggggaaaggggtaatattatattcgattttcactttccagtgaatattatgtttgtttggctgtgctccactagaaacccaatttctataaaaatgcgatcaaaccagcaataaagcatgggatcacattgtgttagtttgcagttcatttgtaaaagttccatttcattgaacaagtgcacatatgatcgcatttttatcatatatttttctattttttcccctcctttgtgttgattgaacaatggcaatggtcgcaggttagtctgctgtcatcaagcctttctatcaaagttttggcatctggttcagtttcagcacaagttctagtgttagcttcgtgggggaaagaaaaaaaagaaggaaaaaaaatccaagaaagttcttgaaaaaagaaagaaaaatagaaaaacaatttgaaaaagcaaaaaaaaaaaagtatacaaaaatggaaaaaaaatagtgatgatgtcataggctaggaattatcccccagggtagccagcagagaatgggtcaggcacattcatggtactgatgtggagtgatatcattagccatttactggcaatagcatgttgactatgcatgcactccagaagaagtgcagcagcatttcaattcttgtggaactgttaacagagtgacaatcctgactgac

SEQ ID NO: 58301 - DNA, 697 bp, Zea mays
  Clone ID: MRT4577_153167C.1
atttcaacctctctcccctcgactagtcgactgtacgttgtctgttgggtgtggtggatttcctccgctcccgccgaacggtcgatcttttgcatggcagcagcggctagctccaaggggcgggcgatcgctgggagcttcgtcagccgcgtcatggccggcaaggccgcctccccgaggtactgggacgacggcaacacgaacgcggtttcgccccgtggttcattctctttcggtttgctcgcctctgctactagtactccagtttttttttttaaatgatgcgcgttcttgttaagttggcccaatccaggatcatgtggtagttgcagcagagcagagcgatttgcttgcttgcttcttagctctgtggctgactctgattctcagtgtgtgtgctgctgctggtggcaagattaatttgctcggcagaaaatctactggaatttgccaactgtaggaggaggagctactgttatcttctcccatggtctacgtctacgactacgactacgactctacgtggacatggcaaccgtctgctttgggaccatcaccagcttcctctgaccgtactagaacatcaccagcttgtttaatccactttcctatttcttttcgagcgctttgcgagtaccagtacaccccgtagattttcattttctacccacttcaactggccaatctccaagacttg

SEQ ID NO: 58302 - DNA, 1278 bp, Zea mays
  Clone ID: MRT4577_153168C.1
acctcgaggccggccggtagtttctatacagttcgagtccatttccctagctcgtgtaatccccgacgaggagcacgagggtacgccctgcagcgggtgtcgccccgatccggtctcgctgctgggtttctatatagttgagtttccctagtcgtctaatccccatcagtctcccctcccaaaaccggatttgcgaaccacacctagcagccgaggttagcacgcggcgcgtcctgcggccatggaggacgaggagcacgaggtgtacggccaggagattcccgttgacggcgaggacgtcgacatggctgccggcgacgatgccaccaagctgcaggaacttgacgatatgaagcgccggctcaaggaaatggaggaggaggccgccgcgctccgcgagatgcaggccaaggttgccaaggagatgcaaggtgtagatcccaatgcaaccacatctgaaaacaaagaggagatggattctcggtcagtattcattggaaatgttgactatgcgtgcactccagaagaagtgcagcagcacttcaattcttgtggaactgtcaacagagttacaatcctgactgacaagtttgggcaaccaaaaggttttgcttacgtggaatttgttgaagttgaagctgttcaggaagctatcaagttgaacgagtcagagttgcacggtcgccaactcaaggtggcaccgaagaggactaacgttcctgggatgaagcaaccccgcggtcgaggtttcaatccgtaccatggccacccctacatgaggccgtatggttatagtccttatggttatgggagattccccagattccgccgcccgcgaagaccttatttttgaagctcggttcccatttggcagaacatgggcgataatcggccgcgttctgttatttcatagcttattcgggacgttcccatgcatgtttctgtattgacgatgcttaagctttgtactgtattgtatcagttatgcaagacgattatgatttagttacacgaaatgcactgttgtgatgctacttggggtgcgccacttttgggcctcgaatatgattgtataagctgatgcattatttattcaaaaaaaaaacaaaaaaaaaaaaaaaaaaaaaaaaaaaaaaaaaaaaaaaaaaaaaaaaaaaaaaaaaaaaaaaaaaaaaaaaaaaaaaaaaaaaaaaaaaaaaaaaaaaaaaaaaaaaaaaaaaaaaaaaaaaaaaaaaaaaaaaagaaaaaaaaaaaaaaaaaaaaaaaaaaagggggggg

SEQ ID NO: 58303 - DNA, 228 bp, Zea mays
  Clone ID: MRT4577_153169C.1
agctcaagcgtcagtccattacgcgggtggaagcagacgcttgagagacatagcgaatacgaagcgtgtacgacggtacagaggctcgcatgctggtagtcctgtaggaactcgagacgttctgacaggcagatgactcgttgcagtcctgcgattctaaggtgacttacaggacaagatcactgatgggcgtgacttacaaggtcatcctcagcaacggcgacttcg

SEQ ID NO: 58304 - DNA, 102 bp, Zea mays
  Clone ID: MRT4577_15316C.1
gtagagctctgtcccgacctgatcacctggtaggttcagagccttactcaattgatcagtatcgatgagtagagctctgaaccgacctgatcacctggtggt

SEQ ID NO: 58305 - DNA, 652 bp, Zea mays
  Clone ID: MRT4577_153170C.1
gactactatcatcatttcaacctctctcccctcgactagtcgactgtacgttgtctgttgggtgtggtggatttcctccgctcccgccgaacggtcgatcttttgcatggcagcagcggctagctccaaggggcgggcgatcgctgggagcttcgtcagccgcgtcatggccggcaaggccgcctccccgaggagggccgtgcacgcctcgtcgtacgacaagaacccggaggagcaggtgcgcccggcgttcgtgccggacgatgtgatcggcggcggcgcggggagccccgacaagtactggagcccccaccccaagaccggcgtgttcggcccggcggcggtggaccccaaccagctgggcgtcgccgctgacgctgctgcagcaggaggcacggtgctggaccagaaggtgtggttccgcccgctcgaggacgtggagaagccgccccccgtcgcctgaaccgcgccacgcccacgcgacgcgacgctgccagcccacactgctgatacaagggcggcggccgggagggagagtcctggcaacgtcatgctcgtgcctgtaataagaacaagcaggagatgtgtgtgcctgtgatgtaccggtgtcgttatcagcgttatacaagtacttgcggttcatatgatcgac

SEQ ID NO: 58306 - DNA, 579 bp, Zea mays
  Clone ID: MRT4577_153171C.1
aaaaaaaagtcagcactaagctcagtcatcccccccttcccccagtatttttgtcgtttttctcctttgatttgcgtgtccattgtgttgtgtaaaaaaaaaaaaaaaaaaaaaaaaaaaatgccacatagataacctaggagaagtgaactaaactagctgacctagaaaacactgggtacccacttggatgcctagctcagagtgttggtctggccaagcttagtttatcctgtaaaccagcttttactaccttataagcccagaaaacaagctaaagcgacaagcttgaaaagctgtttggaagaattttgagcaaacaacagtgactctttaatattaatcccatgcaagttgggcacactaaagagcagacccgccggaggctcccacatgagtgggatctaaggaagggataaatcaagacaaatattctcccacaaatgcggagacgttgctttaaacccgtgacctgatgactcaataagacagctttaaccactgcaccagcaggcctacaccccacaagttgtgcacattagagatatggaatatttttctaccttttattaagcaagc

SEQ ID NO: 58307 - DNA, 729 bp, Zea mays
  Clone ID: MRT4577_153172C.1
gttgcccgtcagtgctgctccccaatagccaatagcaatagcaatagcaatagcaggcgctgtacgacggtgtgccggcaccggctagctcgggcgctataaaatgggggcagccggtgggtgtggtgactactatcatcatttcaacctctctccctcggcctcgccggcggcacagcgcagcgcttccactgttgggtgtggtggatttcctccgcccccgaacgatcgatcttttgcatggcagcagcggctagctccaaggggcgggcgatcgctgggagcttcgtcagccgcgtcctggccggcaaggccgcctccccgaggtactgggacgacggcaacacgaacgcggtttcgccccgtggttcattctctttcggtttgctcgtctgtgctagtagaactactgtgtttttttttaggatgcgcgttcttgttaagttggtccaatccaagttcctgtggtagttgcagcagagcagagcgatttgcttgcttgcttcttagctctgtggatgactctgattctcaatgtgtgtgctgctgctggtggcaagattttgctcggcagaaaatctactggaatttgccaactgtaggaggaggagctactattatcttctctcccatggtctacgactacgactctacgtagagtcgtagacatggcaactgtctgctttgggaccatcaccagcttgtttaatccactttcctagttctttt

SEQ ID NO: 58308 - DNA, 668 bp, Zea mays
  Clone ID: MRT4577_153173C.1
tctctcccacgagatcgttgccgccacagcgcacggcttccactgttgggtgtggtggatttcctccgctcccgccgaacggtcgatcttttgcatggcagcagcggctagctccaaggggcgggccatcgctgggagcttcgtcagccgcgtcctggccggcaaggccgcctccccgaggagggccgtgcacgcctcgtcgtacgacaagaacccggaggagcaggtgcgcccggcgttcgtgccggacgatgtgatcggcggcgcggggagccccgacaagtactggagcccccaccccaagaccggcgtgttcggcccggcggcggtggacaccaaccagctgggcgtcgccgctgacgctgccgccgcgaatgcggctgcagcaggaggcacggtgctggaccagaaggtgtggttccgcccgctcgaggacgtcgagaagccgccccccgtcgcctgaaccgcgccacgcccacgcgacgcgacgctgccagcccacactgctgatacaagggcggcgggagggagggagagtcctggcaacgtcatgctcgtgcctgtaataagaacaagcaggagatgtgtgtgcctgtgatgtaccggtgtcgttatcagcgttatacaagtacttgcagtcactggtttgtgcctgtgataacaactag

SEQ ID NO: 58309 - DNA, 1773 bp, Zea mays
  Clone ID: MRT4577_153174C.1
gccggccggggactactatcatcatttcaacctctctcccctcgactgttgggtgtggtggatttcctccgctcccgccgaacggtcgatcttttgcatggcagcagcggcggctagctccaaggggcgggcgatcgctgggagcttcgtcagccgcgtcctggccggcaaggccgcctccccgaggtactgggacgacggcaacacgaacgcggtttcgccccgtggttcattctctttcggtttgctcgcctctgctagtatagctagtactccagtttttttcttttttcttttgatgcgcgttcttgttaagttggtccaatccaggatcctgtggtagttgcagcagagcagagcgatttgcttgtttgcttgcttcttagctctgtggatgactctgattctcagtgtgtgtgctgctgctggtggcaagattttgctcggcagaaaatctactggaatttgccaactgtaggaggagctagtattatcttctcccatggtctacgactacgactctacgtagacatggcaaccgtctgctttgggaccatcaccagctccctctgaccgtactataacatcaccagcttgtttaatccactttcctagttcttttcgagcgctttgcgagtaccacacacagtagattttcattttctgcccacttcaaactgtcaaatctgcaatacttgctttgtagccgcggaaagagagagaggaagtgcacatcctcaaactggaggcacgcaggacgtgcacgtcctcaaagccaagccacgccgtgggctgatgggtctggtactctggtgcgcggcagttgtcgtccatccaccctctgctctgccgatctgccaactgccatggctcgatgacggtggggtcgggaccaggcgtggtacggtacgctatggagtgggacggaacggaggtccacctggctggcctggcctgtggcctcgcaattatcctcggccccctccccacgtgtcctcttccgctgcaggttggcccgggcagcattattagcaatccgggtttcatgcgcccgcccatgtgcagccgtacccgtgcgcggctgacgtgtttacctactcctagcaacgattttgttgggtcctatcgattcttgcaaaaaaaaggaacatcacttccagctcttgttgcgtttgctaggagcatgttactactgctactactaccgtacagtacagtgataataaactgataaacggccgtcgctcgcgtttgctcaccgccctcattgcattgcaatttgcatcgcgtgttccgttccgtaacgcaggagggccgtgcacgcctcgtcgtacgacaagaacccggaggagcaggtgcgcccggcgttcgtgccggacgatgtgatcggccgcggcgcggggagccccgacaagtactggagcccccaccccaagaccggcgtgttcggcccggcggcggtggaccccaaccagctgggcgtcgccgctgacgctgcagcagcaggaggcacggttctggaccagaaggtgtggttccgcccgctcgaggacgtcgagaagccgccccccgtcgcctgaaccgcgccacgcccacgcgacgcgacgctgccagcccacactgctgatacaagggcggcggccgggagggagagtcctggcaacgtcatgctcgtgcctgtaataagaacaagcaggagatgtgtgtgcctgtgatgtaccggtgtcgttatcagcgttatacaagtacttgcggttcatatgatcgataacc

SEQ ID NO: 58310 - DNA, 436 bp, Zea mays
  unsure (1)..(436): unsure at all n locations
  Clone ID: MRT4577_153175C.1
gcgttgctatagggtttttgccacgccgacgacggtctgcccgttgcacctcaccgttataccaagatgacggagcatgctgcggaagagctcgcacggccagatcgagcatcagaagctcgaggagcaaaagaccgaggcagaagaggttgacgcggaggaagatgaccaggatgatcaggatgacgatgatgatgacagggatgatgatgaactggatggacaagaatgggatgggagtggtaagtctataacacagacggagtgagaagaagagccgaaaggacatgctgaagcttggcatgaagcccataactggtgtaagacggggcactgagaagaagaagcagaatatgctttttgtcatctagaacgcagatgtgttcaagagcccaaacttggacacctatgtcatatttggcgaggcgaanatcga

SEQ ID NO: 58311 - DNA, 299 bp, Zea mays
  Clone ID: MRT4577_153176C.1
gcgtccgccactcgtatttatgatgaatactatcatcgaggccgaaaaggtgttctagcaatcaggacctagtaaagtcgagggatcttttagaactaggtccaggaccagaattgactggatatactcagattacactgtaatgacgggatgtggacacggatccatagtgacgcgggcattacgagatgaaattggaataaggactcatacgaggatacctgtgtcaagcgtgggaacgttctaaacacctgccgagacatatggtaaatcccgaagtaccagaccatcttgtacct

SEQ ID NO: 58312 - DNA, 866 bp, Zea mays
  unsure (1)..(866): unsure at all n locations
  Clone ID: MRT4577_153177C.1
cctcgaggccggccggggactactatcatcatttcaacctctctcccctcgactgttgggtgtggtggatttcctccgctcccgccgaacggtcgatcttttgcatggcagcagcggcggctagctccaaggggcgggcgatcgctgggagcttcgtcagccgcgtcctggccggcaaggccgcctccccgaggagggccgtgcacgcctcgtcgtacgacaagaacccggaggagcaggtgcgcccggcgttcgtgccggacgatgtgatcggccgcggcgcggggagccccgacaagtactggagcccccaccccaagaccggcgtgttcggcccggcggcggtggaccccaaccagctgggcgtcgccgctgacgctgcagcagcaggaggcacggttctggaccagaaggtgtggttccgcccgctcgaggacgtcgagaagccgccccccgtcgcctgaaccgcgccacgcccacgcgacgcgacgcgacgctgccagcccacactgctgatacaaggacgatggccgggagggagagtcctggcaacgtgatgctcgtgcctgtaataagaacaagcaggagatgtgtgtgcctgtgatgtaccggtgtcgttatcagcgttatacaagtacttgcggttcatatgatcgataaccactagaacatgagtgtgcagtacgttcaaacaactactactatcggagcagctacaagaaatcatcaagcagagtagctctcttccgaccgatttctgaactgacagcaccctgctcaactgggtacccaagtagtaattagcaatttgcgtctccaccacatactggcaggtggcagttaagcttntaacccccaacaaacac

SEQ ID NO: 58313 - DNA, 300 bp, Zea mays
  Clone ID: MRT4577_153178C.1
cgttctttttttttttttttttttactttaacttttggggtttttttttggccgggcaaatattcaaattttacatgacaataagattcacatattcccgggtgtgccatgggcaaaaatttgacctttgctttttcttggaaaacgaacaaaaaatttgcactaccgggttttcagatcaccataccaaaaccatcaaattcaaacttttgtggtctaccaggactggtgccattcacttttaaacacgagtcatacaataaagacctaacagttttcgcgcgcggggggcaaaacacc

SEQ ID NO: 58314 - DNA, 363 bp, Zea mays
  Clone ID: MRT4577_153179C.1
ggaactttgggtctgtttatgtgcttgaaaaaaaaaaaaaaaaaaaaaaaaaaacccaaaccaaaaaaaaaaaaaaaaaaaaaaaaggaaaagaaaaaacaaaaatcccccccccccccccaaaaacacaacaccaccacaaaaaaaaaaaggggtggttctcccaaaggatttaagtcaatgcatgtgggtccgtaatgcaaaattcacctaacggggttattaaaactaaacctatgggttgctgcccaaaaatgcgagaatgggaaaaatttcggtgcatttaaatcaaactgttccgaaaaaaacttttccccctttaatcggtcaaaaattaaaaaggtttgaattaactgttccctt

SEQ ID NO: 58315 - DNA, 449 bp, Zea mays
  Clone ID: MRT4577_15317C.1
gggggcaaatccaacccccacccccaggttttccaaaaaaagaaatggaaaaaaaaaaaaccctgccatgccaaacccaaaaaaaacatccatttttaaactggggggccaaagccaaacaaaataatattgggcaccgggccaatgccaaaaaaaaaccccaattttaccgggccccttggaaataaaacctttaactcaggggaaaaaaaacttggggaaaaaaaatttgttccacatgttctggaaccccgggaggcaccaaggggggaaagccgggtaatttttaaggccccccacccgccccggggtaaacgggttccacagcttttttgatatttgggggggcccccccttcccgtacccggaaagaggggggaagggaaaaacccccccggggatcccggaattaaaccccctaaaaactttttcgaaacccccaaaaagcc

SEQ ID NO: 58316 - DNA, 522 bp, Zea mays
  Clone ID: MRT4577_153180C.1
cagcgccggcgccgccggccgtctgcgaggcgctgctgctggcgaccgtctgcatggtcggcctccccgtcgaggtccaggtccgcgacggatccgcctacgccggcgtcttccacaccgcctccctcgacgccggatacggtgttgtgctaaagaaagcaaggaagattgcaaacggaaaagacaatgccaatctggtgctgggagcttttgtggacactcttgttgttctcccagatgatcttgtgcaagtgattgcaaaggacttctcccttgctactaaagatatttctaaaactagtgcttgtgatgtggtggcagccagtggattgatgcagcctcaaacttcacatttgggagacccaaaagcatccagacaggttgagaagtgcagcaggctgtgtcagaatagtgataaccccactgggaaaattgctccaatgaacagtaatgctgcaaatgtctgctctccaattgaacatatagtggcaaattggaatgcaattccaacttctgctgata

SEQ ID NO: 58317 - DNA, 322 bp, Zea mays
  Clone ID: MRT4577_153181C.1
tagcgtatgtacgctcgcatttcagctcttactctttgtggctatgcatgtgcctttctttacttttttttatatttttttgggaaatctttccattcccttaattcataataaagtgttgttgtagttttatgcacacatgagaaatggtataatattaccgcattaaatgtcttactgtttattcagtttatattgtttatataaatgtgtgagaccttgcacgattggtctgttaataatgtttaagttttatgcatgcatattatcaattgggtcttcagttataaatgcagttgctcttttatgtacaatacctatt

SEQ ID NO: 58318 - DNA, 565 bp, Zea mays
  Clone ID: MRT4577_153182C.1
caactatgcacctgcctccgcatccccccttttcccgccgctgctggtgccagtttccatgaactaacatccccttttttcgtgtggtacccaccctgctcttccagcttgtagctcctccccttcccttccaatccgggcttgcactatttccgtcgtcctccccttcctttcaatcctgcagggtgcagcccctccttttcttcgattttgcagttcaacggcgaccggctgaccgccatctgccgggattggtccggcgtggaccttcttgccatctctggcgctgctgcagggcgcccaaccagcagccagtgcccactggtggggcacccgtgtgagtgctgtacgccaatttttgcaatggagagggtcacggtcgtcagacgggcgcgtgagggcggaccgacgacgaaggaattttctcctttacgtacttaatagtagtacagatggtctggtctccatgtatttcttgagaactaggactttttgccggtttaattagtttctgatcctataccagtgaaaactagccactttactggatcatgtttgggactga

SEQ ID NO: 58319 - DNA, 520 bp, Zea mays
  Clone ID: MRT4577_153183C.1
cgatccaggatcgtccgctacggtacccgaccccacttcgtcgcgtccaccaccgacgttaaccgctttttagcatccaccgggcgacaccccgcaccccgttcccacacactactactacataccgttctgttcaaacgcactctgcgcagaccccgccagaccaacggcctacaactatccagccggcggccaattagcagaccgctgacgataaagatgacaaagatgacgagtacaaagagtataatcaggaagacgctgaaggagacctctactaacctgaagacatttaagagtctccagacaaagaggaacgcaaagacaatcatgcaactgtccatccataaataggttatgcacgccttgatccaggtgtcgatcgtatatctccacaagactaccattactgtggtggtagtcgacgcacacattacatagttcaagggtaacttgataagaactttcaccactcattgttagttgctggtcgtaacacaggtccgaattgttttacaac

SEQ ID NO: 58320 - DNA, 354 bp, Zea mays
  Clone ID: MRT4577_153184C.1
ggtttctattcatttcatatggttgcctgaaatgtactacacttatttagttaaatatgttctattttttgtgcgagtaccttcattgtacagcatgggtaccgactggaaccaagttatgacacaatatggaagttacctatccgaggatgatgccactcagtttcagaacactgcatttgctccttcgcctgagataccagcccagggatcaccagcaccacctccagtgaagaaggctcctcaacgcacaaagctagcaaatttcacgtctgaagaggatatgagggtatgtcaagcttggttggctgtgagttgtgatcccattgtgaacactggtcagaagcgtcaagg

SEQ ID NO: 58321 - DNA, 249 bp, Zea mays
  Clone ID: MRT4577_153185C.1
attcggctcgaggataggttgaaaagcaagtatcgaaccagcggtcacagacgcgacagtgccctccctgataaacgacctggacaggaacatacacagcacggtggggcgaaacgagaacactagcaagaaatgggaaggcgtgaagagcaacaacatccacagatttggcaccgtcgacgccgacaaggaaaacggcaaggcacatcacagggacgaacaggcaaaatgtagcagaagactgggagc

SEQ ID NO: 58322 - DNA, 977 bp, Zea mays
  Clone ID: MRT4577_153186C.1
cgtgcctctgagccctgtccattccccgcttgccagacgcctacaagcagactggcctaggcatattctccagcaacgccaactcctattctggtgcaggagatctcgtgctaccttgggctggagctaaggcagatcaagatcgagcgggtcgtggacggcggtatctacgtacagctggaagagagcgtgcacggctgccacgtgttccaggtgcagtccacctgccctccctccaacgagaacctcatggagctcctcatcatgatcgatgcctgccgaaaggcctccgccaagaacatcaacgctggcattccctacttcggctacgccagggccgataagaaggtccggccgggaaaaaaaaaaaaaagccaagctggtggccaacctcattatggaggtcggcgcccaccgcgtgctggcctgcgaactccactcgggtcagtccatcgactacttcgacatccccgtggaccacgtgtccacagccagcccatcatcctcgactacctagccagcaagaccatctgccccgaggacgtggtggtggtgtcgccggacatgggaggggtggccaggccgcgcgccttcgccaagaagctctctgacgcgccgctggcgatcgtcgacaagaggcgaccgggccacaaccaggccgaggtggtgcacctcatcgatgatgtcaggggaaaggtcgtcgtcatgctctccgacgcgccgttggcgatcgtcgacaagaggcgaccaggccacaaccaggccgaggtggtgcacctcatccatgatgtcaggggaaaggtcgtcgtcatggtggacggcatgatcaacacgaccgagaacatctccaagggcgccgagctgctgcacaaagggagcgcgagttgtgtacacctgcagcacccacgcggtcctcagcccacccgcgctccagaggctcttcagcgacctcttccaggaggtgatcatcaccaaca

SEQ ID NO: 58323 - DNA, 601 bp, Zea mays
  Clone ID: MRT4577_153187C.1
tccgtcttatttggcttccagtataattataggccaggatgacaattagtaattaaaactaggtttgccctatataagtaggtttaggttccagtctaacattttataccaagatcaattaacactttcagataaaattctttctaagcaaagaacaagatatgacttcaattaatattcatagcctttggaatctaaagaaaaaggaagaataattcatgagtttgttcattgttctttcctactgaatacattaaccacttcttcctaactataagagaaacacgccagtcttaaccgtgaaatttctcactatgtgatcacagtaatttaattaatgattttaaagtaatcccatacatatctctatatttcatgacattgttgaaattataaattttgtcacttgcagaacttaagtaattatcttaagatatgttataataatgccatttaatgtttggattataaaatatttttttatgaatatgttttaggagttaaataagacttagcttttctgcagtctttctcttctgttgagaaactatgatatacctccttttgtccaaagaatggtgtttaaagagatttgaatcag

SEQ ID NO: 58324 - DNA, 615 bp, Zea mays
  unsure (1)..(615): unsure at all n locations
  Clone ID: MRT4577_153188C.1
ctctttacattccctaatcwaatttactcccaaaatacttacaaccattatttcaacatwaattatacatattattatacaccactaaacttatgcatcattatatccatcacctccttactctaattcccactttttctcccttccgwtctcctcttcctcctcatgggttaattcattctttatttttaatttctttctaatctcttcttttttctttccctttwtcatttcatcwacattcttacatttcatgtctatcatacccttcatnttcacatatttttcanccaatattanttccaaaaacytggscttgtcyacctttacaaatcccncatcccaattctttaggkcctcacccggrggggsggkgctttttgsggrggsggsacccacctcytccgracccgscttchaggsggsggsttcggsttcggsggsatttacytkcttttttcaatactccattacctttgataagrtctttgrgtttactttaagaaaagdggrtyccyttttccgcgcactcatcctccatcatttkgsgggttgtcttcbactccatccccaccccctcttccacctccaactcctccccatccgagcttttta

SEQ ID NO: 58325 - DNA, 1497 bp, Zea mays
  unsure (1)..(1497): unsure at all n locations
  Clone ID: MRT4577_153189C.1
ccggggccttttacctgattcacctgataaatagtatgcctacatgtttgagatagagttttacaatactggaatacaagtagtacaactctaatactgcattacatcttggtcaatattctaggtctgtttcattttacattttgaatgttgtcaggaatattagtttgctagaaagccgccttgtgttcttttgatgggatcttctccatttctaaagccatcatcttgtgtgtaaaaccttgaggtttaatttttgtcttttttctgcaggacttctgctactatgccaacacatttctccttgtaatgattctcttctatccgaaagatgaaaaacttttcatggtttgcttctcgtttgcagaggtatgaaaaatactcctgttgatttccagagcttgagaaccctagctagagtttggcgagtggtgcggaggcgcggctgctcctgctcgtcgcgacatcgaatttcagcgccgcccgcgcgatccttggtctcttcgcccgtgaggagaggcgcgacaatggctgggaaaggcgggccgaccaacctggagaaggagcagatgtttgggatggcggagaaggagatggagtacagggttgatcttttcaacaggcttacaaagacctgttttgagaagtgcgttgaaaaaaggtataaagaagctgagctcaatatgggtgagaacagttgcattgatcgatgtgtttcaaagtattggcaggtgactaatttagtaggtcagatgcttgggaaccagcctcagatgtgaaccgagatgcactagttccattttgtagcagaatcctattgctctgtttattctttttggttggtattagaatcccgccacctgctattaagtacaccaatacagcaccagacttgttaatgcgtggatcgctctgaagaaaaatcacggtgtcttgctctttccagtgatgtgcattatctttgaatcatgaacagggaacatgcctgtaataaatttatagagctcgagagtgatcctgtttcgaaaaaaaaaaaaaaaaaagcggcctgagtgatatgcatcttgctttcttgagagttgagaccattaattcggaacaagtaggccgttggtggctaccattttggttgcaattattaataatccagcaaagagatggttgttagtactcagcaattcatcatatagatgctttactaattcataatgcaacctttacttttctcatttccatgtctaactgaaggaatcgaatatgttcccaagaaatggtgactgtggtggcttctcctaaatagtcatacaagttctaatacaatcaggcttgaatcttccaaagacctcttagcttaaatgttaatcagttaatgtaatcttggggttttcctgagtgtctgaagtgtctgtgatgtttatggcaattgacaacttancagttgacatctctactcttatattatcactcctctgtcctcccaatccaggcctcttttac

SEQ ID NO: 58326 - DNA, 301 bp, Zea mays
  unsure (1)..(301): unsure at all n locations
  Clone ID: MRT4577_15318C.1
ccgcggcggcagcgcggcgccaggctccacctccaacggaggggaacactccccgaagtcctccaagcctctctcccggctcgcccgcaccgcacgctacgccaccaccgagcaccaccccgtcttcgacctcaccggcatgctcttcacagccgatatctacaccttctcttccccctccactttatctgccgagcgaacgcgccgggtcagtcgncatcaaccaccacgccggcagcggtcacccgaccttccgcaaaaccatcagctgtaaaggctcccccagaagcatatgaaagca

SEQ ID NO: 58327 - DNA, 297 bp, Zea mays
  Clone ID: MRT4577_153190C.1
cccaaaacttgtaggtttagcctacaaaacaggagcattatccattagcccttaggacaaacaatacatatttcacttggaagtcctgaagactcacaagcacatactcctattttttgattcaaacattcatacatgcaccaatcatagcgtaccactattacttgccaaagagcaatttcattaggccatcaaacacttgcccccgcttcacagtgccgccacgcacggcctcctcgtctggcctgaaccccttccccttcatcgtctctagcagtgctttcccctcttccactt

SEQ ID NO: 58328 - DNA, 364 bp, Zea mays
  Clone ID: MRT4577_153191C.1
aagagattggcagagttaatgaagcaattcaggattatgttcaggcagcaacaatctctttgaatgtgttccctctattaactagtgcatcagctgctgtaggatctatacggagtacttcagtgtaacatgtgatagcatcagcatactttcgctgttgcttgtatatcacagcgaagttggtaattgcggaagatcaccaagatgtcacagagatagctgctttgtaaaatgaattagcagagatgatcaagttccaatcaatgtgcaagtatcgtagtcagtacttctgggtgtgcatactttccatgagggtgcttatcctgatgctacaatgcgtgcttcggaagtacgccgtatagat

SEQ ID NO: 58329 - DNA, 552 bp, Zea mays
  Clone ID: MRT4577_153192C.1
aacaccccaagaaagctccagaagcaaactcgcaactaggagtacggcacggaagctcatgctagaagcaacccacttgcagcactggaggccagaaggaaaaaagcaggatactaaaagggcgcctagtctccatccttttcttcgttcggatgacttcaggataggcttgcctaaactatcagccactaactcccatcaaaatctagctttttattgcatctgaccaggctcatgaccactactataggtgccctcttgtggtgtctgcacaacctggtcccgatcgctgcacaccccgtatatgctcctcgctttcatgggctataaaccgagcggcagccagctagcatgatttcacctcaatgtgtccacaccattcataatcttgtcggttgatctttactcagaatatgcccatctggttattattccaacagatcccactgaaagctccgtttagcgttgcagttgagtctcgagaactcagggtgatgcatctcccaccgaggcattccttgcgcgttgtggacagccactttggtatttttt

SEQ ID NO: 58330 - DNA, 382 bp, Zea mays
  Clone ID: MRT4577_153193C.1
atcacgacacttcaacggctgcacaccaacacaaatcaaatccctccaccaaccttgaacacacaaagcttccagcgcgccaacccgtcaacatgtctcttcactatcttccccccgtcaagccctcggccatcgccctcggcaccgtcttcaaccacgccaccgagctcgcgatcctcacgccgctcttcggtaagacctaccagcgcgccaaggaggctcacaccaaggaggagttcctccgctccaaggaggccaccagtgccgccgttgcttggggtacttcgttcctcgggtcgggtctccaggcctatggcgtgggtgcgctcatcaatgccaccggcactctgagctacaagggcgccgcctacctcggtgctct

SEQ ID NO: 58331 - DNA, 209 bp, Zea mays
  Clone ID: MRT4577_153194C.1
cccacccgtccggccaagatggctcctgagggctaagaaaagctgtacaccaaggtcaagagcattcacgacagcctgatcgaggctggtgtccgcgtcgagtccgactaccgtgagggctactcccccggatggaagttcaacgactgggagctcaagggtaatcctcttcctaaccaattccgtcccaaggattcccaaaaaggttt

SEQ ID NO: 58332 - DNA, 525 bp, Zea mays
  Clone ID: MRT4577_153195C.1
cacctcaaactttttcttttccttggggctgttttacccactttgttccggggaaaaaacctttactgaggaccggggggaccatagttgagtggcccaacctttaaatgaacaaaaccaggtcttgggccccttttcagggacctgggcaaaaaataaccaattcggctaaacccactacggattcccccttgaaggcttaaaaaacaccttttgcttcaacaggaaaaaccccccccctctcatttttgggggctaggtaacaggccaggcccaagttggcccttttgaggggccaccaccatgggaaaggcgttcactttcaaaaaaggagggatcagggaccttggcaacaaaagcccactttttgaaaactttttcaaagttagtagggaacccaagggaaccagccccaacttcaacttttagggccccctttttattgcctctgcgccctttcttataaaaggaaccctggggtttatcgagcgggccattaaacggtttcggcttcaggcctacttt

SEQ ID NO: 58333 - DNA, 495 bp, Zea mays
  unsure (1)..(495): unsure at all n locations
  Clone ID: MRT4577_153196C.1
aaaacccggggcgcgagcccgggcggagcggacgtcgctgcacactctcggtggcagtagcaaatattcacatgacaactttgaacgcctacgaggagaagagggtccatgtgaacggcacttgcacatgggtaagcccttcctaacggacggggcaaacccgctaaataactcgatcacgcccgtgacccgaaagggaatcggcataagcatttcccgagccggtacgacatgtcagacacctacactaggaagcccggagaccccagcggtcgcctctggaagaggtatcttttatgcttaacggtccttctaccctgcaatcagttcaatctgaggtaggcgtcaacgttcctaagaaaccgaacatcgcgcgatgttccgagctcccccggtggcccttgaaaaaacttgagaccgaacttcatcacgctctgccgaactcataacgctatctggtctncaaggccaacactctttgccctatggacacaa

SEQ ID NO: 58334 - DNA, 187 bp, Zea mays
  Clone ID: MRT4577_153197C.1
cacccaaaccctatacaaaaccaatacaaaactccaaataatttcacatatatatcactctctccatcttcctattaaacctacaatctcttaataatcactaacaacccatcacctaaacacaaaccaatcacttcacattcccccaatccttattccccaaccactacctttacccactcttcta

SEQ ID NO: 58335 - DNA, 555 bp, Zea mays
  Clone ID: MRT4577_153198C.1
ataaaaaaaaaaaaaaaggaaaaaaaaaaaaaaaaaaaaaaaaaaaaaaaaaaaaaaaaaaaaaaaaattaaacttaaaaaaaaaactttttctattggccgcatttctcacacttatggggttaattttgggggttttttctcaccatttttttggggggtgcggaattcctttttttagggggccattttttccctttttactaggccttttttaaaaaactgggccgctgtttaaaaccctcgtcgtttccgaaaataattgtgttttcccaacatttttttttttgccagatatctccttttttaaaaggcccgtattattcaaccattcccaacactttggcgtttttaaaaatttttgcaccctctttttagattggaattaccctttgtgggtgttttttttacgcccagggtgatggtttcacttcacaagggccctatacacttgttcctttccttttgtcccctttttttgttttcccccccgccttttttcccccttatgctcctttttccccggctacttttaaatttccggttttttttttt

SEQ ID NO: 58336 - DNA, 234 bp, Zea mays
  unsure (1)..(234): unsure at all n locations
  Clone ID: MRT4577_153199C.1
actgacagccctcgntcctttnttttttttttttttttttgtattattattcgtcnttggtttggggttgtttttttactgtgatattaccttctcttactattttttcatattcacataatcagtgaaaacaagtctttttttattcatatatgacaatgctgcgcaggtaatcaacattttgttccccccataaaaatgcatgttataaaaacgcaaacttactctcttgtt

SEQ ID NO: 58337 - DNA, 115 bp, Zea mays
  Clone ID: MRT4577_15319C.1
atatcctattttcctcgatcttgatggcaaaccctttggtggaggcaaaaaagaccgacggttggatccacaggggtacggatagagatggacctgtacgcctacgaggtactta

SEQ ID NO: 58338 - DNA, 1558 bp, Zea mays
  Clone ID: MRT4577_1531C.1
ggtgacccctcgagccggccgggccttcgatcccacgtcttctcaacctttcttcttctctcctcgagaaccccaatccaaacccccaaccgccaaaattcctacgagatatatcacagaaatatcgtcttggctcagatcgtgcccgaggtgatccagatctctactggttcattttcctctcgtcgtaacctggtcccgttaccattacctgtttttggattgcatcagtgaggaggcagtgagttttgaggggacgcaggatcatggcgtcgtcgctggccgaggaggaggaggccttcgagcacacgcttctggtggtgcgcgaggtgtcagtgtacaagatcccgccgcgcaccaccagcggcggctacaagtgcggcgagtggctgcagtcggacaagatctggtccgggcgcctccgcgtggtgtcctgcggtgaccgctgcgagatccggctcgaggacccggccacgggggagctcttcgccgcctgcttcgtgctgccggggcagcgggagagcgccgtcgagaccgtgctcgactcctcccgctacttcgtgctccgcatcgaggacggcagggggaagcatgccttcgtcgggctcggcttcaacgagcgcaacgaagcattcgacttcaacgtcgccctctctgaccacgagaagtacgtcaagagggagcaggagaaggagaccacgggcgctggcggcgaggagactggcggcggtgagattgatatacatccggctgtcaatcgccgactcaaggaaggtgaaaccattaggataactgtaaaaaacaagccatcaactggaagtggtatgctttcagctgctggtttatctggagggaccactgcaaaacccaagacaagcatgcttcttgcgccacctccaggcgcagctgggaagcttagatctcctcttccaccaccacctaacgaccctgcagctgcaaggatgaattctggacatactgcaggaatcagggctccaaaagaacccaccaagagaaataacgatcctttttcagatctttctgctataaagcaaaatctaccttcatctgctgaacccggacaaacaaagagcacaggagctggatgggcagcattctgacgatggatgcatgatctactgctactattggcatttgtttatctgaagaaggggaatgggtagttgaagcaccgaacaaggatctggaactgctggatgcctctacccctttcgaaactgaatggttaaaatgattgatcaacctaccagttccagttgtcacttgtcagtcgagaaataaacctttcccagagttgtattacccgtctcaccacatgaatggatgctcacattttctggatttagatacagcgtcccatcttgtttttatgttattcgtgctatgtttcacaaagcaataccagaatcatactgacctcgatgtgtattttgcggcgaaagattggaaatactgttacaagtgtgtcaaaaaactgtttgcaatggtcttcaggcctgtttggattatgggactaccgtttaattcatccttaacc

SEQ ID NO: 58339 - DNA, 417 bp, Zea mays
  Clone ID: MRT4577_153200C.1
ctagtgttggagagaagagaatacactacactacgcatggcgaagcagcagcagggccagggcatggcggcggccgagacggcgtcggcggcttcgtgcaacgccgggcagctggcggcgtgcgcgccggcgatcactgccggcgcgacgccctccgcgtcgtgctgcggcgtctccgtgccgcgctgctagtactagtacgtgtgctgtgcatgcatgcatgtacgtgcgcacgtgggctgatcttcctgcttgtttcgtgtcttgccgcgcgccatcaggtgtttgtgtcacttttctgtttagtctctctacatgtgtactggcctcgtgtaccgctcctctatagtcgtgtcgtgtacgggctaattaatatatatacgacgaataataaaaaaaacaaaaaaacaacaaccc

SEQ ID NO: 58340 - DNA, 820 bp, Zea mays
  Clone ID: MRT4577_153201C.1
tcgaggccggccgggtcgggacaactcgaccggtctgctagtggttggagagaagagaatacactacactacgcatggcgaagcagcagcagggccagggcatggcggcagtggcgctggtgctgctggtgctggcggcggcggcggccgagacggcgtcggcggcttcgtgcaacgccgggcagctggcggcgtgcgcgccggcgatcactgccggcgcgacgccctccgcgtcgtgctgctccaacctcaaggcgcagcaggggtgcttctgccagttcgtgaagaaccccacctacgggcgctacatcaacagccccaacgcgcgcaaggtcgtcgcctcctgcggcgtctccgtgccgcgctgctagtactagtacgtgtgctgtgcatgcatgtacgtgcgcacgtgggctgatcttcctgcttgtttcgtgtcttgccgcgcgctatcaggtggatgatctatctagaagcgctaagtgtgctcttatcaacagcacgcactggcgcgaccaggttgccattggtcgagcactagccgatgccgcaaaaaaagccggaatccagcactacatctactcgagcatgcccgaccactccgtatttggccaaggctggaaggcactaccaatgtgggctccaaaattcactgtcgagcaatatgtccgccagattggtctcccggccacctttgtctattgcggcgcataccacaacaactttaccggcctcgattcccccctgttcgcatggacatcagtatgacggcagcttttgtctggcaggccccgtttcacccagatcagcccctcccctg

SEQ ID NO: 58341 - DNA, 747 bp, Zea mays
  Clone ID: MRT4577_153202C.1
actcctacgggcgattgggtacctcgaggccggccggggccggcaactcgaccggtctgctagtgttggagagaagagaatacactacagtactacatggcgaagcagcagcagcagggcatggcggcagtggcgctggtagtgctggtggtgctggcggcggcggcggccgagacggcgtcggcggcttcgtgcaacgccgggcagctggcggcgtgcgcgccggcgatcactgccggcgcgacgccctccgcgtcgtgctgctccaacctcaaggcgcagcaggggtgcttctgccagttcgtgaagaaccccacctacgggcgctacatcaacagccccaacgcgcgcaaggtcgtcgcctcctgcggcgtctccgtgccgcgctgctagtactagtacgtgtgctgcattgcatgcatgtacgtgcgcacgtgggctgatcttcctgcttgtttcgtgtcttgccgcgcgccatcaggtgtttgtgtcacttttctgtttagtctctctacatgtgtactggcctcgtgtaccgctcctctatagtcgtgtcgtgtacgggctaattaatatatatatgcgaagaataaaggatgagttcggccacttcgcataaaaaaaaaaaaaaaaaaaggcccctagggcataaaaggatgagtacggccaaaaaaaaaaaaaaaaaaaaaaaggggggccgccgattagccccacctctttgttcccctttactgaagggctaattgc

SEQ ID NO: 58342 - DNA, 822 bp, Zea mays
  Clone ID: MRT4577_153203C.1
cactccttagggcgattgggttcctccaggccggccggggaccgagctaggagaagcgcgaacgccgtgcatgcgcagacgttgaggtcgagggacacggtatctctgagcttcatcagagagcgacccgccaccgccacgcttggccgcaagccgagaagagtgccgggccgggagaccggacgataattgatccgtagcagattcgctaatggcggagacggcggacatggagcggatcttcaagcggttcgacaccaacggcgacggtaagatctcgctgtcggagctgacggaggcgctacggacgctggggtccacctctgccgacgaggtgcagcgcatgatggccgagatcgacaccgacggcgacggctgcatcgacttcaacgagttcatcaccttctgcaacgccaacccggggctcatgaaggacgtcgcaaaggtcttctgatccattacatcttcgtccatacgatacaatcgatgatgaacctgcttatatacacacacatgtaccattcagctccaacatatgatttcgatcagcttgcctgcctcgcctggcttaatgctgtccttcgccttcctataagcactaagctattattaggattttgttttatttaacttttttttgtctccaatctaatatatgtggacgttcttttttattcattttccccctattttggttcgatcggataagtatttctatgtaattaattcattcattggagataagcgatccatctccttataattcgtaaacgaagtactgtatttcaagggaaaacgtgtgcttatttttataatcgattc

SEQ ID NO: 58343 - DNA, 313 bp, Zea mays
  Clone ID: MRT4577_153204C.1
ttgggttacagacacagcaacaaggccgcagggggggggccggggaagaaacaggcgccgagcccaagcgaaggaggggagtagccaggaacacagaaccggcagccagaacagaatgacggagcgagggaggaggcagaccaaggcaaagcaaggaggaagacagacacagagaaaggaccagacgcccgaaaagacaggcaaaagcaaacagacagcggaacaagacggacgagcgaagaaccagccgaagaggaagaccccaaaagacagcaaagaaagggcgggcaccggagcaccggagaagcacaag

SEQ ID NO: 58344 - DNA, 385 bp, Zea mays
  Clone ID: MRT4577_153205C.1
acgacatactaagacgcatacggataaacatataaatcacaatcaaaaaaaaatcacaaatgcaagaggtaaaagggccatgtcacattcgggggccagcacttcaatatcgagaattccgcacgtttagttccgctgttatgcccgctgactcgacttggccacaaacaaccactgtctccagatctccttaatcacctaccgcgaaatccctgatttcactatcatatcactatcggtatacccataggtccttatggcagcaggttgcgtcaccttaatcagccccatgacgcaaatgcccatgcccaatttggcattatcacaatggtgctggacggccgcaatattagcgtcatgctgaacatgcttgccaacgatcacg

SEQ ID NO: 58345 - DNA, 399 bp, Zea mays
  Clone ID: MRT4577_153206C.1
gggagatctgggttttgggcaaagaacattaaaaaggggggggtcattacccttttttggggggttccttggggactggggttttttcaatttctacacaaattggatgggggacattggctgggtgggggtacccgggctgcacaggccattaacgcttgccagattgcaccttgggaacggggagggcccgctcctggccggaggccgccctgggtctgcccttggccggaagggtcccccccaaaggtggggcgctcgcccacgcaaagccctggaggggccacaagagtccgccgcaccaaatcttgccaaggggccggggacaaccccctaaaccgccagggctgggaccgcggccgttgggcctgaaccaaaaggggccccgcgccccccttg

SEQ ID NO: 58346 - DNA, 309 bp, Zea mays
  unsure (1)..(309): unsure at all n locations
  Clone ID: MRT4577_153207C.1
caccaaggggcnncggaacaaaangcacacgcaagcnnggcagaaccgagnagcnaaaaggcgncancgagggcaaggacacccggaagagncnngccnnccaagagcnccaagcnngcaccaccgccggncgaaagggggcccaacnngncggccagcccagccnncncaacagcagcaacagaancaccaccgccgacgaagggggagacacccnnngnggnngaaagcacagccagcnacaaggcaaacgccacagagccagcngcaaacnacgggaacacaaacacacccaagggaccgcaccaa

SEQ ID NO: 58347 - DNA, 340 bp, Zea mays
  Clone ID: MRT4577_153208C.1
gtgcggcgctcgaggccggccgggtcggggctcgatcctagcttcccttccaagaagcgcagcgcccatggccatggccacgcaagcctccgccgccacgcgccacctgctggccgccgcctgggcgccggcggcgaagccgcggcagctgagctcgcagctcgcgctgccgtcgtcgtcctcccgcgggccggccccgctccgcgcgtccaccgaggaggcgaaggaggctgccaaagcgtccgcgtctccagacatgaaccacagaatcgccaagcggaatgtccctgacaggaggatctacctgctccgaaaggctgatggacagaatgtatacgcc

SEQ ID NO: 58348 - DNA, 849 bp, Zea mays
  Clone ID: MRT4577_153209C.1
gaggatgtctaccgcaagtactactcaaactgctggaattgttgggctttaccggggatttagacatatattgtgtggggaattatggcttatcgtagcctgcattatcgtgactttacaattgtatcaagccagatgcccttactggcagcctccaggacaacttctttgccagttttgctctgggttggctgatcaccaacggtgctggtcttgcatcttaccccattgatactgtccgcagaaggatgatgatgacttctggtgaggctgtcaagtacaagagctccttggacgcattccagcagatccttaagaaggaaggccccaagtccctgttcaagggtgctggtgctaacattcttcgtgccattgctggcgctggtgtgctttctggctacgaccagctccagatcctcttcttcggaaagaagtacggctccggcggtgcttaaatggagaaaaatgatgacgaacaagagcagttcgctcccggtccagcccagtcaggatctggtcaagtttttgcctttcatatcgaagaaattaataatttatgtaggagaatttttccaacattcgttttgggcggagacattgatctcaaaacactcgtaactgtcctactaggtggtggcatgggtccccaaaacatggtcatagggtgtgtctagtctgcccttcgttgcagccgggcaattttccttacatatattgcctttaatcaagtatcagatgagtgtcaagtcgctgcggttaattgtttgtttttcttatgctttgcttgattgtgatagcatgtttattataaatgggcctcttgagaaaaaaaaaaaaaaaaaaaagaaa

SEQ ID NO: 58349 - DNA, 1186 bp, Zea mays
  unsure (1)..(1186): unsure at all n locations
  Clone ID: MRT4577_15320C.1
cccacgcgtccgcccacgcgtccgatggatatcaatgattttgtcaggtttttgagaagcttgggccaagcttgtatgattttctaaagagaaatagataccaacctttccctgtggaacttgtgcgggagtttggacggcaactgttggaatctgtagcatatatgcatgagttgcggcttatccacactgatctgaagccagaaaacatactacttgtctcttctgagtatataaaagttccaagtacaaagaagaattcgcaaggtgagatgcatttcaagtgcttgccgaagtccagtgccataaagctgatagattttggcagtaccgcctttgataatcgggaccataactcgattgtttctacgaggcattatagggcacctgaaataatattaggtttaggctggagttttccatgtgatatttggagtgttggctgtattcttgttgagctatgctctacacacgagaatctggaacacctagcaatgatggagagggttttgggacctctaccagaggatatgatacggaaagcaagctcttcagctcagaaatattttaggagagcaacacgattaaattggcctgaaggtgctgtttcaagagaaagcatcagagctgtgaggaaactggatcgactaaaggacttggtatcgaggaacgctgaccattcaaaggtggcactggtggacttgctatacggtctcctacggttcgagccatcggaacgcctgacagcagaagaagctctggaccatccattcttcaggaacccaacatgacttgttgagcaggcttgactcatgtgtaactctactgaaggtggtggtgggaagcaggcagagctgtccattgcaaagctgaaagcattttgctcctctataccagagagtttgtgtaaggcctgtcaatggggcttcttgtggtgataaaactgatggctttagtcacccaatgtcatgtacactagcatttttcctagggagcttagttcgccagatggcgcttgtatgttgttaaccgggatacactatgagctgtgccccgatgccctggtgccataatccaatcgcaaatgttgaaatcaagcatagcatgcgtccgtatagtttatgactgaattgtaccttggaatgcttgcccttcaaaaaaaaaaaaaaaaaaagcccctanggcc

SEQ ID NO: 58350 - DNA, 596 bp, Zea mays
  unsure (1)..(596): unsure at all n locations
  Clone ID: MRT4577_153210C.1
ggcctaggggccttttttttttttttttttgtttttttttttttttttttttttttttttttttttttttttttttttttttttttttatttctgagattactggtatatccctcctttaatcaggaaaacaaaaaaaagaaaaactggagaaacacaaaaaaaaaaaacccataaaaggacatctaaaaataaaaaaacaaacaaaaaaacccctttaaaaccactaaaaaaacggaagaccaggggctgaaaacctaaagcaaggtatcgttgctttcattcacttgggggttgaccctccgcccaccatggacggcgtcctagggctgcgctcaggccagagctcaaggacacgaggggtgaatgctttttcaaaaagggaggggggggggatgccttccagaacggccacaggggggccacctgagctggtgatcttcggggggttgacgcggttgatctccccccggatnatggggaccaggttgcctaggatttcggccccggggggggtcccgaagggaacatgaatgtctggggcggaaggggtgaatggaatacccgccgattcctcatattcagctgaatttaggc

SEQ ID NO: 58351 - DNA, 173 bp, Zea mays
  unsure (1)..(173): unsure at all n locations
  Clone ID: MRT4577_153211C.1
tttttgtcacggggggggggggggggggggataggagaaagagaagtggggatgagnnagaagtagcaagccaagaacaataatagnaccaggataggggcgaattggtcaattgccatacggaccggcaaaccgataactcgacatacttatcacccaacgatacaccggac

SEQ ID NO: 58352 - DNA, 765 bp, Zea mays
  Clone ID: MRT4577_153212C.1
ccggccgggagcattttgcgccggaacaaaaggggaccgaggaaagcccctcaaaaagtccccaagtagccagcagactgcagcaacaaagcctgtatgaccgacatgtgggccctctaacctacgcttccctgctcctctgtcctctccctcccgtcccgcgtatcgcaccatttccaaaccccacgtcaaaacccctccctctccgcctaccattccccgccaacgccaccgctccccggtaccgccgccaacaccgcctcccctccgcaacctcgccggcaaaatctcaggccgcggctacggtcgcaactcttcgacgcggaccctgccctgcggccgtacatcgctgggttcatcgcgagtaccgaggatcgaaaaggctccgccaccaccgctgcgtcgcccaccgtccccgcctcatgaatcgtggtcccgtccgctgctgatgttcgagttgaatacgacatcgagtctcagatgctaatgccaatcccacctggcgaggtagtagcagaggctgtcggaggatctcatgggtggctgcgctcttccctggacagattatctggcagctggagaatatgctccagcaatcgtgccactccagcggttgtgccagtgtcctcacggcgtaccactggaagttggagccacggcaatgactcagattgctctaaggtgcagaagccgctgccagttccagaatggtaaggaggtgccagaggaagtcaggaggtctatcgggtggctgggatctttggc

SEQ ID NO: 58353 - DNA, 2042 bp, Zea mays
  Clone ID: MRT4577_153213C.1
cggacgcgtgggcggacgcgtgggctcggagcagttgctgcagctgcaacccccctgcgcctctcttctcccggtcccacccgcccctccgccgcctagggcttccaaatcccctcagcttccccggattccgctttcccccgtcgctgcaaggttccgggaggttctaatctcctttgagcgccgcctgcccgccgtggctgtttctcggtgttcaccgcgttcctccgtgcaatgccgggcctaaacgcggctggggttagggttcctggcccgcagctcgcttcaatttgatttttttggaggtttttatagggaggagaaagagtccggatttcgaggagttagtggttgcgtgattgtctcggcggaggggaatctcaagtttcgtggccggggttttagcccgtgtggaatgaaaacccggtaatttttgaatttttgggcggtaaaaccctgctggttagcctggtgtggtttccatggccggggcgccgagggcccggtccctgaacatcgcggttccggaggcagaggcgaggccggtgctggtgccaggaggcaacaaggccaggtcgggcccggcgaacgcccggaaaccgtcgccgaagcccgtgaggaaggcggagccggcgccggcggggacgccagaggagactgtgcccgccgcgaccaaggcggaggagggcgcaaagaggaatgcagtcggcgggggtggaggtggcgcgcccaagggtgcgtccccggtgccgtcgccgcggcgcacacctcctgggccgccgtcgaggaggaacgacgcgccgctgtcgcatccgggcttgccgctcagcgcgtcttgctcctcggatgcatccgcggagtcggtccgcgcccggcgggctttcaccgggaaagtagagaagggccggtcggtgccgacggctcaaccgaagcaaggcaaggctgtgggtaaagcggtggagagcaagcccatccgcgtggaggttgttgctccgatgacagtgacaccagaggctgtgcaagggaagaggaggtgcgcgtgggttactccaaccaccgatccttgctatgtcactttccatgatgaggagtggggagttcccgtgcacaatgataggagattgttcgaactacttgtactatctggtgcattagctgagcttacgtggcctgaaattctcaagaagaggcaacttttcagggaaattttcatggagtttgaccctgctgctgtctctaaaataaatgagaagaagcttgtcgcacctggatgcgttgcccattctcttttatcagagcaaaagctccgagctgtacttgagaatgctcgccagatactaaagatcgctgatgaatttggatcctttgatcggtactgctggggttttctgaaccacaagcctatagtaagcaagttccgctatccaagacaagttcctgtgaagagccccaaggcagatataatcagcaaagacatgatgagaagggggttccgaggcgtgggcccgacggtcatatattccttcatgcaggctgcggggctaacaaatgatcacctagtcagttgcttccggttcgagcattgcagtgccgttccaactctttgcgcatgcgacatcgacagggcaaacacgaaggtggatctgaaaaaagatgaggtgacagcgaagatctatcgcgaggaggtaatcgcaaacccagagatgctgaggacgatcgatgctcttaccgtttcgtagcaccatgtgcatgtgggaatggaagagcaacatggtcgctgaacttgtgtcatctcttatgtggacagtgtgctaggctatcctttgcattgaggtcaggaatcaaaaaaatgcttattatgtaaaaaaatcgttctgttgctaatgcttactctgttgtacattgaatggttgggggaagctaaggatggtggccttttcttactgatccagaaactgtcaaattacttgctgtcaataattcagcagttttttcctgaccaggctatcctttgcattgaggtcagaaatcaaaaaaatgct

SEQ ID NO: 58354 - DNA, 368 bp, Zea mays
  Clone ID: MRT4577_153214C.1
attggggattgttggtagtggatacgggcgccgggccgggctccaagcggggaagaaaaaagggcaaaaccgggggaaaggggaaacccggaacaaggcaaaaagccagacaaaaccccagccgaaagccaaaggggaaaacaccgagtgacaaaagagacacccaaaaaaaaaaaaaagcgaaaagaacacgggccaaaaaacaaaccggaaaacaaaagggaaaaaaggaataacaaaacgggcaaagaaaggggaaaagcggaaggagaagcgggccccctatcgggtaactgaacaactactcgcggaccgacggctttcggcagcggcaacagctgacaaaaaagcgaaaagccggctaaccg

SEQ ID NO: 58355 - DNA, 345 bp, Zea mays
  unsure (1)..(345): unsure at all n locations
  Clone ID: MRT4577_153215C.1
gagctagttcacccactggtattcaagctcctgcgggcagccatatccagagtcagctgacatggtcaaccggttgtgaaaagcgcacaacctccggcaccagtttccttttcgtttccccttttttgcacataaaattgacaagtcgctgaaattgccagttttcccctaaaaaaaaaaaaaaaaaaaaaaaaaaaaaaaaaaaaaaaaaaaaaaaaaaaaaaaaaaaaaaaaaaaaaaaaaaaaaaanggggggggggctttaaaggatccaaatttttccccccgtgtgtgcgaggttttattttttttataggggcccccatatataattcccggggcgcg

SEQ ID NO: 58356 - DNA, 612 bp, Zea mays
  Clone ID: MRT4577_153216C.1
cttccatacttgtcagattaaacatcggcccagccatgtgatacgtcctttttggtcgttagtcaccctggccctctgccttgcgcgctctccgggagcagcactccgggtgcggcgccggcgggcatgatgctgccgccgggccccggcacgtggtgaagctctgcagcctgctgcacggccttcgccgtcgcccccagcggcggcgggtagtagctcacgccctgcgcgtagtgctggacctgcggtggcggcggcgccggctgcaggtggttgacgccgatgtagtgcccgtacggctccgtgatgcccaccgcgggcatgtggccccggtaggccggcaccgggcccacgctcaccggcgcgctgggcaccaccggttgcggggccatgaacggcagccgcggcatggacggccgcgccgccgccgctgccgcgcccatcccgacgcccatccgaggcaggtactggtgtacgccggggaacatcaccgccggcggcgccgcgatgccggcgctgcccatccacatcatctgcacttgcagctgcagcgacttgaggtactcgatcgcctcgtcaagcattgacgccttgtccgtcttgttgcagtga

SEQ ID NO: 58357 - DNA, 614 bp, Zea mays
  Clone ID: MRT4577_153217C.1
attggtacctcgagccggcaggaaaaaatactccctcgcggtgctggcgctgacgtgcgtcttctcggcggcgttcggctggtcgtggggcccgctgacctgggtgatccctggcgagatattccccgtggagatccggtcggcggggcagggcgtcagcgtggccgtcaacctgggcgccacgttcctgctcacgcagacgttcctctccatgctgtgcacgctcaagtacgccaccttcatctactacgcggcctgggtagccgtcatgaccgccttcgtcgtggcgttcctgccggagaccaagggggtaccgctcgaggccatgggcgccatctgggagcgccactggtactggagacggttcgtgcagccttctgttgcggaggacccctgatgagtgatgagtgactgatgcggccttctgttgtggacgtgacacgcttccggacgttgtgtgtgtcaatggttgcagtgtggtcgtcgtctgaggaagagttgtctgtggacgaaggctgaaagccaatgcgtgtgccctgtccgtggtttttctaatacaggaatacgtcatgcaaagttgttaaatgcgaaaaaaaaaaaaaaaaaaagcggcc

SEQ ID NO: 58358 - DNA, 247 bp, Zea mays
  Clone ID: MRT4577_153218C.1
tgtttttccaaagatttttgttcggtataagcgcaaggtattgctacgatgccgtactttattgctgttcgcactgtatatagttctgttggacgaaaaatgtattatctgaagttaaaacgtgatgcataatgatttaagctcacatattaaatacttaaatattaaaattaattattgggcggttgttttagaggattcaagattacgtacgtgtgcatgcgactatatagctctatttatagtg

SEQ ID NO: 58359 - DNA, 814 bp, Zea mays
  unsure (1)..(814): unsure at all n locations
  Clone ID: MRT4577_153219C.1
gctggcggcatgcttaacacatgcaagtcgaacgggaagtggtgtttccagtggcgaacgggtgagtaacgcgtaagaacctgcccttgggaggggaacaacaactggaaacggttgctaataccccgtaggctgangagcaaaaggagaaatccgcccaaggaggggctcgcgtctgattagctagttggtgaggcaatagcttaccaaggcgatgatcantagctggtccgagaggatgatcagccncactgggactganacacggtccanactcctacgggaggcagcaggtttntttatttattttttaatgtnaacatggtatatagacatgaaaggatattatgatgtttgcnaaaaatcaccgatcctggaggcattcttggggattggcntagaaattgatcctcttccttgggtctgtcatgaatcaccatncttnttgaagctgatcccatccgctttgcatgggcaaacctttatcagtgaananaacttntcccacnncananaaccnttttgtgtncccgtccactatcttnacaatntagtnttntngtctaaccaaacangtctttttgtacccntgaatttccgntgaccnttaacgcttttgccctnttcctcatatgtnggaacaaanntttcactttctaaaggatactaaggaaccaagnnctttcctttngnantaatgtccttgaaaaacttntttcctaaanaactntnttccntntttttttcttttttaaaangnntcntcccctnntnaaatgttgaanatccgtntntngaaatncnaanatanctt

SEQ ID NO: 58360 - DNA, 1351 bp, Zea mays
  Clone ID: MRT4577_15321C.1
aataggtaacctaatacacatcttggaagagttgagctctaagtattctacatacgcttttacactgcccatagttttatttcatgacactttcacttttattttcagatactctttagtttttagttctccatgtttatcatgccatgcacaataatctgtggtgagaggtgtcttactgagtcaccaggttgtgggttcgaagtggtctctttgcgtttgggagggggcttctcctagatctcactcgtggtagccttccggcattgggtgtgcctcatttcatgtgatccttgatgtaatgtcctattaattgtgataaatagaagtaccatcaccaactgtatctttggttcgaagagcctttgttttatacaattgaatcttttgaaagcattgatgttcgtcttatagactgctgcaagctggcgcaaaatgtcttaacccccaacaaaaggatctatgttcttttatctaagtcgcgttgaattctgttctatgcctagatggaaaagtaatgaaaccatgaataatattcagctgagacagtttctggtttcctatatgatatgctgcaaaaagaggtacttcctgtgagaaagacatgccatgagaaggatcagattctaaaagataaagatgatgctattgagatgttagcaaagaaagtagacaccttaactaaagcaatggaagtggaagctaaaaaggtcagacgggaggttgcatccatggagaaagaagttgcagcaatgcgtgccagtaaagaacaagaaatcagagccaagcggcttggtacgaaaggctctggtagttcacaactgcttcctggaagaaacgcaccacgaagtgggtccatgcgcaacttccaatgatggcagcactaacaccaagcagcattcttggataggtcctctgttccaccatttgttctgttcctatcctattaattttgtggctaaaatcgtagcacagtgagatgacccaacaatacctagatctgggtaagagtaggctcggatctgatgagaccattgtgggagtgaagctgagcctgttgtctaaccttgtggcgcgccctcttgtttattttagtccaggcagtgcacctgatgcttgtataggccagggatcaccgcatggccaatctgtaatgtatagcctgagtgctcagttacatagacacccgttgcccaggttgtgaatactgtttcctcgcacatgcttctttgcgctgctctatttgccctgtgtttgggttggaatgtttaacatggcttctagcctgtctgagttctgttgattataaatagtgacacatgttcatctgcaaaaaaaaaaaaaaaaaaaa

SEQ ID NO: 58361 - DNA, 459 bp, Zea mays
  Clone ID: MRT4577_153220C.1
cgtacgcctggtcccacgcgtgcgccattgctttgctgccgctcattgcgtacaccgagcagggactggtcaaggactgcgacatgtgcagagcgtgacactctggctcatgcataatcacctacaactgcgccaatgtgtgcccaggacaaggcctcttggccggaacgctcagcaaacgactgcgtcgttgcatgcgcatcttgcaacgctaaacaatgaacatcgataactcgtatgcatccacaacctattcaagatcacatctattacgacgtccatatgcatgacgaccatcacatatgtactgatcactgcgatgtgtattctgatgactgccatcgttctggtgaatgtgtgctcaaggtccatcaatgccttcatgtactacatttacagctgaataacctactacttaagcttgcggacatgcatgaattataccctaatgagctcaac

SEQ ID NO: 58362 - DNA, 1924 bp, Zea mays
  Clone ID: MRT4577_153221C.1
ggttataataacagcgaccttttcaatattcctgtcatttgcattgcagctacggaactgtcaagaaatattttggacagcaagcaggattgggctgatggagcagataaaggacattgtttttttttttttttttttttgtgagatagaaagactaatgagataggctaaagctgctcatcggtattttttttcctgtttcaagctactcttgtcattacaaatttgttgaggcttataagttggattaaataatgcactttcaccaagttgctatcagtatacgctgctacaagctaactctgcgagaagatgcatcaaatcagccaaaaataaaaaagaaagaatatcaacgttcttgcatgctcgttgaacagctagctatatgagagctttgatgccagcttgttgcatctcacgcagccgccagactgggtaataggattcttcttctggcacctcgtcgctgtccatgagttgcatagcccacgaatagaagacggtttggatggtatcctgtcctccttctgtgacttgtccttctcgatctcgaacacagtatatctgctgtgtttggaagcgtaagataattatgggtgaagatccaaacatctttgtttccaatacatcagcttctgaaatgtgcaggattttgtgatcaaaaaatattccctgtgatgcataagcttctctctctcctttgcagcgctcaatcacttccttggtgcagtagttttttagagtctccgcatcaccctttgaatatgcagttaaaactggcttgatcatttcttggacatcagcaacaaaatcagaaagagaaaaggacgggtctcgttgccgaatttccctgaatgtcaccgcagctgaggtttcttcaagcaaagattcattcaagtcttgaattttctgaaccactggattgtcacttgtctcccatctttccctgacatcttcagctacctcttgtcccttggttacaacaggcttggtgtattcatccactcttctgtagaccgggtgacctcggatcttattcttaaattcttcccatttttcacccaatactgtcttttttgttggcgtaagaactaaatcggttcttgtactcttttctactttagcagaagcatgcctagcttggtgttttttctttctgctagagttagagcttaattcatccttgacgatttcatatccctgcttagctaaagttgagacttttgtgtccttcaactttgcaaacgcaccggatactactggtgaagcagatgagattgttgacttcaatttagtaaacaatgtatggctgtctgtggcatcttcagtcgtgccatctgaatgtgaggatgcctcagttttctcatgttttgaaccttcaggcaaaccatccctgcaacttgtactctcttcttttccaactccaaaactttcctttacctcttctttagcagcaaacattttttctttgatatttgcagtaacctttttagatgtctcctcagcttcactccaaacatcatcaacacgcttgtatattgtctcagtcgttttcttagttcttactttgagatcttccttcaccacatcaagtttctcgctgaactccttcatggatttctggaattcaggattgctcttggcctcaccctttagttgcttagaaaactcattgaaaacgcttaggttcctgttattcagatgtctatatccattagttgtttgcacatttgcctttgtagccaatcgcagcgcggcttcggatgagggccgccggagagcccggagcagtgctgtggtcgccatccctggcgggtgttcgtcgccggcgaaggcctcggtatctaacgtagggcggcggcggcggtagcccacccagtcgtcgcagagagagaaagagggagacagcacacgcggacgcagg

SEQ ID NO: 58363 - DNA, 540 bp, Zea mays
  Clone ID: MRT4577_153222C.1
acataaagatttaatttcatttcttcaatttgctctcctcttctaagtttatagctttcgtgctagcttcatcgatgttccccactaaataaaaagcctgttcgggtaggccgtctaattctccggaaaggattagttgaaatcccctaattgtttctgcaagaccaacatactttcctggagaaccggtaaaaacttctgccacaaagaacggttgtgataagaaccgctcgatttttcgtgctcttgctacagttaaacgatcctcctccgataattcatccaatccaagaattgcgataatgtcctggaagttctttgtaacgtttgtaaagtttcccttaacctcttttgcgcaattttcattaatgtctcgtgtgcccaacaattccggagggctgttaaccatcagtcttgaggtttgaaatccttaaagggatcccacttgcgggggataaaatacccctttgggaagcctaattccttctgggaaaagtaccctcgggcccgcggaccacgccttaagggcgaaattcttgc

SEQ ID NO: 58364 - DNA, 545 bp, Zea mays
  Clone ID: MRT4577_153223C.1
ttttttttttttttttttttttctcgaaacatatatagtattatttttcctcagatctcgccgtcaagcatacatgcattatctcccagacttcgcagtggcgagctcgatcgatatatatgatgactagcatcagtacaaatagtattgtatcagggacacacgtacggcatcgaccagctgagcaccatgcatggtccatggatcatatcatcattatcatggcttcatgtgatgggaatggatcggagtacgtgcttaaccacgatcagtacacacgtatctctcggaggggcggcggtatcccgggtgatggccgggcgattaattagtagctgtagttcttgacgaacattccctccttggcctcggcggcctcgccgtcggaggtgtacttgccgagctgcgccagggagttggccttggcgcgcagcagcagcgcgtcctgcgccgccttgaccttgtccggctggccgccccaggtcttgaggcaaggtgttctgcagcgcccgcgcgtaggagaaggacacgtgccacgggttggg

SEQ ID NO: 58365 - DNA, 610 bp, Zea mays
  Clone ID: MRT4577_153224C.1
cactccatagggcgattgggttcctcgaggccggccgggctcaacgccatgaaccaggggcccaacccgtggcacgtgtccttctcctacgcgcgggcgctgcagaacacctgcctcaagacctggggcggccagccggacaaggtcaaggcggcgcaggacgcgctgctgctgcgcgccaaggccaactccctggcgcagctcggcaagtacacctccgacggcgaggccgccgaggccaaggagggaatgttcgtcaagaactacagctactaattaatcgcccggccatcaccgcccgggataccgccgcccctccgagagagatacgtgtgtactgatcatggttaagcacgtactccgatccattcccatcccatgaagccatgataatgatgagatgatccatggaccatgcatggatggtgctctggtcgatgccgtacgtgtgtccctgatacaatactattagtactgatgctagtcatcatatatatcgagctcgccactgcgaagtctgagataatgcatgtatgcttgacggcgagatctgaggaaaaataatactatatatgcatgtttcgacaaaaaaaaaaaaaaaaaagcggcc

SEQ ID NO: 58366 - DNA, 278 bp, Zea mays
  Clone ID: MRT4577_153225C.1
cacggccatccaggagctcttcaagcgcatctctgagcaggttacggctatggaccgtcggaagggtttcctccactggtacacgggtgagggcatggacgagatggagttcaccgaaactgagagtaacatgaatgacctcgtctctgagtatcagcagtaccaggacgctaacgcagatgaggaagaggatttcggagatgaggcataagaagaagtctaaggcggaagcctgcgtcaactcaggctggctagtatccttagcgtatttccaactg

SEQ ID NO: 58367 - DNA, 115 bp, Zea mays
  Clone ID: MRT4577_153227C.1
agatggtggtcaagaacttcatgaaggtcgttcgcgatctgggcatgcaggaggtgaggaggcacttccaccctgagctgttaaaccgtttcgacgagatcgtgatcttcgttcc

SEQ ID NO: 58368 - DNA, 179 bp, Zea mays
  Clone ID: MRT4577_153228C.1
agtcatatgagatatgacgtggcacttggattccttgtaatgggcaagttaccgtcataagtcgatgtgaattgcacaacattgtattaagtaattccatgacatgctagacgtgtattcagttacttaattgtagggtaatggactgaatattgaatcggttgagtattatcgggtat

SEQ ID NO: 58369 - DNA, 428 bp, Zea mays
  Clone ID: MRT4577_153229C.1
gaacctcccatcccatttatgattaaataaatataaaaggagcttcaattttagctctgcaacacgggtctaaatgcatgtaaaactgaccacccccaaaacagagggcaccaccttaaaaaaccctaaataattagtatatataaattcttcaaagctgacattaatatattctccatgcatagaaaatatatagtctgagctaaaatccaggctccttacatatggagaaattatattcattgaagggatcggtagggagacagggacatgcatcagaccatgtgctatcttactacacactcctactgccaagaacaaaaaactcgctgtcggcgagctcctcgacgggcaggggcacgaacccgttcacgttgaactccaacaccatgtgcacctccgaccacaccttggccagcaggtcacag

SEQ ID NO: 58370 - DNA, 831 bp, Zea mays
  Clone ID: MRT4577_15322C.1
gatcccctttccggtcccgcctcctccgacctcgcctttctccatctagggtttctctctccgtttccaccccatcggaccggagcttcgcatggagtcatcgcagtctcggaagcggacgcgccaagcgtatgactgcgccgccgcgctgccaccagagcgagaagtggtagcgaggggtggcgcgtcgcctccatggagggaggatgaccgcgacggacactacgtcttcgatctcggcgagaacttgacccgccgatataaaatcttgagcaaaatgggagaaggtacatttgggcgtgttttggaatgctgggaccgtgaaacacgtgaatatgttgccataaaagttgttcgcagtatccgcaagtaccgtgatgctgcaatgattgagatagatgtgctcaatcgccttgcagaaaatgagaaatacagatctctctgtgttcaaatacagagatggtttgactatcgtaatcatatatgcattgtttttgagaagcttgggccaagcttgtatgattttctaaagagaaatagataccgacctttccctgtggaacttgtgcgggagtttggacggcaactgttggaatctgtagcatatatgcatgacttgaggcttatccacactgatctgaagccagaaaacatactacttgtgtcttctgagtatataaaagttccaagtacaaagaagaattcacaagatgagatgcatttcaagtgcttgccacagtccagtgccataaagctgataggattttggcagtaccgcctttgatatcaacgaccaactcgattgttctacgaggcattacaggcactgaa

SEQ ID NO: 58371 - DNA, 373 bp, Zea mays
  Clone ID: MRT4577_153230C.1
tcgagcggccgcccggggcaggttactctacttaccctgcaccaggcactagcttttacatgacgtaccatctctgactcagctcgctgtggcaaaccctgctgcctacttgcaacagctgcttccattcaaccaactgactgtgtcgaactctgctgcgtccctacggcggcggcaacagtttcttaatccactagcagtgcctaacccattggtcactgccttcctacagcagcaacagttgctaccatacagccagttctctttgatgaaccctgccttgtcgtggcggcttcccatcgctggaggtgccctcttttcggttgcgtgtgacatgtgctcgtttctggtgccctcctgccggcctgtgttt

SEQ ID NO: 58372 - DNA, 1892 bp, Zea mays
  Clone ID: MRT4577_153231C.1
gtcctcgtccccggcttgtcgttgagcagaccactcgtgactcgtggcctcgtggggtggggttgcagaaaccagccctttcggtcctgtcagctactacccactggccactgcactagccgtctgcggagccgagtgttcctttctagccttcacttctcagcacggcagccttcgatagttcgatccccccgactgcagccgccagccgcgccatggagcaagccgccatgccgccggttccccgcgtcaagctcggcacccaggggcttgtggtgtcgaagctggggttcgggtgcatggggctcacgggcacctacaacgcgccgctcggcgacgaggccgtcgccgccgtcgtcgcgcacgccttccgccgcgggatcaccttcttcgacacctccgatgcctacgggccccgcaccaacgagaccctcctggggaaggcgctcaagcagctgccgagggagcaggtgcaggtagccaccaagttcgggataggccagggcgccgctggcatgaccgtgtgcggcacgcccgagtacgtacgcgcctgctgcgaggccagtctgcgccgcctcgacgccggctacatcgacctctactaccagcaccgcgtcgacaccaccgtccccatcgaggatacgattggtgagctcaagaagttggtggaggaggggaaggtcaagtacatcggcttgtcggaggccagcccagacacaatccgccgtgcgcacgccgtgcatcccatcaccgccgtgcagatggagtggtcgctctggtcccgagacatcgagcccgagatcgtgccactctgcagagaattggggattggaattgtggcttacagtccaattggccgtggattttttggtggaagaggagtgacacagcaagtttcttctgaatctagtctgcaaaggcatccaagatttacaacagaaagcttggagaagaacaagcagatttacctgaaaatagaagatttggccaagaagtaccagtgcagcccagctcagctagctctagcctgggttctgcatcaaggggatgatgtggttcctataccagggacaacaaaaacgaagaacctagatgccaacgttgactccttgaaggtgaagctcacagctgaggacctgaaggaaattggcagccagatacgtgcagaagatgtggctggtggaagacaatacaattcctatgcacatacctcctggaagtatgcagatacaccaaaaaagtgaagttctggtcctggaaaccttgtagcaatcacaggcgtatgcaaatgttgaactatttccctgcatttgagccggaatcgtacgatgatgcatcttgtgaacatgcggcactaataaatcgagacgaagaataatgtgttttccatcaaaaaaaaaaaaaaacaaacttatgtcaattgatctgtgcttgttattcactccaaagtttgaagcaagtcatcgcggacatgaatttttttttatagtcaaatcgtcctgcatttggttgctgagatgtgttcgttaattgctcagggacaacaaaaacgaagaacctagatgccaacgttgactccttgaaggtgaagctcacagctgaggacctgaaggaaattggcagccagatacgtgcagaagatgtggctggtggaagacaatacaattcctatgcacatacctcctggaagtatgcagatacaccaaaaaagtgaagctctggaaaccttgtagcaatcacaggcgtatgcaaatgttgaactatttccctgcatttgagccggaatcgtacgatgatgcatcttgtgaacatgcggcactaataaatcgagacgaagaataatgtattttccatcagtgattatgagcagatgatgatttttatccgtgctt

SEQ ID NO: 58373 - DNA, 255 bp, Zea mays
  Clone ID: MRT4577_153232C.1
gaggaaatggccaacctatctcagcaccatacttaccttcccatccaggccaaacacaacatcaacttcatcatgaccaccatcaaacgaaacatggatgtgcaaaactacgcctacgccaagcatatgctgcacctcatctactccaaggctcccattacaaaacaagactagctcactatcctcatccacatgaacatacagactagccttacaaacaaattcatcgacacgatagatgacccctcgcaattc

SEQ ID NO: 58374 - DNA, 220 bp, Zea mays
  Clone ID: MRT4577_153233C.1
tgaaccggtcagccctttccatttgcatggttcctgaatctgaacatttcatattattttattttattcaggggacctgactccacacataattacgtggcacataattaagcacatccgaggaaccggcccatctaataaatgaagctagaccaggtcaggtagacggcttcttggtttttaataatcaaacctcatccctttttttctcttgagtgcc

SEQ ID NO: 58375 - DNA, 704 bp, Zea mays
  Clone ID: MRT4577_153234C.1
ccggccgggctgactggtcccatggaccggccgggggtttccccatctggccatctctttccccacccccacccacacgcactccagtcaccgccggcgccaagccgatctccgaccaccgcagccatgtctttcgccgccgcgctccacctacgccccacctccgccacgacgcacccgcgcctccaccaatccacccgcaaatcgtacttcctccgcttacagccgtctcgccgccgcctacccgtcccgcgcctgtccctcacgcccaccaccgccagcaatagcaacagctctcctcccccaccgtccccttcgcccgcccccgccgccccgggttccctgctcgccaactggtccccgccgcgcgcgatctggcgggggctgtcggcgctgctcctcgcgggccaggtcttccaccgcgtcctcacgggccgcgtccaccgccgcaacctcctggcgcagctccgtagggtgggtcccgggagcgcgggggtcgcgctcctcaccgctgccttcgtgggcatggccttcaccatccagttcgtgcgcgagttcacccgccttcgcctccaccgcttcgtcggcggggtcctcgcgctcgcgctcgcgcgcgagctctcgccggtcgtcaccgcgcgcgaaacgccaagtacgtggccatgcccatctagcaccagagcgcggaaccatgacctgtgtcg

SEQ ID NO: 58376 - DNA, 1349 bp, Zea mays
  Clone ID: MRT4577_153235C.1
accccctctggctctctgcttctgcacctgcgtgtgctagcgcgagcgcgtgcgtcccttccccggcacgagcggcgcacaccgtcacatccgcgctccgttcgccttccagaaaatttaaaccccagcggagccggccacggccagtcagccgccacacggtctccgacgcgctgcccgctcgcctgccaaacccccaccccctcggcggcgatgctgacacgtcgccgtagcaaccacccgggctgctccttccccctcccgttcctcgtctgcggcctgctcctcgctgcggccgtcgcattttccccagctgcggccgccgaagcagctgacggcggcgctgggcacgagggccgcgcggggaaaccggaggtagaggccgaggcggaggcgcggttgccgtggcggaagccggcggcgaggtggtggctcagggcaatgccacggaggccaaggagggcagccttgccgacatgatcgaccgcgcgctggagaaggagttcccggagtccgagggcgagcagggcggtggagagaccgaccctggcagcttcaacaacacggtagctgagaagcagggagttcttgaaactgtagctagaagagtaacaaagaagaatgaaaccaaagataacaagtcatttccttttaaggaggttttcttggatcgaactgagcaagaggatgttcccacgttgatagatcggaaggataatgtttttatcatctcaaacccaaagtcaaaataccctgtgctgcagctggaccttaggttgatatcagatcttgttgttgttatcgtatccgctacatgtggtggaattgcctttgcttgccttgggcaaccggtgattacaggttatctacttgcaggatctataattgggcctattttagctttgtcaatgaaatggtgcaagttgaaacggtagcccagtttggtgtgatatttctcctgtttgcattgggactgagtttctactgcgttcgtgctgttgctgttctcgctccaatttctttttgcgggttttcttgacggttttgagagcagtgtgtctaggatgattggtggagtgagtggctgtcgaccccaaatgagggtctcgtgtaacataagaatgtatgatggttaattgattggatcagcatgataggatctaggcgtgatcgttatgccattgtatcctttcagcaaaactgtgtatcctcgcagcacgaaagtgtgtacaatagtaaaaaaaaaaaaaaaaaaaaaaaaaaaaaaaaaaaaaaaaaaaaaaaaaaaaaaaaaaaaaaaaaaaaaaaaaaaaaaaggaaaaaaaaaaaaaaaaagggcccctagggcc

SEQ ID NO: 58377 - DNA, 452 bp, Zea mays
  Clone ID: MRT4577_153236C.1
ccggggaaacaccaccacaagaacggagcaaactggcaggagaaagctgcacgcccagctctatagcagctcaatgaccataaaacagtctatctcaaaagccataatacaagcgattaggaaagatacacagagcaccgctactactgagggcgaattaaggctaaacctagcattgagaggcattcgcatactaacccaacactgtgaattgcgcaggacagaggaggcacaagcaagaaggcaagggataagcaaaacaacagtatacgacccggcctacctttgtgaataaccacagtaacgacaacaataaactagaggacaacaaatattgggcaaccgaggcagcatcagatatacataaagacgagaagaaaagtaagaatatctcataggcagtacaaaacaagatgacaaacgagcagccccaacagggacaagagggacag

SEQ ID NO: 58378 - DNA, 430 bp, Zea mays
  Clone ID: MRT4577_153237C.1
acgtctttgacgttgatgaaatattaataaatatattaacatctacaagtccaaataaatacacaataacattttcattgataattttataaaatggaatcaatttgatgttggagcatttttctacaaaccttgtcaaagctagagaagtttgacctatgacattgctaaagtgatctataatttggaatggaggatgtctttagtttgatctttattttatgcttgaataaaatcatggctagactcttgtagttagtaattcattatattgttctcttatttcaggtttgttctttctgcagatcgaacctatccgcaacttattcgctgctcttttccttgccagcattgggatgctaattaatgtccatttcttgtggaaccatgtggatatactccttgcagcggtaatttttgtgatcaccgt

SEQ ID NO: 58379 - DNA, 433 bp, Zea mays
  Clone ID: MRT4577_153238C.1
gggcaaaaaaaatcccggaaggctggggtttcggggataaacaaagaaggggtttcgaccagaggaccttccccaaaccctaattttagggccaaaaaggggctccaaattttacccttgggatccccaaacaaaagggggaaaaaaaaagggggggcaggccccatttcggcgcgtgctgggaagaggggccaaaacggaaaaattcaggacaaaaccggcggacaaatgggttcagctgggggggaacgggccccaaccctggtttttttttggaccacccaaccgggggggggggccgggcccaaaagcccctcttatggggggggttggggcccactcccctgggggaaaccattttttttttaaaattaacccgccccggggcccctagttttaaaattttttgggggggggccttccaggggggggt

SEQ ID NO: 58380 - DNA, 477 bp, Zea mays
  Clone ID: MRT4577_153239C.1
gcgaaattaaatttatagtgcctattacactttagaaagatacactcacttctaaccttacgcattttacccacccctgatcagtattcttaacaacaacctgacgctccccacctctccatcaaaaatgatgttaacacaacctccgacatctgtagacacaccgttaattttatacaaaacactagcaagaaatccacactgaactctaaatccatagacctccaataaaccttgatgatcgcatatccgccttttaataggcttctcaaggagatgaacttatccacccaaacaaatacatttaccttcatctggatgcacctaatatgtacaataacagtggtcttcgttatcactcaagatcaccatcactaaattgacaagataatgctatctaccgctgctgaatcttaataaaaaaatatatatgcacacacatttctttcacaatgttatgaaccctacttttaacta

SEQ ID NO: 58381 - DNA, 1191 bp, Zea mays
  Clone ID: MRT4577_15323C.1
ctccatctagggtttctctctccgtttccaccccatcggcccggagcttcgcatggagtcatcgcagtctcggaagcggacgcgccaagcgtatgactgcgccgccgcgctgccaccagagcgagaagtggtagcgaggggtggcgcgtcgcctccatggagggaggatgaccgcgacggacactacgtcttcgatctcggcgagaacttgacccgccgatataaaatcttgagcaaaatgggagaaggtacatttgggcgtgttttggaatgctgggaccgtgaaacacgtgaatatgttgccataaaagttgttcgcagtatccgcaagtaccgtgatgctgcaatgattgagatagatgtgctcaatcgccttgcagaaaatgagaaatacagatctctctgtgttcaaatacagagatggtttgactatcgtaatcatatatgcattatatgcatgacttgaggcttatccacactgatctgaagccagaaaacatactacttgtgtcttctgagtatataaaagttccaagtacaaaggtttaggctggagttttccatgtgatatttggagtgttggctgtattcttgttgaactatgctctggggaagcattgtttcagacacatgagaatctggaacacctagcaatgatggagagagttttgggacctctaccagagcatatgatacggaaatcaagttcttctgctcagaaatatttcaggagggcaacacgtttaaattggcctgaaggtgctgtttcaagagaaagcatcagagctgtgaagaaactggatcgactaaaggacttggtatcgaggaacgctggccattcgaaggcagagctggcagacttgctatacagtatcctccggttcgagccatcagaacgtctgacagcgcaagaagctctggagcatccattcttcaggaacccgacatgacttgttggacaggcttgactcgtgtaactctctgcttcaagaaggtatcgaggaagcaggcagagccgtccattgcaaagctgatgggtatcttgctcctcttttaccagagagtttgtgtaagcctgtcagtaaggcttcttgcggtggtgataaagctgatggctttggtcacccaatgtaatgtacactagcattttttttttacctagggagtttagtgcctgtatgttgttaaccg

SEQ ID NO: 58382 - DNA, 586 bp, Zea mays
  unsure (1)..(586): unsure at all n locations
  Clone ID: MRT4577_153240C.1
cagccctcacacggactccgacgcgctgcccgctcgcctgccaaacccccaccccctcgccggcgatgctgccgcgtcggtttagcagccacccgggctcctcctcacccctcccgttcctcgtcgtctgcggcctgctcctcgctgcggccgtagcattttccccggtcgctgccgccgaggccgctggccgcggcggcggcggcgggggggggggcgctgggcacgagggccgcgcggggaagccggaggtcgaggcggaggcggaggcgcgcggggatggggtggccgtggcggaggccggcggcgaggtggtggctcagggcaatgccacggaggccaaggagggcagcctcgccgacatgatcgaccgcgcgctggagaaggagttcccggagtccgagagcgagcagggcggnggagagaccgatcctggtagctttaacaacacggtagctgagaagcagggagttcttgaaactgtagctagaagagtaacaaagaagaatgaaaccaaagataacaaggtatttgcttttaaggaggtattttttggatagatctgagcaagaagaagttacaacat

SEQ ID NO: 58383 - DNA, 2421 bp, Zea mays
  Clone ID: MRT4577_153241C.1
acgtctttgacgttgatgaaatattaaaaaatatattaacatctacaagtccaaataaatacacaataacattttcattgataattttataaaatggaatcaatttgatgttggagcatttttctacaaaccttgtcaaagctagagaagtttgacctatgacattgctaaagtgatctataatttggaatggaggatgtctttagtttgatctttattttatgcttgaataaaatcatggctagactcttgtagttagtaattcattatattgttctcttatttcaggtttggtctttctgcagtgataagttgggcctgagtctcgagttgggttcttttgcagctggagtaatgatatcaacaacagaccttgcacaacatactcttgaacaagcttgttctttctgcagatcgaacccagccgcatctttcccgcggctccttgccttgcccgctttgggatgccaatcgcgtccgttccttgtggaaccatgtggacatccaatctttaccccaggacaatgtttttatcatatcaaacccaaagtcaaaataccctgtgctgcagctggaccttagattgatatcagatcttgttgttgttatcgtgtctgctacatgtggtggaatcgcttttgcttgccttgggcaacctgtgattacaggttatctacttgcaggatctataattgggcctggaggttttagctttgtcaatgaaatggtgcaagttgaaacggtagcccagtttggtgtgatatttctcctgtttgcattgggacttgagttttctactgcaaaacttcgagttgttcgtgctgttgctgttctcggaggaatgctccaaattatgctgttcatgtttctttgtggtattttggctacactatgtggaggcaaaacaaaagaaggtgtttttgttggtgtgcttctctccatgtcttcaacagctgtggttttaaagtttctgatggaaagaaatagtatcaatgctcttcatggccaagttacagttgggacacttatattgcaggattgtgctgttggtctgctgtttgcgcttcttccaattttgagtggtacatctggccttcttcacggagttgcatcaatgacgaagtcgttggtggtattgataacgttcctgaccattctctctatcctctcccgcacgggcgttccttggtttcttaaactgatgataagtctgtcatcacagacaaatgaactataccagctggcagcggttgcgttctgcttgttatttgcttggtgtagtgataagctgggcctgagtctcgagttgggttcatttgcagctggagtaatgatatcaacaacagaccttgcgcaacatactcttgaacaaatcgaacctatccgcaacttattcgctgctcttttccttgccagcattgggatgctaattaatgtccatttcttgtggaaccatgtggatatactccttgcagcggtaattttggtgatcaccgtaaagacatttattgttgctattgtcgtaaaagggtttgggtatagcaacaaaacatctcttcttgtcggcatgtctcttgcacaaataggagagtttgcttttgttctcctaagccgtgcttcaagtatccatctcatcgagggcaagctatacctgcttcttcttggaaccactgcactcagtttggtgacaacccctctgctattcaaaatgatcccagcagtggtccacctcggggttcttttgagatggttttctgtcgataccaatcaggtggaggtacacgatcataccagttgagttcattgatggattgctttactctagaatgtttgccaatcaattcatcggttcttccttttcagctgggcctgaaaaatgatgtcctccgcatcgatagcggcaagcgcataaatctgatagtccaaggctcacatgactcatgacacatttgacacactgcaagctactttttgtatggcttaagtttacaagctctgtaaagtgttttcacctgtactgaagagtttctagcagatatacgagggtggaggcaagagaactcaactcagatcttgctcctagtgcaagatcaatcctcccccgtcatgacggctgcaagggcaaagtcgggttttgccgttcttgagagcagtgtgtcttggatgattggtgcagtgagtggctgtcgaccccaaatgagggtctcgtgtaacatatgaatgtatggtgattaattaattggattagcatgataggatgtaggcctgatcctcagtaaaggttatgcccttgtgttctttcaccaaagttgtgtatcctcactacacgaaagtgtgtacgacatccatcagatcacgaattttgttgtgtagccatatatgtcagtttcttaacatgtccaagttcatgagttttttttt

SEQ ID NO: 58384 - DNA, 516 bp, Zea mays
  unsure (1)..(516): unsure at all n locations
  Clone ID: MRT4577_153242C.1
gactaggagacgacgggctagacctttcacgaactcatcacaacatccatcatgcgcctcatccgggggtaccagttcttgacctgggggatgtgagtacagcaagggtgagctcacatacgttcatcgttcaacaggcaaataatggggcctcatccgggggtaccagttcttgaccttagactcgngattcccaggtaccaacttggtcttcaagggactcgtaacctcgccgcactaatgcacagacactaccctcaagggctccagcgtgccagaaaacatcaccagccaatcttgcaagctctatagcaggggtataaggggcattggcgtccacaggggatccagccaagaggcaataatctcctattatcttttgcgcacgacccagccttctttttttagccttaattacctcctctgagccaagactggattgngaatccaagggggncttcaaaatagtcctgnggattctgcacgcaagacccacttctcaaactccatcaacaa

SEQ ID NO: 58385 - DNA, 387 bp, Zea mays
  Clone ID: MRT4577_153243C.1
ctagattcgtcactagattcatcactagattcactacttatggtcattaggggaagaacgtttagatttgtatttgtattgtagattttcactctttgccatgactgtcttcaaccgttccccctaaatttctccccctatatcccactcacatgccacgtcagcgttctctttccccctatatctccacactctacagcggttccccctatatcaaacctctataccccaccacaccaaaaaaaaaaaaaaaaaaccaaaaaaaaaaaaaaaaaaaaaaaaaaaaaaaaaaaaaaaaaaaaaaaaaaagaaaaatagggggggggaatttaaaaaaatatcttctttaacttacacatgctaaaaacaaaaccccctttttttaaa

SEQ ID NO: 58386 - DNA, 1372 bp, Zea mays
  unsure (1)..(1372): unsure at all n locations
  Clone ID: MRT4577_153244C.1
tatgacgtgcgactctcacgcttacgtgggcttggttcctctggagcggccgcccctgggggtttttttttttttttttttttttttcagggagcaattgatccctggcactggcaacctactacatacgcatacacatgcgccattgttgaatcatttgatggcgttatatatgcatgaacgtctgggggtgctttggcttcgtcgagtcccagaagggggctgagagttgcttttgctatcactagctcgatatccatcttggtctgcgcggcagttggtgctttgctcggctccctacgaaggaaacacctggcgttggctgtataacggctagaaatcggatgcttgacgatgagacggggacgagtaaatgccgcggtgaggtatattgtcgaacacttgtgggcgtgatgtgagaactcctcctcctctgcgtcggtgttggggacgagcgcggggttcatcgcctggtctggtgacgacaaggagaaacggaggcggcggacttcgccggacaactccgtcccgccgatgaggaccttctcgtgcgggtcccgatggaacaacaccgcgccctcggggaggcacgggtagcgcggtgatccgctgctgtcgatgttcgagtcgagcggcgcatagacgaggacaacgcctgaatcgtcgtcagccgcgttggcgctcgcggcatcctcgtccaacacgtcgagctcctggaggaggtcatcgtcggggttggcgagagtatcgacaaacggctgtggcatggtgtagcagtcgtcgtcgtagagcggcggaatgtagcggtcggatatggagccggcgaggagcgtggtcgacgaagacatctcgtcggaccccagggacgcaagcaccgtggcggtctgctgcaggccaaagtcgtttcccgaatccaaggacgccaccttcgcagcgtcgtcgtggacgagaggcggaaggattgcctcgtcgcggtactgtgtgttgacgatggaagaaggaggcacggatccgtcgaagggggaagtgtgctcgcgtgcgtactgctcgccgcagcgacccaccagcgcatcggtcaagcgtgcctccatgcgcgccagtgcgtctagaatatcctgcatcgtggcctccatcgagattgagtcctagtctgataccaaatgttagcaacacctgggaaggggatccaagaggaagagctcagaggagaataagactggagaagggaatatcctggagaaggaggagttttctgctgggttttggtcggggagttgggggtggcggctgttctgccnnnnnnnnnnnnnnnnnnnnnnnnnnnnnnnnnnnnnnnnnnnnnnnnnnnnnnnnnnnnnnnnnnnnnnnnnnn

SEQ ID NO: 58387 - DNA, 1228 bp, Zea mays
  Clone ID: MRT4577_153245C.1
cgcgcgggttgggaagcgcgtcgtcggcgagaacactgcctgcctcactggggaacagctcatagtcgtcaccaccgtggacggcgctgacagggtcgacgatcagttgctagagcggagggcgctgtagccgcgtgcggtgcaggacggcggttggtgctgtattcgttgaatttgggtgcgcccacgatgcagaccacgaggaggttggggacggagtatgcgccacggttgatgcccattctcgaacacctggtggacgtggtcgtgagaacctcctcctcctctgcgtcggtgttggggacgagcggaggtaacggatccaagtgcttgatcctcgccttgatgatgaggtcgaagtgcctgtcgacggcgatgagcgtctggaccagccctgaggtcgtgtgttcgacctcgtccacgatgctccagatgtgctggctgatgccgccgatgagcccatcgtggatcttcttatccgggttccgacggaacaacgtcgcgccctcggggaggcacgggtagcgcggtgatccactggtgtcgacgttcgagtcgagcgtcgcgtcggggttgagcggcgcatggacgtggacagcgcctgaatcgtcgtcagccgcgttggcgctcgcggcgtcctcgtccaacccgtcgagctcctggaggaggtcgtcgtcagggttggcgatagtaccgacagacgattgtggcgtggtgtagcggtcgtcgtcgtagagtggcgggatgaagtggtcgaataccgagccggcgaggagcgtggtcaatgaaggcatctcgtcggaccccaggtacgcaagcaccgtggcggtctgctgcaggccaaagtcgtttcctgaatccaaggacgccaccttcgcagcgtcgtcgtggacgagaggcggaaggattgcctcgtcgcggtactgtgtgttgacgatggaaggaggaggcgcggatccatcgaagggggaagtgtgctcgcgtgcgtactgctcgccgcagcgacccaccagtgcatcggtcaagcgtgcctccatgcgcgccagtgcgtctagaatatcctgcatcgtggtctccatcaagatcgattcttagtctgataccaaatgttagcaacacctggaaagggggataggagaggaagagctcagaggagaatgagacttggagaagggaatatctgggagaaagacgagtttgtctgatgtttgatagctaaattgttcat

SEQ ID NO: 58388 - DNA, 311 bp, Zea mays
  Clone ID: MRT4577_153246C.1
aactagccattgcctccggtgggccgaaacccaaactggcctacatcatcttgtacgtgaaggtcgtggagaaggccgtctccttctacgactccgccttcggctacaccgtccgccgcctcgatcagtcccgcaagtaaaacgcgcgcgcctgtgcccgcctgatccggatgcgcgcctaatctgccgcacctgcgcgcctttttgggattactttgcaggttggcggactggagatctctgctacgaccatcgcattcacttcgctgcaccatcgggagacggacgagctgtcggtggcggtgcagctg

SEQ ID NO: 58389 - DNA, 319 bp, Zea mays
  Clone ID: MRT4577_153247C.1
aaaaaaaatggaaggttttttatttgcagagttaccatgacaatcattataataaatttatggggttccaacagcaaaagttaaaaatttcattattattttaaccgagcaagttattgttgaatacaagccgggtcccccaaaaaaaccaggttaccccaaaaactgatttcaatttgttttttaaccccgtgatacccattttacaaaacaactgagtcccaacttttggtacccgcacattttttttcgaaaaatgtttcacttattatggggaggcctttggttctttttctttttaaatttcttaccaaacttt

SEQ ID NO: 58390 - DNA, 2540 bp, Zea mays
  Clone ID: MRT4577_153248C.1
cccacgcgtccgcgtgtttcttctgcctttagttttggttcatcgcgtccgtccttcctcctccttcgccgcctcttgcgcctcccctcccctccccactcctctcctctctccccgaaccaaaccaaacccctcccactccaactcctcgattctcagagtgctgtagaagtgtctcgccctaccgcggccgtcaaaaatccgatctttccgccgtttccggaggccacacggctgcaagactgaccaatcccccgcggatcgagccgcagacgccagcagttcctgctcgcggaccgcaggcggggcccggacggagcatggggtcccgatccgccggcgcggcgctgcggctgtggctgctggcgctcctgctgggctgctgccaggggaggttcgtggtggagaagaacagcctcaaggtgacggcgcccgacggcctcaagggcacctacgagtgcgccattggcaacttcggggtgccccagtacggcggcaccatggtcggcttcgtcgcctaccccaaggccaacaggaaggcctgcaagagcttcgacgacttcgatatctcctacaaggccaagccgggggcgttccccaccttcctgctcgtcgacaggggagattgctacttcgcaaagaaggcatggaatgcacagaaagcaggagcagcggcaatccttgttgctgatgacaaagacgaacctctaattacaatggacaaccctgaggagggtggcaacacggattatttagagaacatcactattccttcggcgttaataaccaagagctttggggacaggctcaagaaagcaatcgacagcggtgacatggttaatgtgaatttggattggagggaggccctgccccatcctgacgagcgtgtcgagtatgaattctggaccaacagcaatgatgaatgtggcccaaagtgcgatagccagattgacttcgtcaagagcttcaaaggagcagcacaggtacttgagaagaagggctatacggagttcactcctcattacattacctggtactgcccagaggccttcattctgagcaagcagtgcaagtcccagtgcatcaatcatgggaggtactgtgcacctgacccagaacaggattttagcaaaggatatgacggcaaggatgtggtggtccagaacttgcgccaagtttgtgtctttaaggttgctaaggagcacaagaagccttggttatggtgggactacgttactgattttgcgattcggtgcccgatgaaggaaaagaagtacacaaaggagtgtgccgatggagttatcaagtcacttggccttgatcataaagcaatagataagtgtattggtgatccagatgcagatgaggaaaaccatgttctgaaagctgaacaggatgcacagattggcaagggttctcgtggtgatgttaccatcttaccaactctggtaatcaacaatagacaatacagagggaagcttgacaaaggagcagttcttaaagcactttgtgctggctttagggaaaccaccgagccagccgtttgcttgagtgatgatatacaaacaaacgagtgcctagagaacaatggtggctgttggcaagataaggctgccaacatcactgcatgcaaggatacattccgtggaagagtttgcgagtgtccagttgtgaaaggcgtcaaatttgttggcgatggctatactcactgtgaagcttccggatctggtcggtgtgaaattaacaacggagggtgctggaaagataccaagaatggccggacatactctgcctgtactgatgatggctgcagatgccctgacggattcaagggtgatggcaagcacaaatgtgaagatgttgatgaatgtaaggaaaggactgtgtgccagtgcgaagaatgcagatgcaaaaacacgtggggaagctacgagtgcggctgcagcgggggcctgctttacatgaaggagcatgacacatgcataagcaaaaacggagcatcagaagccggctggggcttcctgtgggccgtcgtcttcggcctcgtcgcagcaggaattgcagggtacgcggtgtacaagtacaggatccggaggtacatggactcggagatccgcgccatcatggcccagtacatgcctctggacagccaaggagatgtccagagccacgcgcaccatattgagatgtgaggaggatgcatgcagacttgatgagaggagacggaggcttggtctagctagcttatataatacaccagaattagatgtgcatattcgtaacaatcttgtgtttagcacgcaaagtccttgaacatttggcgtctgtgttaggttgtaccatgacatggtcttgtttagcaataattgccgtcttttatttcggtgccaataaaggagatggcaaacgggcatgacttgtgtgttgctcagttgtgtctgaggtccatgatcagtggtaaaggaatctgagcccctaatgtaaaagaaaaaattgtgcctggtgtcaattgttccaccccatctaatttgtgccccgat

SEQ ID NO: 58391 - DNA, 938 bp, Zea mays
  Clone ID: MRT4577_153249C.1
cgaggccggccgggccgggctgcttccggttttggttcacctcgaggcttctacaccgcgtccctccgcttccgtcggcatctcgtctagccccggaaaatctctcccactccaactggtccatccgagcagtgtagaactctctccaacaccaacgccctaccccggccgtcaaaaatccaacctttccgccgttttcggggccgcacggctgcaagatcgatcaatcttgcgccgattgagccgcagacacaaccagttccgatccccagccggtgctcgcggaccgcaggcggagcccggacggagcatgggctcccgattcgccagcgcggcgctgcggctgctggtgtgcgcagcgctcctgctgggttgctcccacgggaggttcgtggtggagaagaacagcctcaaggtgacggcgcccgacgatctcaagggcacctacgagtgcgccattggtaacttcggggtgccccagtacggcggcaccatggtcggcttcgtcgcctaccccaaggccaacaggaaggcctgcaagagcttcggcgactttgacatctcctacaaggccaagccgggggcgttccccaccttcttgctcgtcgacaggggagattgctactttgcaaagaaggcatggaatgcacagaaagcaggagcagcagcaatccttgtcgctgatgacaaagatgaacctctaattacaatggacaaccctgaggagagtggcaacacagattatctagagaacatcactattccttcggcattaataaccaagagttttggggacaagctcaagaaagtaattgacaacggtgacatggttagtgtgaatttggattggagagaggccctgccccatcctgatgagcgtgttgagtatgaattttggacaacagcaacgatgaatgtggcccgaagtgcgatagcca

SEQ ID NO: 58392 - DNA, 337 bp, Zea mays
  Clone ID: MRT4577_15324C.1
ttaaagcctttagggggggctataaaggcaggcggccgactcacaacaaaaacgggaaatcgaattcaaacccccatcgcggccaaaaccatgccggtcctaggcccggacgcgagaacccatcctagggggcgggctggccccaacaccgggaaaaaaaaaaccccgtcttcaacccaaaattgcccccaaagcagctccctcacatgaaccggaacctcaggaccaaacaaggacgcagcccctccaaacgaagcaacaaaagccatgggggccggcctgcctacactacacaggtttaccacacctccaaccaacttaggtaactaccagccag

SEQ ID NO: 58393 - DNA, 450 bp, Zea mays
  Clone ID: MRT4577_153250C.1
gaaataaaaactgactttataaatgcttgctaggaattaaagttctgcgctagttgctgggccgcttctgccgccgcagtagaaccctaaccggaaccaaagctaaacctgacctgacctgacctaatcgagactcctaaactctaattaataacccagccgggggattacgacgacgatactagcaagagaaagggagggtagttcaggtacggtacaaggctattacgtccggggaaaaaaaatgtacagccaccgctgcgtggccagcctccatgccgccctccttgcggctccttcgctgacagggtgggcacaagcttagaacgacgccacggccggcgcggcggtggcaaccatgccgccctccttcttgcggcgcatctcgaggaccttgcggtgggagttggagtggatgctgctcacgaacgtggggctgcacgccgggcg

SEQ ID NO: 58394 - DNA, 195 bp, Zea mays
  unsure (1)..(195): unsure at all n locations
  Clone ID: MRT4577_153251C.1
ccaagcgtgtttttttacttggtctggagtctacctgcctttggctngttcactcgttgggcggcgctgcgctgcgggggtgtcgccgcgtcaccgtggggtggctgtggggagcantgcaccggnnntgaaccatgcgaaatgggggggggggggggggggagtggaaaaaggatgttctggaaactgtttaat

SEQ ID NO: 58395 - DNA, 149 bp, Zea mays
  Clone ID: MRT4577_153252C.1
tgacagcagatctcgagtgcaacgcaacgttggcgctttgcggccagtacgagacgctaatttagcgtcggtgtgtctgagtcgatggccaagctccaagtcactcctggcgtcgagttcaccgagtgcaatgaaggcgggttccaggg

SEQ ID NO: 58396 - DNA, 597 bp, Zea mays
  unsure (1)..(597): unsure at all n locations
  Clone ID: MRT4577_153253C.1
ctccctatctgaggtgacccagaccttgaatgcttcaaaataatggtgcaatttgcgcgaagccataacgactgcgtaggcgattttttccagctccgtcatattgcattttgatgtcgtgagtacttcgaagacgtaataaactggacattgcctgattgtgccctctctgttctgctcttgaaccagtgatgcgctgaccgcatgcggcgtagctgcgatgtagagcaacaggggtagcgaggggtcagggcttgtaagaatcgccaactctgacaggtatggctttaatgaagcgaaggccaccgcctgctctggtccccatgcgaagtcttttgcgccgcggagtgttctgagggaagggaggcttcgctctgcggatttggagatgaatttgttgagggcggccaatctgcctgtcagtcgttggacatctctggccgactgcggnggcgtcatgttaatgatggcctggatttttgttttattggcttcaatcccgcggtgcgacactaggtagcccaatattttcccctggcgaacgccgaagacgcactttttggggtttaggcgaagtcgggcgtcctgcatgttcgc

SEQ ID NO: 58397 - DNA, 166 bp, Zea mays
  Clone ID: MRT4577_153254C.1
tgaggtgaatcagaatcggatgatcgctgtatatacatgtccatctacattagcatatggtgtcatcgcctcaatgtttgataagagtactatatgcattctgtattgtgaatggtttggtgcaagtatgtctcgactactgtttagctttagaattgccacactt

SEQ ID NO: 58398 - DNA, 544 bp, Zea mays
  Clone ID: MRT4577_153255C.1
ccggccgggatcgtcgtcgtcgcctaagacaggtcgcgcgcagcggccaagagcccaagagggtatcatctattcccctaaaaagaggatatcgccggcgttgtggcggttggacgccgccgcagacgagccgtgcgcggggagagcggcggacaagggaccatgagatggcagcggagtccaacgaggagaggataatgagcaaggtgtcacaggtggagaaggccatgagccacctgctcatgggacgcggctgatgaaggatccatctgttggtcgtgtttcccttaccatgatgcttcctattgccttcgggtttttttttcttttgttgagggtcgtatgtgtgttttgcgtagctattgagtttcacatgccgcccatctgctctccgttgttgtacaattagggattttagggtaagcagttgtaatctgtcatcttgctcggatgccaggttactaagacatcgatggcatcctcatggaggatgaggtaattctagatgcatgcttccaaaaaaaaaaaaaaaaaaggggcggcc

SEQ ID NO: 58399 - DNA, 723 bp, Zea mays
  Clone ID: MRT4577_153256C.1
accggtaccggccctcccgggcttctctcgtcacgtacgccgccacctctgtcatcgcagcgtcacctccgacatcggtgtcacctcgggtccgcgcgctagcaactccggctcctcaggtgagggctgagtggctgacctccgctcgtatcatccactcaggagagagaatcggactttgatccactcaagagcctggtcaatccagtccttctctgcgactcttctgatcctagttcttcgccgtcgctgctcgtttctccagctcccgcagtccgcacccgcaggtcgccgtcgtcatctctccatagatctctccactctccagtgacggtggagcagatagccgctgtggtttttttttgtgtgtgctggtagtggacctgtacggttctcttgcaaacaaccactcggtaattctctcaggaaccgtgggataaccaaacagccaccgggtaattatcacggtgaggtattttctgacagggaagtaaagtgacaaggaaatcttcccctttagtatttttcactgggttaattaccctttagcttccaaactagcccataaagggttaatagtggcacgagtgagagggaatagagggaaggggagacgaacgatgatccaaataatattattattgggagtctatattggaaggtccttaaagcattgatttatcaattatttacgagtctgtttcagatttaataggataactt

SEQ ID NO: 58400 - DNA, 565 bp, Zea mays
  unsure (1)..(565): unsure at all n locations
  Clone ID: MRT4577_153257C.1
agtcttaaaccctcactcctctccttccaccacctccggaactccacactctatctctgtcagacatggcgccttccgcgacctgccctctccactccatggcatccgtctcccgcgctctccgcccgcgcccgcgtctcgccgctcctcgtctcgggtgcggactgagagttggatgctctgtgccagcatatggaggtgctgccacggagaagaccgggtggggattggccattgcgcccgcaccagcgaccactcttgttccggttgtcaggagccgtcaaattttctgcaaggcagaagctaatatttctagtaacctgccagcgagcgagcctactggagcaagccagtacgagaaaatagttgagctactcacaactcttttccctgtctgggtcatattaggtacagttattggcatctacaagccatcaatggtcacctggttggagactgatctttttaccgtgggcctaggattcctaatgttgtcaatgggactaacattaacatttgaagatttcaggagatgnttaaggaatccatggacagttggtgtggg

SEQ ID NO: 58401 - DNA, 197 bp, Zea mays
  unsure (1)..(197): unsure at all n locations
  Clone ID: MRT4577_153258C.1
acagcgctnagagatagatttatactctttcaggaatcagtttgcttcaaagcagttcctgggtttccctgagcaagtcagggagaacaccttgtcgtttttgccatgtgccccctgtgtcaagccagcaacctgttccctttcccatttctcacacttatgaccgctcgggctctctgccccgtcgagccggcccc

SEQ ID NO: 58402 - DNA, 212 bp, Zea mays
  unsure (1)..(212): unsure at all n locations
  Clone ID: MRT4577_153259C.1
gatgttttggtgaaagggaaaaattaaaagggatttcgtggcggcgtgccttcccttttctganatgcacgtggagtagtagcaagtgcagtccgactctgtttcgcattggagtgctgttgggggggccccaagcttgatctcaccccaacgacaacgagtgcatgcagtcccccctctcttcttttctgatccacacctgcgcanttttg

SEQ ID NO: 58403 - DNA, 580 bp, Zea mays
  Clone ID: MRT4577_15325C.1
tcgagcggccgcccgggcaggttctgaacaaatttgtaactattgaaaaagactattctgagcattactcgtattcttgctgaggtgtacctaggataacctactattcttggctcatgttatgcatactaaccctgggtgtattggttctgccttatggttttagtagttcagtatattgtccatacttgaatttgttgagagtgagtgacctggtagacgttctttaatgcacttgtctgcattaatcatgcacatgttatctcgctccttagaccatgttagcggatccacacatttcaaatgtgtggattttaaaaaaagaatgggaaagaggtgctagagctgtaatgtttcctgtgcaattcctgcacaatgctagccgaaagaatccaataacctctttttgtgagtcatggcttgaggatctgccctgcaatggcttgtgaaggagtagatagaacctttgaaaactattgaccctagtaaccaggcccaactgtcaaatttgtaatccctcagaagcagtatctcacgtggatcatgattatatttaggcccaatggtggctatatataaa

SEQ ID NO: 58404 - DNA, 253 bp, Zea mays
  unsure (1)..(253): unsure at all n locations
  Clone ID: MRT4577_153260C.1
atctcagctagcaagcccacctagctcagccacaacccagtacactcttgctggctacttgtttcatcagcatagcaatggcgccctccaaggtcgccctcttcctcgccctgaacctggtcctcatggcagccgcgcatggntgcgggtcgtactgcggcaacacaccggccatcccagtggcaaccccgccgatggccatgcccccgcccgtnatcncagtcccaaccccgccgacgaccggaggcggcag

SEQ ID NO: 58405 - DNA, 644 bp, Zea mays
  Clone ID: MRT4577_153261C.1
cccccccccttcccttcctttttttcccccctcttttttttttttctcttgttttttttgtttgttttttttttttttttttttttaaacgggggcccggtttacgggcgggggccctgcttttccttttaattaaaaaaaaaactttttcccctttttgggggggaaatagccccaaaccccccccctttttttttttttactttccccaggggacacctccccacggccctttgttgttaaaacggggattctttggggttttccccggacccccaacccgggtttgccccccgttttgggcaccttttagggcccctccccctcccccgtccggtttttaagggcagggccccgtttcccccttttttttttgcccggaaccttttcaaaccttgccgggaattcccccagggccttggccgccctccgttcgcccgtccattgttccgtgtccgggccctccccaaggaacacctccgggcctttgaaccccattggccccggggggagggaaataaaccccccccctttggggaccggggtaaccctccccaaaaagacctattccgtgacctccgccccggggtccggcccccgcccccgccccctgggaatggagggccctttcggaacaaacccct

SEQ ID NO: 58406 - DNA, 497 bp, Zea mays
  Clone ID: MRT4577_153262C.1
ctgggccccacaaaaaggaggggttttttatgacacccataacacgggcaaaaacagggggggccaaaaaaaaaaagaaggaaaaaacccgcaacccaaaagaggcggcaaaaaaaattccactaaaaaacaaaaaccccaaaaaaacccccaacccatatttaaccccccccaaaaccccccaccccctaaaaagggctttccgtttaaaaagggcccataggaaggcccttgaaaaaaaagcgctttcttaaaagggaaccctggggaaaacgggaaaaaaaccgaaaccgggcccagaacccctttttccaaaaaaaaacccatgcgaaataaaccccggggggagaaaaaaaccccaaattaccttttataaacagggggggggccccctttcccccccgggggcccaccccacaaccatcccccccggtgccccccaggggccacaaaaaaccccccccaaagtgccccccaaatctttgggcccggggggg

SEQ ID NO: 58407 - DNA, 612 bp, Zea mays
  Clone ID: MRT4577_153263C.1
atctgcccgtacatattatctgtttttctcgctaactgcactgcactggacttgacccagagtccaccagcgtgaccaatgtgtcagagtaaaaacgctcgaagagcgactgaacacgctctgttcgggaacaaggactcgcgcagtagagatcgcaacaatctgatagacaaaacttatccatgtagacaattgatatatgagtaatggatggccaagatatgatgtattaccgagaagaagaagagagataacatacatgtctcgacggtgcaagaaagcgaaagatgcattgactggcgagatcacacgaataacacccagtggacatggtgaccacctctcacgactatggaccagcgcattaacatgcgtcattaatgatatcgacacaagaaacacatcgagatcggacgatacatatattactaagtcatgggcaccgctctcttactgttggaggactgaacgatgttggccgatgacataaacgcggagaactacgagctaagcctttcctgtattaacaagtactgcgtgagacacaagatcgacttccaataggaggcccgcgctacttgtgctgcaagacctaatgatgtacatggagca

SEQ ID NO: 58408 - DNA, 608 bp, Zea mays
  unsure (1)..(608): unsure at all n locations
  Clone ID: MRT4577_153264C.1
cggccgggccgggagtgtccagctgcaaacttctccccccagcttctcttgctcagtgtgcatctctctttgtatttcactgtgctggcctgctttgttccttcgttctggttactattggttgctgcttccaagtgacgtaccagagtggtggttggcgtttcagtatgatttgataagatgaccggcaacgcgtcttatcagcatctgggactgggagtcgacgccacgatgcgcagctgcttcgccagcggcgacggcagtgttatcagcagcgccgacgcgcccttcttccacgtcccggagtacacactgcacggcggcggcggctttgggtttggcgaacccgcagcggacgtcgccgcctcgagcttcttggcggatggttcggtgctgctcgccggccagctgctccgtgccaccgcactgcagagcgtgtcgccggaggagaggcacggtgcctactacggcgtcacgggcgggtcgtcgtcgtacggcccgtcgccctgngatgtcaccgttgctcacgcgcccagcaggatgaccaagcagcctgtcgctggagagccggaaggcggctggatccacgagtcttcgtactactgccc

SEQ ID NO: 58409 - DNA, 981 bp, Zea mays
  Clone ID: MRT4577_153265C.1
ccccgcgtccgccccgcgtccgtaggaaactctcccctttccgttttagcttagcgtccagctgcaaacttctcccccagcttctcttgcatctctctttgtatttcactgtgctggcctgctttgttccttcgttctggttactattggttgctgtttccaagtgacgtaccagagtggtggttggcatttcagtatgatttgataagtttcaggcccttccttcttttttttttaaaaaaaaatcggtatctagttatctacaacgtttgacacctcctcccggacctcaagatgaccggcaacgcgtcttatcagcatctgggactgggagtcgacgccacgatgcgcagctgcttcgccagcggcgacggcagtgttatcagcagcgccgacgcgcccttcttccacgtcccggagtacacactgcacggcggcggcggctttgggtttggcgaacccgcagcggacgtcgccgcctcgagcttcttggcggatggttcggtgctgctcgccggccagctgctccgtgccaccgcactgcagagcgtgtcgccggaggagaggcacggtgcctactacggcgtcacgggcgggtcgtcgtcgtacggcccgtcgccctgggatgtcaccgttgctcacgcgcccagcaggatgaccaagcagcctgtcgctggagagccggaaggcggctggatccacgagtcttcgtactactgcccggcgacgtggttctctggcgacggcttccgggacccgttcgccggggcggcggcgagcgagttgtcgctcaggctgcgcgctgggtcctccccgacggcaggtgcggcgagcgtgagcctgccggatcagtcctcggaggtgagctgctccggcttgacgcattggagtagcggcggcggccccggcatgttccagcttccttgcggcggcgccggacaggtggcggtggcggcacgtccgggccccatgcacttctcg

SEQ ID NO: 58410 - DNA, 256 bp, Zea mays
  unsure (1)..(256): unsure at all n locations
  Clone ID: MRT4577_153266C.1
caggcaggagtaccccttccggcaagagcgatacgaatgccgcattcacctttatttagacaggaaaaacgactggctagccatccaccgacagctatttgcgctagaccctacctcaacacttttagtaggaaacatgggccgcttacgcgacaatcatcactacaggtgaacgcacgacgcgtactcaatatcagtagaaacagcatacttgatatttaaaggcatctaagaaaaagctctgncgtgcatggag

SEQ ID NO: 58411 - DNA, 3645 bp, Zea mays
  Clone ID: MRT4577_153267C.1
atggctcaacagaacgagatcttgcgacagctagctcagcgtcagccaccacctcagcactatggtggtggtgatcatcagcgtcaccccacggcagccacttatcaggagttcctcagtacccagccaccgttgttcaccagggtagaggacccacttgatgctgatgtatggcttaggttagtggaatccaaattcccactactcaatggagtttgttccgaggtgactaaggtcaggttcgccacccagcagcttcgcggacccgcgcggacatggtgggaccactaccttgctatgcaaccagttgaccatgaggtggaatggagagagttcaaggcagctttcagggggcatcatattctagcaagcattatggaccgcaagctcaatgtgtttctagcactcactcaggggaatcagacagtgttacagtatgctcaggccttcaatgacctgtgccagtatgccaaatatcatgcagacactgatgagaagaagagggatagattcaggagggggctcagcactaagctccgcgaccgtctcaacacagtcagggccaacaactataatgagttagtcaacatggccatttctcaggaggactgtatcatagctcgtcaggcagagaagaagaggaagacccctgtggcaggaccctcagctcagccacatcgcttcaggatcatatctgacactcagaacaggggaccccagcagcagcaaggacgttgggcggtgattgatgtcgcagccagagccatagaaatccactccccactggatggcgagatcaccttgtacctacccgaccaaggatgtacccgttcctgtgccttcaccatgatagagtcacctgttgagaagatccccatagtctgtgactacccagatgtttttccagatgaattgccagggatgccacccgatagaggcatagagttcgcaattgaattgcaacccgggactgctcctatatccaagaggccttataggatgcctccagcggaattggcagaattgaaaaagcaactgcaagagttgttggacaaggggtttattcgcccgagtacttcaccatggggatgcccagccttgtttgtaaagaagaaggatgaaagtctgagaatgtgtgtcgattaccgccctctcaatgcggtgaccatcaagaacaaatacccactgccccgcattgatgttttctttgatcagttggtgggagccaaagtgttctccaagatagaccttcgctcgggctaccatcagatcaagatccgtgccagcgatattcccaagacggctttctctaccagatatgagctttatgagtttttggtgatgtcttttgggctgaccaatgccccggcttatttcatgtatctgatgaactcagtattcatgccagagctggacaaatttgtggtggttttcattgatgatattctggtctattccaagaatgaagatgagcatactgagcatctacacatcgtgcttcagcgactgcgcgatcatcgtttatatgctaagttgtctaaatgtgatttttggctgagggaaattaaatttttgggtcacacaatttctcaggatgggatatcagttgatcctgagaagaaaggagtcaagtatgattggagccagaggtgtgaggatgcctttaatacactaaggcagcatttgacaacagcaccagtgctagctcaacctgacaacacgaagccctttgaggtttattgcgatgcttcaggtactggactggtatgtgtcttaatgcaagacaacagagtcattgcttatgcctcccgagcactcagaccccatgagcagaactaccccacacatgatctggagttagcagctgtggttcatgctctcaagatatggagacattacttgatgggagctcattgtaacatttacactgatcataagagtctcaaatatatcttcacccaggctgatcttaatatgaggcagagaagatggttagagctaatcaaggactatgatttggaggtgcattaccatcctggcaaagccaatgttgtggtagatgccttaagcaggaaggcccagtgcaattgtatgaatatggatgcaagaatcaccaccctatgtgatgagttatgcaagttgaaaatagaagtcgtttcctccggtgccttgagttatatttcagtggagcccaccttacaagagcaaatagtcatggcacagattggtgacaagggtgttcaggttatcaaggaaatgatcgaacagaaagcagaaaaatacaaatgcttccgtcaggacagcaaaggaattctatggtttggagaccgactggttgtccccaagaaccctgagctcagaaagaagatattggatgaagctcacctttcaaaattctccatgcaccccggtagtaataagatgtatcatgacctcagatccttatactggtggaccagaatgaagagggaaattgctaagtatatatctgaatgcgacacctgccggagagtcaaggctagtcatttgaaggtagcaggcaccttgcagcccctccccataccatcttggaaatgggaggatatttgcatggattttatcgtgggattgcccaatacctcccagcaccatgattctatttgggtcattgtggataggttgaccaagaccgctcatttcttaccagtgcataccacccacaagacagagaaatatgcagaaatctatgttgatcaaatagtgcgtttgcatggcattccgaagaccattgtatctgacagaggagcactatttgtggcacacttttgggagcagctacaagaatcacttgggacccatgcaataagaagctcagcataccatccgcagacagatggtcagacagaaagagtgaatcaaatcctcgaagacatgttgcgagcctgtgtgctacactatggtaaaaattgggacaagtgtctttctttggcagagttctcctataataacagctaccagtccagtctaaagatggcaccttttgaggccttatatgggagaaggtgtaggacaccgctcaattggtctcaagcgggagagagggaaatatttggaccagacttggtacttgaagcagaggaaaaggtcagagtcattaagaagaacctagaagctgctcaggcccggcagaagagctatcatgataagaggaggaagcctctacagtttgaagtgggagatcatgtttatcttaaggtgtcacccaccaaaggtgttcagagatttggaatcaagagcaagttagctcctcgctacattggaccctatgagatcaaagcaaattgtggacccgtagcatatcaattgaagttgccaccccacatgtcagcagttcatgatgtgttccatgtatcccagctacggaaatgtgtccgcttacccactgaagtactacctgaaccagaaattgaggtagaaccagacttgtcttatcaagagcaccccgttaaagtattggatcaaaaggagagatcaacgcgggcaaagtcgatcagaatgtataaggttcagtggagtcaccattcagtagaagaagctacttgggagactgaggattttctacgttctcgcttccccaactttctgcccaagggagtcggtacgtaa

SEQ ID NO: 58412 - DNA, 4077 bp, Zea mays
  Clone ID: MRT4577_153268C.1
atgacttctcatggatcctcagacgaagggaatgcacagtcccacacggacggacttgcacgagagggtttccgctgtatcttgtgggaggtacttcagggagcaggttacatgacacctcccctgtacgcggtgcagcagttagagaagcaccgagtgccccgctgtagggtgaggatgaccctggagcctcatcccctgcagccaggctggcgttcgctggactttgaatgttttgggtaccgggctgaggatactatcgaggcgatcgctcttcacggactgaccactttctgcagattccaccccttggagctgtccactcaccccattggcttgttcctcactgagaaggaggacgacccaatgtggaaggaccgagtggagcatgccaaggacatctgggctatctacccatgtcagactgctcacttaacggtgcggtgcatgaatgccctgtatcgtctgcaagtgatgcgtggagaggcaatgtcccatctgatggcattgttagaggcaaccaaaattaccttggataatagagaggaacttgtggttgacttgtccactgagatggtggaaaaggacttacaggtggagcaactgtcaaatgagatccaagagcttgaggaactagtggggacgagggagaacacccttgaggagctgatggctcaacagaatgagatcttgaggcagctagctcagcgtcagccaccacctcagcactatggtggtggtgatcatcagcgtcaccccgcggcagccacctatcaggagttcctcagtacccagccaccattgttcaccagggcagaggacccccttgatgcggatgtatggttgagagtagtggaatccaaattcccgctactccatggagtttgttcagaggtcactaagccagaggaccgagaggtggaatggagagagttcaaggcagctttcagggggcaccatataccagcgggcattatggaccgcaagctcaacgagtttctggcactcactcaatggaaccggacagtgttacagtattctcaggccttcaatgatctgtgccagtatgccggatatcacgcagacacggatgagaagaagtgggacaggttcaggagggggctcagcactaagctccgtgaccgtctcaacacagtcagggccaacagttataatgagttagtcaatatggccatttctcaggaggattgtatcacagctcgtcaggcagaaaagaagaggaagtcccctgtggaaggaccttcagctcagccacaacacttcaggatcgtgtctgatactcagaacagaggacccaagcagcagcaaggacgttgggtgatccgcccacagcagcagcagcagtaccgtcaggccaatgacaacatgtgtttcacttgtggtaacactggacattatgccaagaattgccccatgaaccagcagaggcagaggcagaatgccaaccagaatcaaggcaagagacaaaaggttcaagtgaggcaaggcagattgaacttcaccaccatggctgacattccagagggagcacccgtcatgactggtatcttttcagtttcgaattatcctgctattattctttttgattctggtgcatcacatagttttatcagtgccaaatgtcagttacctttccatcataccaatgggggtattacaatttcaacaccaggaggcagggttgccacctaccaaatcaacaagaatgtgcctataaagtttggtagtttgataatcaaaacgaacctcctcattttgggtttgaatagtgtggatatcatattgggaactgactggttaaccaaacatcaggccacgatggatactgcagctagggccattgaggtgcactcaccgacttgtggtgaaaccacattatatttgcccaaccagggttgtacccgttcttgtgccttcgttatgatagagtccccagtggaaaggatcccattggtctgtgactacccagatgtttttccggatgaattgccagggatgccacctgacagagacattgagttcgcaattgaattgcaaaccggaactgctcctacatccaagagaccctataggatgcctccagcagaattggcagaattgaagaagcaactgcaagagttgttggacaaggggttcattcgcccaagtacttcaccttggggatgtccggccctatttgtaaagaagaaggatgaaagtctgagaatgggtgtcgactaccgccctctcaatgcggtgaccatcaagaacaaatacccactgccccacattgatgttttatttgatcagttgctaagagaaattaaattcttgggtcacacaatttctcaggatgggatatcagttgatcctgagaaggtgcaagaggtaatgtattggaaacctcctaccacagtgagacagattcggagttttctgggattggcagggtattatcgacgattcattccggatttctccagaattgccaagccaatgactgaactattgaagaagggagtcaagtataattggagccagaagtgtgaagatgcctttcatacactaaggcagcacttgacaacagccccagtgctagctcaacctgacaacaccaagccctttgaagtgtattgcgatgcttctggtacgggactgggatgtgtcttaatgcaagataacagagtaattgcttatgcctcccaagcacttagaccccatgagcagaactaccctacacatgatctggagttagcagctgtggttcatgctctcaagatatggagacatttcttgatgggagctcactgtaacatttacactgatcataagagtctcaaataccttttcactcaggcagaccttaatatgaggcagagaagatggttagagttaatcaaggactatgatttggaggtgcattaccatcctggcaaagccaatgttgtagcagatgccttgagcagaaaggcccagtgcaattgtgctttaaattatatctcggtggagcccacaatgcaagagcaaatagtcagggcacagattgaagacaagggtgttcaggtcattaaggaaatgatcaagcagaaagcagaaaaatacaaatgcttccggcaggacagcaaaggaatcctatggtttggagatcgattggttgttcccaaggaccctgagctcagaaagaagatattggatgaggctcacctttcaaaattctccatgcacccaggcagcaataagatgtatcatgatctcagatccttatactggtggaccagaatgaagagggaaattgccaagtatatatccgaatgtgacacctgccagagaattaaagtcattcatttgaaggtagcaggccccctgcaaccccttcccataccatcttggaaatgggaagacatttgcatagatttcatcgtgggattgcccaatacctcccgacaccatgattctatttgggttattgtggatagattgaccaagaccgctcatttcttgccagtgcataccacccacaagacagagaaatatgcagaaatctatgttgatccgatagtgcgtttgcatggtattccaaagaccattgtatatgacagaggagcactgtttgtggcacgcttttgggagcagctacaagaatcacttgggacccatgcaataaggagctccgcatatcatccgcagacagatggccagacagaaagagtgaatcaaatcctcgaagacatgttgcgagcctgtgtgctacactatggtaaaaattgggacaagtgtctttctttggcagagttctcctataataacagctaccagtccagtctaaagatggcgccttttgaggccttatatgggagaaggtgtaggacaccgctcaattggtctcaagcaggagagagggaaatatttggaccagacttggtacttgaagcagaggaaaaggtcagagtcattaagaagaacctagaagctgctcaggccaggcagaagagctatcatgataagaggcggaagcctctacagtttgaagtgggagatcatgtttatcttaaggtgtcacccaccaagggtgtctag

SEQ ID NO: 58413 - DNA, 625 bp, Zea mays
  Clone ID: MRT4577_153269C.1
tattctcatttcctaaagtacccctatttacatagagtctatccaccccaccggggcagtggtagacccgcagagtacgcggggatccgacggccacgtccttcacacagagttgtttcgtcttgatgcatcctccgcgatcatgccgtgtgccgccatcgattccctccggaaccgccaccgccgagttttgaggcccaaactcagcaaaacctgccatccgtagcgctgggtggttttgagactcaaaccaccaaacctgtcatgagcaccgcacctcgtgcacgtccttcacgatcagacgcgtgtcccgccagtcctcgaccatgccggcaacacagtccactccactacgtcctcgcacaagtgtgtcccaggtgtcagccaccgcggttagtcacctggctgctctgatctgtcagtcaagacccagcactcgcccttcactgctcccggtccatcagcacgaacccgaatgaccttcacctcagccatcaaccaccgtccttgtgctcctcacctgcacaccacaagtcgaccgacatggttgcacaagcataatctcacactctggtcagtccacttactaccctagagtgctacccattaacaaccactcatcatg

SEQ ID NO: 58414 - DNA, 470 bp, Zea mays
  unsure (1)..(470): unsure at all n locations
  Clone ID: MRT4577_15326C.1
cattgggtacctcgaggccggccgtgctccttctattcactcacctctccctgcgttgctctacactccctcctctgcccctgttctctctctccggacgagctcgacgccgacgactggcctgctcgctgctgccgccctactccgcaggcctcgcagcgcactcttcgngccccttcgctcggcgacgaacgacacctcgtatctctatccggaacataccgctgacctcactcatctgcggaccaaaaatccctctctgaatttgaatcccttcgcttgacgaccttgctctcctagatctcatctcgattgccagcatcggacctgcgacccgactccaattttggagcctcgctctaccctatatcaccgtagaatatccgatgtgctccgtaaagacgacacatgctgagactctgctgccgcaaacaagcaggaagacgcgccatgcatgacgtgcacagagg

SEQ ID NO: 58415 - DNA, 583 bp, Zea mays
  Clone ID: MRT4577_153270C.1
gtttttattcctttttttttttttttttttttttttttttttttttttttttttttggttggggagaggcaaaaacagtatttttactactacgggggaagtccctttttcaatggaagtcacaagcctgacatgacctgacaaacacgggacaacactggaagccaggccgagggttaatttcctcccaaaaacaaagggcaaggggaccgggggggaactgccccggattccttccgggcccccggggccggggacaaaaaaaacttttgttttttttttctcgcgtgaccagaaagaacaagaaaaaaaaaaaaccgaggggaaagggggggggtttttttttttttcactgtgccgaggggccggaaaaaaaccggtaaaacacctggagccggcccttggacggatcgacaaacgcgagggggggagggggggcaacaaaaaaaaaagggggaaattttttttggacccgaacccggacccggggaaagcgtatttccttgggttgatcaggtggggagcaaaaaaagggaccccaccccggtcaccacttttctctttgggtggggggggtgggggc

SEQ ID NO: 58416 - DNA, 241 bp, Zea mays
  Clone ID: MRT4577_153271C.1
atcaccaaatacgcaacggcgggcgcggcacgctgtctacccacaatgatactcaccgccgttctccacgggtctcctctcgctccgcgaatcatccgccgtttctcttcttctcaaaagtagcggccgccttcctcggtcatacatctcgccccgcgcggagagatcgctaattccccgcgcgtgtgtaaatggcaccgacacaatgtgggccggaatggaatgagcgtggccggcgctc

SEQ ID NO: 58417 - DNA, 400 bp, Zea mays
  Clone ID: MRT4577_153272C.1
acccccatcaatatatgtctttttttggggtttttagattgaacagcccgccaaagaattctactaacggcgagggttcttgcaaagagggtttattaccacaaagagggctggaaaaaccacttcgttgtaataataaataactccagactcagggccaaaagatcaaggggcaattgccactctatttcgattttttatacgtcccccgaactggaattaatcaaagaggggggaccaacactgtgaccaaacaagctcggaactgacaaataaattaggttgcctcacaggtccccaaaagctagtggctggctaaacattttttcggtctagcccagcccgtcctatagagccctaatgatctcattccgaaccaaatctgcctggaaaccaacat

SEQ ID NO: 58418 - DNA, 520 bp, Zea mays
  Clone ID: MRT4577_153273C.1
gcctcctcctcctcctcctcctcctcctcctcgccgcggcacccgcgccagcatgcggccgccttcgccgccgcgacgctcgagtcccacctcttcaacgcgccctacctgtcgctgcccatgggcgtcaggagcgtggtcaggacggcggactgcctgctcaaggcgctccgctccggcgtcgccaccgtcggcaagtggcacggcaaggcgctccggaacgtggcctacgccagctgcatcctcggatacaccaggctcgagagcaccaggaagttgtgaggatcgatcggatcggatgcatcttgcctcgcgtcctcctcgatgctgggcttcaagtcttcaacggttgaaccgtcctgccagccaaccaaactgtatctatgctcgatcaccttgtagtaggaagtactcggaaattaattcaattctagcaggagacgaataaagcatctgaccggaggatgcaaggcctttgcgtgcatatgctttgcttttgtcaatctttttaaatgtgaat

SEQ ID NO: 58419 - DNA, 256 bp, Zea mays
  Clone ID: MRT4577_153274C.1
gtggcacgcctgctgctgcgtacggaattattggggggacgcacgcgtccgcccactctttccaaaaagcagtggatgagaaacaagcggggagggttatatctgtgatcctggcgacagaggtgaatgatgcgataatcaacgcggcggaggcaaaccgtgtcggcagtaaggaacaagcaggctaccacccagaagtgggacaagggattgcattctaagagatacagttcattgtggagaaacatgccattcg

SEQ ID NO: 58420 - DNA, 3944 bp, Zea mays
  Clone ID: MRT4577_153275C.1
tgctttttatggatcacccaataactgacgctgcacagagaatttttctatgactccaacgcaatccatatggcaaaacaaagctcgttgatgcggatattggacgggatatctaccgttcagagcctgagtggacgcaccatcttactataggaagctacagcttcggcatgaccttccgtccgccctgcgtccgccgaccgtccgcgcttggcgtccccgtcttcgtcgtcttgtagtagcactgagtgcgggagtactggccggccggcggcgaggctcctccactttctctgcacccatacatacgtatatgcttgttctccgccgtctccgcctccgcctcccactgccacgccctcttctcgtctcctccttctcctccacctccccctcctcctcaccctcgacctctagctcctcctcctgttggtcgtcgacaggcgaaagtagaagggccatggcgtcatctccttctcccgattcggccgcggtcgttgccgagggctccgcggctcgccgcttctggatcgctgcctccacgcgcgaggccgccttcgccgcatacacgcccttcctcctctccctcgccgccggcaatctgcggctcaacgtgtttcgccactacatcgcgcaggacgcgcacttccttcacgccttcgctcgcgcgtacgaaatggccgaggactgcgctgatgatgacgacgacatggccaccatagccgccctcaggaaggccatcctccaagagctcaacctccactcctccgttctgaaggagtggggagttgatcctaccaaagagatacctccaagtgcagctacaaccaaatatactgatttcctacttgcaactgcggctggaaaagttgatggcacaaaaggttctgacaaaatggttactccatttgagaagactaaaattgctgcatacactgttggggccatgactccatgcatgaggctttatgcatatctaggcaaagaactcatggttttccttaaacaagatgaaaatcatccatacaagaaatggattaacacatatgcatccagtgattttgaggacaccacactccaaatagaagaattgctagacaaactaagtgtctcattaactggtgaggaacttgagattattggcaagctctaccagcaagctatgaaactggaagtggagttcttttcttctcagcttatagaccaacctgttgtagctccactttcaagatactgtgatccaaaatataaactcttgatcttttctgattttgatttgacgtgcactattgttgattcatctgccattttggcggagattgcaattttgtcattccaaaaggcaaatcaaagtgggattgataataacctcgaccgtgcaaaatcgggagacctgagaagttcgtggaacatgctctctaagcaatacatggaagagtatgagaaatgcatggaaagactacttcctccagaagaatcgaagtcactagattatgataaactgtataaaggcctggaggtgctagctgagtttgagaagcttgcaaattctagggttgtcgactctggtgtgctgaggggaatgaatttggaagacatcaggaaagctggtgagcgtcttattcttcaaggtggctgtaaaaatttctttcagaagattgtaaaaacaagggagaacctcaatttggatgtccatattctttcctactgctggtgtgcagaacttataagatcagccttctcatcagccggttgtctagatggtttgaacatacattcaaatgagtttgcctttgaggattctgtttcaactggtgagatcgacagaaagatgcagtctccgctagacaaagttgaaaagttcaagagcatcagaagtgacgtggacagtacagtgccattcctatctgtttatattggagactcggttggagatttgctctgcttattggaggctgatattggtatagtcattgggtcaaccacaagtttgcgtagggtgggcaaacagtttggtgtttcttttgtcccattgttccctggtctagtagagaagcagaggcaactggcggaggaagatgcatccgtattcaaggcacggtctggagtcctctatacggtttctagctggtcagaaatacacgccttcgtactgggaagtgatttcagctgatggatgtgctgcttcttttcttccattttttttccgcttgagaagcaaaattgccggccgatgctgatgcacatgatacgtgaatcctcaatgtggtcattttatgaaagccacatgtcaattctggctaccagtatgtatgaatgaataccgataccagtttgtggtgtggaatgggttgagtttgtacccttgaattgtgatcaatgtttcattgattcgtctgtccttgttccattcggggctaatttctgggtggttgctggcattatactgcaccaacaacaacagtataaacatagtggtatatatcccaagtccaagtgtaacgacgactgcataaatgtagagatgtttgtttttaattggcaataaatgaaatgtgatgagactgttgcgcgttataagtgacctagcccactcgaggcagcaatgcacttgtgctgcttcggctatctcatctccattcctaaggcaaacagccttattcctttccgtagtttagcatggacaaagacagaaaaggaatgagaaaacaagagaaaaatggaggacacaatggcagccaagacatccagcaagagtcctcatgaacctccaagaagagccttcagtaacttcttcagcgtatccacaatgctcgaaaacgaaggccgctgccttggatcgtcatcccagcaggcttccactagagcagcaagttctggactggtatctttcggaatcggaagccttctgttctgaaacgctacagctcctactacctgcgcagggcctaggccactccatggttgctgcatcgtcaggagctcccacaagatgacgccgaagctgtaaacatcgcacttctcgttcgatggctcgccgcgcagaaactcaggcgccatccattctggtgttccagcaactgatttggatgatatgaaggtgtttgccttaaatctggacaggccaaagtcacctaccttcacagaccagttccggtcgaccagcatgtttggtgtctttcaatcagcttgtaagcacttttactgcaacatctgaaccatgccagtccgcgcgataaaccgtgccgaaagaaccggcgcccacgcgttccttgagctcgagctcctcccatgatatctccagccaatctacggcaaaaggcggctcaatgctcatgggtttcggaagatcagcaccagggacgttctccttgttgccgttctcagcaccgatgtccattgccttcaactgcatcgacacttgtaacactgatacgccattacagtttccattctgtgtgatctgtccacacttcggcaccaagtcttctttgcttctggctacctgagcagagctgttctccacaacgcggcacctagcaactgagcactggggattcgatgataccatgttgcgacgttcaccggctgttgattggttccaggctgcgactggtgttgtgtagttccctgagccgactgcggacgaagtcttgaaaggtgaaggcacggtggacagcagctggccgttgatggatgagtccgggcagctgatgctccccggctcaactacaaggtccacgacgtattcccttacgtatcttctctcactgtcaactttgacaaggcaagatgatcggtgaggcgcagagcagtacttgcaaccttgcgcaatccggcatggcaggccgatgaagtctgcaagtacctttaaaagaatggcacggtgccggcagaagcctaggacaggacgccaatcccggccggcctcgaggtacccaatg

SEQ ID NO: 58421 - DNA, 3632 bp, Zea mays
  Clone ID: MRT4577_153276C.1
aattcggcacgaggccactttctgccctgttggagtccccgtcttcgtcatcttctagcagcagtgactgcgggagtcttggccggccggcggcgaggctcctcccctttctcctatttctctgcacatagtcacatacatacgtatatgcttgttctccgccgcctccgcttcccgctgccacgccctcttctcgtctcctcctccttagcccctctctcaccctcgacctctagttcctcctgttggtcgtcgacaggcgaaggtagaagggccatggcgtcatctccgtcttccgcttccgctgcggtcgtcgccgagggctcggcggcccgccgattctggatcgctgcctccacgcgggaggccgccttcgctgcatacacgcccttcctcctctccctcgccgccggcaacctgcggctcgacctcttccgccactacatcgagcaggacgcccacttccttcacgccttcgctcgcgcgtacgaaatggccgaagactgcgctgacgatgatgacgacagggctaccatcgccgccctcaggaaggccatcctccaagagctcaacctccacgcctccgttttgaaggagtggggagttgaccctaccaaagagataccttcaagtgcagctacaaccaagtacactgatttcctacttgcaactgcggctggaaaagttgatggcacaaaaggttctgacaaaatggttactccatttgagaagactaaaattgctgcatacattgttggggccataactccatgcatgaggctttatgcatatctaggcaaagaactcatggctttccttaaacaagatgaaaatcatccatataagaaatggattaacacatatgcatccagtgattttgaggacaccgcactccaaatagaagaattgctagacaaactgagtgtctcattaactggtgaggaacttgagattattggcaagctctaccagcaagctatgaaactggaagtggagttcttttcttctcagcttatagaccaacctgttgtagctccactttcaagatactgtgatccaaaatataaactcttgatcttttctgattttgatttgacgtgcactattgttgattcatctgccattttggcggagattgcaattttgtcattccaaaaggcaaatcaaagtgggattgataataacctcgaccgtgcaaaatcgggagacctgagaagttcgtggaacatgctctctaagcaatacatggaagagtatgagaaatgcatggaaagactacttcctccagaagaattcactagattatgataaactgtataaaggcctggaggtgctagctgagtttgagaagcttgcaaattctagggttgtcgactctggtgtgctgaggggaatgaatttggaagacatcaggaaagctggtgagcgtcttattcttcaaggtggctgtaaaaatttctttcagaagattgtaaaaacaagggagaacctcaatttggatgtccatattctttcctattgctggtgtgcagaacttataagatcagccttctcatcagccggttgtctagatggtttgaacatacattcaaatgagtttgcctttgaggattctgtttcaactggtgagatcgacagaaagatgcagtctccgctagacaaagttgaaaagttcaagagcatctccaatataaacagtacagtgccattcctatctgtttatattggagactcggttggagatttgctctgcttattggaggctgatattggtatagtcattgggtcaaccacaagtttgcgtagggtgggcaaacagtttggtgtttcttttgtcccattgttccctggtctagtagagaagcagaggcaactggcggaggaagatgcatccgtattcaaggcacggtctggagtcctctatacggtttctagctggtcagaaatacacgccttcgtactgggaagtgatttcagctgatggatgtgctgcttcttttcttccattttttttccgcttgagaagcaaaattgccggccgatgctgatgcacatgatacgtgaatcctcaatgtggtcattttatgaaagccacatgtcaattctggctaccagtatgtatgaatgaataccgataccagtttgtggtgtggaatgggttgagtttgtacccttgaattgtgatcaatgtttcattgattcgtctgtccttgttccattcggggctaatttctgggtggttgctggcattatactgcaccaacaacaacagtataaacatagtggtatatatcccaagtccaagtgtaacgacgactgcataaatgtagagatgtttttttttttgaggcaaacgagcaatttctattagcactaggaatcgctgtacaaaggcaagagaggataaaaagataagtgacctagcccactcgaggcagcaatgcacttgtgctgcttcggctatctcatctccattcctaaggcaaacagccttattcctttccgtagtttagcatggacaaagacagaaaaggaatgagaaaacaagagaaaaatggaggacacaatggcagccaagacatccagcaagagtcctcatgaacctccaagaagagccttcagtaacttcttcagcgtatccacaatgctcgaaaacgaaggccgctgccttggatcgtcatcccagcaggcttccactagagcagcaagttctggactggtatctttcggaatcggaagccttctgttctggaacgctacagctcctactacctgcgcagggcctaggccactccatggttgctgcatcgtcaggagctcccacaagatgacgccgaagctgtaaacatcgcacttctcgttcgatggctcgccgcgcagaaactcaggcgccatccattctggtgttccagcaactgatttggatgatatgaaggtgtttgccttaaatctggacaggccaaagtcacctaccttcacagaccagttccggtcgaccagcatgtttggtgtcttgagatcccaatgcacaataggaggattcaggcagtggagatagttgatgccttttgcaacatctagtgccatgcgcaaacgacgcttgagatccagcatctctccattagctgccttgttgatgagtcggaagaggctccctctgggcaaatactctgtcactatcgacaattgtgggcattttgtcaccgcacccatgaacaaaaccacattcggatggcggactcgtttcataatagcaatctctcttaggaattccttcagctgggcttcgccaacatcctggtctgtaagcaccttaactgcaacatctgaaccatgccagtctgcgcgataaaccgtgccgaaagaaccggcgcccacgcgttccttgagctcgagctcctcccatgatatctccagccaatctacggcaaaaggcggctcaatgctcatgggtttcggaagatcagcaccagggacgttctccttgttgccgttctcagcaccgatgcccattgccttcaactgcatcgacacttgtaacactgatgcgccattacagtttccattctgtgtgatctgtccacacttcggcaccaagtattgttgcttacggctacctgagctgagcagtt

SEQ ID NO: 58422 - DNA, 354 bp, Zea mays
  unsure (1)..(354): unsure at all n locations
  Clone ID: MRT4577_153277C.1
gtgccatgatgctggccaagagaagccaagtggatagaaggctgttcagtggcaacgaacctaagacttagtgccaaggactgaaaccaagtaaacttgtaattttccatgatggatacgactacactntctcattagtggcctctacagcagttgcaccaaagaagcgtctcattgttttgttactacagttatgtgaagcatacaggcaaactcagaaagactgtgataaggctcgccagagatgcctgcacaggtgctgggggataagcaggaccatcctgaagggagatggtgtctgtggacaaagagctctgcagtgggtcttatgtgcatgattactgctggtggagg

SEQ ID NO: 58423 - DNA, 337 bp, Zea mays
  Clone ID: MRT4577_153278C.1
gacacactctaactcttctttgctatttttcttcctagttattccaatggtcagctctgcagccgtgaagatgacagcctaaacaggcccttccaggattaggaagataccacgagctctaggtgacccacaccggacccgcgctggggcctgcctgtgaaagcccggtgatgtacagatctttcacgcactttgatccatcgagtgaactatagggccctctaaagcctctgatgtcatagaccctatccctcatctagactctaatgagcacagcgagaagctatccatattatgtcactgcgaggatcgcgaataaatgcacctaggcctttca

SEQ ID NO: 58424 - DNA, 341 bp, Zea mays
  Clone ID: MRT4577_153279C.1
cccacgcgtacgcgctgctcgccttgctggcgctcctcgcactggccatcgcgctcgtggtcgtgctcgtggtgaagccccgtaagccgcaaggtcgacctagaccaagtgtacatgcaatacatgctggtggcctcgccgacgtcaggcgccagcctgcttccatcgaccccaggcgccgactacatctgcatcaacatgacgctggtcttaaccggccagaaccccaacaaggtcggcatccggtacagcacgaccaagttcgacgtcatgtaccacggcgtgccgctcgagatggcggcagtgcccgggttcgagcagcccacgcacagcacccggct

SEQ ID NO: 58425 - DNA, 1821 bp, Zea mays
  Clone ID: MRT4577_15327C.1
acagaatcgcccgatcccagcccctccaccggcgacccattctgctcacttccatgcgggccccagcccgccacgaatccccgttcccagtcccgcctgctccgacctcgcctttctccatctagggtttctctctccgtttccaccccatcggaccggagcttcgcatggagtcatcgcagtctcggaagcggacgcgccaagcgtatgactgcgccgccgcgctgccaccagagcgagaagtggtagcgaggggtggcgcgtcgcctccatggagggaggatgaccgcgacggacactacgtcttcgatctcggcgagaacttgacccgccgatataaaatcttgagcaaaatgggagaaggtacatttgggcgtgttttggaatgctgggaccgtgaaacacgtgaatatgttgccataaaagttgttcgcagtatccgcaagtaccgtgatgctgcaatgattgagatagatgtgctcaatcgccttgcagaaaatgagaaatacagatctctctgtgttcaaatacagagatggtttgactatcgtaatcatatatgcattatatgcatgacttgaggcttatccacactgatctgaagccagaaaacatactacttgtgtcttctgagtatataaaagttccaagtacaaagaagaattcacaagatgagatgcatttcaagtgcttgccacagtccagtgccataaagctgatagattttggtagtaccgcctttgataatcaggaccataactcgattgtttctacgaggcattacagggcacctgaaataatcttaggtttaggctggagttttccatgtgatatttggagtgttggctgtattcttgttgaactatgctctggggaagcattgtttcagacacatgagaatctggaacacctagcaatgatggagagagttttgggacctctaccagagcatatgatacggaaagcaagaaatatttcaggagggcaacacgtttaaattggcctgaaggtgctgtttcaagagaaagcatcagagctgtgaagaaactggatcgactaaaggacttggtatcgaggaacgctggccattcgaaggcagagctggcagacttgctatacagtgtcctccggttcgagccatcagaacgtctgacagcgcaagaagctctggaccatccattcttcaggaacccgacatgacttgttggacaggctcgactcgtgtaactctctgcttcaagaaggtatcgaggaagcaggcagagccgtccattgcaaagatgatgggtatcttgctcctctttaccagagagtttgtgtaagcctgtcagtaaggcatcttgcggtggtgataaagctgatggctttggtcacccaatgtaatgtacactagctttttttttttacctagggagtttagtgcctgtatgttgttaaccgggacgcgctatgagctgcgtcccaatgccctggttccataatccaattgcagatgttgaaaaaatcaagcatgaagggatccctgcgcagctgtgctcccgtagctgcaacagtctgttggatgcaagtatcgtgatgtcacgagtttgggatttgttgcattccgactgcatgggcggtgttgtgaatgggcatgaaatgccgtgtcctgtttgttgttgatacttgtgtgtagctgctgaagtgttgttgttgatgcagtactacttgtgtatacttgtggaaagagagtgcgcataggcttagaaagtacagtatcttcatactaggtaaagggatgtttctgaagctcatgtgtaccgcgattgcatgttggcaccg

SEQ ID NO: 58426 - DNA, 863 bp, Zea mays
  unsure (1)..(863): unsure at all n locations
  Clone ID: MRT4577_153280C.1
cgctaagaccggaaagcgcaagaacacaagagctacgagcagcgcacgcccggaaaatcttgttttcggaccaaaaggccactgcagtagcactcgctgaagctagaagctcaacatgtgcagccatgcccatgcgacgacgtgcgtgacgtgcccgccgccgtcgcaggggcggctcatcacggtgctgagcatcgacggcggcggcatccgcggcctcatcccctccaccatcctcgcctgcctcgaggccaagctccaggagctggacgggccggacgcgcgcatcgccgactacttcgacgtgatcgccgggacgagcacgggcgcgctggtcgcgtccatgctggcggcgcccggcgacaacaagcggccgctcttcgaggccaaggacatcaacaagttctacctcgacaacggccccaagatcttcccgcagaagagcgggggattcctgacctcggtatggaacctgtatggcgcggtgacgggtcccaagtacgacggcaagttcctgcatgacaagatcaagagcctcaccaacgacgtcaccgtcgccgacaccgtcaccaacatcattgtcccgacgttcgacgttaagtacctgcagccgatcatcttcaacacgtacgaggccagggtggacccgctcaagaacgcgcacctctccgacatctgcatcagcacatcggccgcgcccacctacttcccggcgcattatttcacgacccacgacccggatggcaagcagccagacgtgagtacaatctcatcgacggcggcgtggccgctaacaacccaccatggctgccatggtcatgatcaccnaggaggtaatgcgccgcaaccccgactcacgcacg

SEQ ID NO: 58427 - DNA, 525 bp, Zea mays
  unsure (1)..(525): unsure at all n locations
  Clone ID: MRT4577_153281C.1
cggccttagcgaaaaaaaaaaacgaagatacaaaactttttatatttttttaaaaaaagcaaataaaaaaaaaagttgtggattaaaaaaaaaaattttaggtttttttccttttccccccccgcgccttagggcttttttctgcctcgcccccctgggggggggggggggcgggcgccccttcctgggggggggggcgccttctgcgggggtggggggggcaatgtacacatggcacggggctgttgctttgacgacgctcgtggtgaattcagcacgctttgctctctgggcttctgtggcntctgagcgctgaggtggggcctgctgctgctgctgctggggggtggcggccaaagtctgcccgtttgtttgaactgcctgaggctgcntcacaaacctctgcttcgatcgcttcngtggcgggggcggcnggtgctgctgctggggcccctcctcctgtcgggcgctcgctcctgctgagtccgctttcctcctgtgcccttgttttctgccttctgcttt

SEQ ID NO: 58428 - DNA, 1031 bp, Zea mays
  Clone ID: MRT4577_153282C.1
tggccgtgggttagtcacgcgtacgatcacgcgtactcagcgccgagcccgaccgaggaggcagagacgggtggaggaaaagcgcaaagtcgccgcccgccgctcgccgctgatcggtcggtgagctcgatgcgctgtaccgctcggcctcgtcgtgttcctccgcgctgatctccgcctcccgcgacgcccgactccagaggatcgcttcttcggtttggccggccggtgcgtgggggttcaggaggcggggtctcggcggctgcaatgcatgctcgcatctcgtggcggcgtttcatcgcttcggtccgtttgtttttcggcttgttgcgctgaaattgagcgattcgtttccttgattcaaggactactagtggggcgggggcatcctgcgtggtggctctggctgtctggtctgtatctgtatgatagtgggcgttggcagttgtgccgtcccggctagctgcggacttgtcttggcctagcagggaagtgatggagcacaagaaagctagagcagtggaggatcctgcccggttgatttgcgacgatgccctcaccgaggtattccgcaggctgcctgcccgtgcgctcgcggcctgcagactggtgtgcaagtcatggatgtccgtgctcacagatccacacttcatccatgagcacctgagccgtggccagcagaagctgctgctctttgcgactgacaggggaaacgacaggtcgctcgccatggtgctcgcggacaacaacgcatccatgtaccagctgtcaaggcccgcggcgtctcggagcgtcttcgtgcacaattcttgcaatggcctgctctgcctaggtgacagcacaggagctgtcgaggtgctgaacccaacgactggtgaatctttaatgttgccgatgccaatgtacacggcagggagcagccagttctcgtcctgcaattggcactgctgggggttttgcccacaaaaaagggaacacaagggtggtgcatttctatccaggagctcacaatgacccgttcagggtacact

SEQ ID NO: 58429 - DNA, 260 bp, Zea mays
  Clone ID: MRT4577_153283C.1
gttttcagggacattattccttctccccaccaataagccattgctgtaaatttgagagacatctgcgttgggactagaattcacattatcatgtctgatgtgattgatggacactgttgtttgcatccaatccaatgagatgaataatatatcctcccccacaacttggccaaatctttcagcttccattcttctgcgtatgaggtatgttgcggcaaagaaaatcaacagtcaaaaggcctacagtactaccacttcag

SEQ ID NO: 58430 - DNA, 504 bp, Zea mays
  Clone ID: MRT4577_153284C.1
caccccaaaattatttggtcacaccccacataaaaacaaacaaccacaaaccgcaaaaacccaaggggggaggaaaaggaaggggaaccaccaacaacccaaaaggcaagaacccacaccaaggggaaagggccggggacaccccacagggaaaggggcccggccccggcagggggaacccaccccccccgccccgcggaggggcaaaccccaacacaggggccgccccccccacggggcccgacccccccaccaaccccgccgtaaacaggggaaaacctccccccgggggcaaatcctaaaccgggcacactgcacacaaaaaacgggccgggaacaaaaagggaaaagcccgcgaagaaaaaagaggggcccaacaaacaaaaaccacgccccccccacggccccctttccaaaccggaaacccgtaaaaccagcggccccaaccaaaaagccaatggcccgccagaccccctttcccaaaaaggaacacttccccccccc

SEQ ID NO: 58431 - DNA, 426 bp, Zea mays
  Clone ID: MRT4577_153285C.1
aaaaaagaaaattttagtttccaacaaacagcctttcattttttccccccccccaggcctttttttctccgcttcggggaccaagccgtttgtccaaagatcaacaggccccccccaaactggagccccaacatttcccctttatcccggtcttggacagggatcattgaagcccgatgaggatggctggcccttcaggggccccccctccctcggccccggaaagctccccccccccctttgccttgggcaacagctttcccctcggaaacgtggaaccaaaccaaaaagggggcctttgggggggggtccctaccaccgtccccgttttccagggtggtttccaggggaccaaacgggcccaccttgacccaaaccccctctaaaacaaacccgagttttttttttttccatgacagcctccct

SEQ ID NO: 58432 - DNA, 485 bp, Zea mays
  Clone ID: MRT4577_153286C.1
ggggcagggaacccaagggagaattccgttcaaagggggctgaaaaaaagacggccttttttgggggaaaaaaggaaggggtacatgattctaaaactaaattggggccaaactgatttaaccaccgccaggcccccaccaaaaagaattctgcattacagggcaattcaacccaaaggaatggagctatgtctttaaaagggaatccttgaaaaacttttccgggagccccttagggagccccattacactataaattggaccaaaaatggcttccacaaaaggggaaattaaggggggctccaaaaggaaaccaccagggaaaaaaaaaaaattgccctccttaataaaactttccaaaaatttgtaaggaattttggggaaaaaaacatttggtttaacccaaccttcccttttaactccaggcttaaaatttggaacaagcacaaatccaatcgtcgcaaaatgggtttaaaaagaccctt

SEQ ID NO: 58433 - DNA, 316 bp, Zea mays
  Clone ID: MRT4577_153287C.1
cgctcttcctgatgacagtgccttgatcattgggacctagaaaccggacacggtgcctctgacccaatgaactacacgcgctctagcgtgatcgacgccgacgagctacgcggagtcagagctagaaacagcaagatgtgaggctcgagacggtgagctaacctggccacggcggaaagacgagcggacaagggaggagcaggaggatgagaaggcaaagcacatgaccaggaacattcaggggacgttagacaggactgagccggaacaactgatcgcgggaagaaacaatagtttacgcgagcgaggagacaat

SEQ ID NO: 58434 - DNA, 317 bp, Zea mays
  Clone ID: MRT4577_153288C.1
gagcgcgccggtccgcgcctcgactgatccgtccgccagaccgccactggccatagccgagcgcccgacctggccgcaagcccgcagcggcgcagtgtcgttcggcgtccgctcagcgcctcagcccgacccgccaagccacgagcaggcgagctactccgccgcgggtgggggggggcgtccaccgaccgtcgtccgctcggcccgagcggccgagccggtccgcgccctgctcgcctgctctgctctctggctccgtgctctgctcgcccggtggggcatgagtagaggaaaccatgggaatgctggatggaaat

SEQ ID NO: 58435 - DNA, 1291 bp, Zea mays
  Clone ID: MRT4577_153289C.1
gcgtcctgtctctcccggccagcgatcgggaggggcgagggatggcctcccgtccccccaactccgccgacggcgagggccccgcagggaataacgtggaattgccatccctgccctttcatgttgttactaaacctagtcaactcccagttgagtttcttgagccctctgctgccaagaaattggtgattggatttgactgtgaaggtgttgacctttgccgccatggtgctctctgtatcatgcagattgcatttcctgacgctgtttacttggtcgatgctattgagggtggaaaagaactagttgaagcttgcaaaccagcacttgagtccaatcatatcaccaaagttattcatgactgtaaaagggacagtgaggcattgtatttccagtttggcattaaattacataatgtgatggatacacagatagcctattccctgattgaagagcaggaaggtaaaaagagagcatatgatgtttacatatccttcgtgagccttcttgccgatcctcgttattgtggaatgccatatcctgaaaaggaagaagtccgtacccttctaaggcaggacccaaatttctggaaaaataggcccttgtctgaaatgatgattcgagcagcgacagatgatgtgcgcttccttctcatatacatgagaaattgatggagaagttaagcaaagtatcttcatggcgttgggcagtacgaagtgagctatactgtaggtgcttttgcataaatgacaaccagcaggcagattggccgcctcttcctactgttcctgatggcattgaagctgatgtttatgttcctgaagttgatatcctatcagtcttagatgttcctcatgggaaaatgggacgagttattggcagaaaggggtcaacgataatggttgtgaaagaatcttgcaatgttgaaatccatattggtggtgctaaggggcctccagatagggttttcatcattggagcagtgaatgaagtcaggaaagccgaggccatcttcagaggccgaatgctggagttctagagatgttaccctttgcgccccatgtttcgactgctttatatcttttgaacgcaaaaaagggggaaatacacaaaaggagtatgcggtgccgtggatctcttgcccatccgtgaatcatgtgaagaaagtataaatgatttcaacttggcctatgtcagtgttgcgcttcctgtctcaactactcgccatctggttatacactctcgtttctggcctgtttcaggatgcggaagtatgctttagatttgactc

SEQ ID NO: 58436 - DNA, 339 bp, Zea mays
  Clone ID: MRT4577_15328C.1
tagggccaattggtaccgggcccccccatgaggctacctctaaattctgctctagtatcatgtcattcgtattgaattgcatagcccaaatgctgctggttcttctgtaagttgtatgggccctaaataaacatacacccacatatacaatttacatattttttcccttatcctacaaagctgaaacgactctctttatccttctatcaattttcctaatactaaacaacactccgcaagataccttctaaacaaaagaccactgggcccaacaccctcatgcagatacagctctgaccaacatacttccgtatgtggataatagcacaaccaacctaa

SEQ ID NO: 58437 - DNA, 144 bp, Zea mays
  Clone ID: MRT4577_153290C.1
ctggaccacggttgcttccaagatcccagagtgtgatcatttaagcctggggcgcgcaaagaacacgtcggtcttctgcggcccgaacctgtacgagttcctggagaacgttcacaacatgggtgcccatggtacgggcgtcct

SEQ ID NO: 58438 - DNA, 175 bp, Zea mays
  Clone ID: MRT4577_153291C.1
aaaccatcctatacagaccaacggggcgctgtgcaacatacagttacacttaactttattaacacataattcttttacataaatcacttccaatataaaaaaaccttacttaatactaaaacactgcttcttacacacataaattattctaattgatttcatcatctatctccat

SEQ ID NO: 58439 - DNA, 145 bp, Zea mays
  unsure (1)..(145): unsure at all n locations
  Clone ID: MRT4577_153292C.1
aattcccggggtcgacgccacgtcgtctcgcgtccccttcgcttcgctttccgcaattctcgcatttcgccttcctatcncnnttcgcccgtccaactctttcggcgggtcgagggcggtnngtttcgcgcgtgggnngctgtgg

SEQ ID NO: 58440 - DNA, 293 bp, Zea mays
  Clone ID: MRT4577_153293C.1
ggtattatcatgactgttagaaattattgcatataaattcatgggtcccagaaacactggtaacaaccagacctaaaaagttctttgcgcatcaacaggtctaaagcgggttcaggagggtacgaatgaagaagctggaacaaaatatacataagcttgacgtgtgtcgcactcaaccaccgagtggaaggatagggctagccgtgcatgggaccacatttattgaagttgattttgatcaccctcacctcggcggcaatcaatttgtggacttacaccaccacacggagccc

SEQ ID NO: 58441 - DNA, 432 bp, Zea mays
  Clone ID: MRT4577_153294C.1
gggaggaaaacaggggccctcccctcacaaaaaatttacctttttcccctggtggccctaaatggtcctggaaagccaaaaactaaaaattgttctccccttcctcggcgggggggaaaaccttttaaaaaaagaccccaatttccccccttcttttcaggacaaaaaattcccatgtttaccccgtttttttttaaccccccctcctaacccttttaaaatgctgagctcgttttttgccctggacagttaattgttttttgccccgttcacctttttttcccccgggggatgggtgttttcacttgcatttggtaggcttccattggaaagtttagcggcccccccaaagggggccccccttttaacaaaacggtaacaggaaattaggggggcttttttcttccccaaaacttgctttaaggtttaaac

SEQ ID NO: 58442 - DNA, 1035 bp, Zea mays
  Clone ID: MRT4577_153295C.1
cccacgcgtccgcggacgcgtgggcggacgcgtgggcggacgcgtgggttgggtaccaaatacaggtgaggggtgaggcttcgtcagtcgttgcacaggtaaagattgatgatttgatgtaactttgaaccgctctaactaactaaatcgtcctcgagtgtgcggcgggtgcgagcaacaaggccgtccgctccttgttcgtccctgcatgtgttccgttcggttccatcaattccaccacgaaataaggctgtataaatctttcctgggcgttccctctctctcctgtgcatcgccggacggaaccaaacgccaaacgctgctgcgctctctccttctcgtcctgaccccccagagcgagagggaggggcacccagaggagcctgtcgttttgatcggtgtctctctgcccccgttcccgcgaggagagaacaacctggagaaaatggcgccgatctccggagccacggcagtccttgtgatggccgtcgtcgccacgctcgccgccgcggctaacgccctggcccccgccccagcacctgctaccagtgacggaacaagtgtagaccagggaatcgcctacgtcctcatgctggtggcgcttgtcctcacctacctcatccacccattggacgcctcctccgcctacaagcagctcttttaaaaccatccgctttgtaatttggcgccaattgagggtgtcattaacggtgttcgattattaatcgatccagtttggccccacaactagaaaaggaaaaaaatgcacacatcttatccttgctacttctaggatcttttcatatgtcttaattccaatcgagggcgaggccagaagaagccaaattattgcaaatactcgttaagccttgtttagttattttcatttcatttggattaaatgggattgaaagaagttagcaggaaaaaaaaaaaaaaagaggcttaaagctacctaatcttgttcaatccacatggattgagattaaatcgaaaaggccttagaaaaaaacgggcacatttttttttgttttc

SEQ ID NO: 58443 - DNA, 817 bp, Zea mays
  Clone ID: MRT4577_153296C.1
cgggagtgcaaaaaaaaaagcaagcaagcagcgctcacccagtaagctaacgaacccgaccacccccctctagctcggcagccatgaactgcggaaggggtcccgctccggcgacgatggtgcgctgcaggcagtgcagcgccagcgtcgccgcgccgcccggtgcctgtgccgtccagtgcgcgcagtgctgctgcgtgactcgcgtcggcggggctgggcgacagctcagtgtgatgcgccccatcccgaacttcggcggtggccgcggcaagaagcgcgccgtgctcgtcggtatcaagtacaccaagacgcgtgcctgcgagctgaggggccccatcaacgacgtcaagtgcatgaggtacatcctcaccgagcgcttcggcttcgccaacgactgcgtcctcatcctcaccgatgaggagagggacccgtgcaggcagccgaccaaggccaacatccgcatggccatgcactggctggtgcaggggtgcagctccggcgactccctggtgttccagttctccggcgcgggcgcgcaggtccccgactgcgacggcgacgagcgggacggcatggacgaggccatctgtcccgtggactcgttccagcagggccccatcctggacgacgagatcaaccatgccatcgtccgccccctcgtgcacggcgtcaagctccacgccatcgtcgacgcctgccacagtgccaccgtcctcgatctcccataccggtgcaccttctccaacagtacgggtgcttgagctggatggacaagcgccctctgaatgctgcctgcaaaggcaccagcggaggc

SEQ ID NO: 58444 - DNA, 373 bp, Zea mays
  Clone ID: MRT4577_153297C.1
gaaactggtttattttatactcttattatgttttttacatggaaaaacatttgggttacatggaggttcaaacagatttatccgcaaatatgcatgtagcacattcgccggcatattaggaggccacgagcaataatacttcagcacccaccaataataacacctgtacatttagcttatttctcataggctaaatagcgatgtacacttgctgagatctgatcaccctagaaattgaatatgttgggcactggctatggtcttagcgatgataaatgggtgttatgatgccattgcctttggacacttttatagagacgaaaactttttttatgaattttgccaaactttttgcaatggaattcaggggcct

SEQ ID NO: 58445 - DNA, 517 bp, Zea mays
  Clone ID: MRT4577_153298C.1
gggaaaaaaaccccccctaaaacaaaaaaaaccggggggggcattaagggttttttaacaaggaacggggggccccccccccgacaaaaaaaacaacccccccccggcccagggggaacattaaagcttccccgggaaagcaccccccgggaaaaaaaagcccaaattgggggggaaggattctaaggggaagggcaacccggattgggggcccacccgggccccccgttttagggtcgggggggccaactaagaagccggggcccggaacacaaaggggttggcccggggccccacccccttgttggtttgggaggccgggaaggcaaagtttttcgggggccccacaggggggggcccaagcatcgggggcgggacttttttggggggatgggattggaccatgggcgaaaaaaaaaggcccccaaaaagggggcaccccccggggggggggaaacccaaccaggggggggccccgtcctccaaaagggaggacaaacccggggggaggggggga

SEQ ID NO: 58446 - DNA, 412 bp, Zea mays
  Clone ID: MRT4577_153299C.1
accacgcgtccggtctagcctcctcaagtcctccttcgcgggctcccggctcccggccggcaacccggacaaaacggggttcctccttggtggcaacgggcccccccggccccggcccggggccaacctgcccttcaagttcaagttcttcttcaaaccggccttacaacttgacttccttcgggttaaccccattcaaggattcaaccttttccggcaaaatgaccgttcgctacatgacggatatgttcactataccagacacggacttcgacatcgtgggcgccggctccgcggggctgtcgtgcgcgtacaatctctccagggaccccgctgtgcacatcgccatcgtggcacactctgtgtcgccgggcggcggcgcgtggctgggcgggcagctgttctcggccat

SEQ ID NO: 58447 - DNA, 1247 bp, Zea mays
  Clone ID: MRT4577_15329C.1
ggccgggctcgcctttctccgggagggtttctctctccgtttcaccccaccggaccggagcttcgcatggagtcatcgcagtctcggaagcggacgcgccaagcgtatgactgcgccgccgcgctgccaccagagcgagaagtggtagcgaggtgtggcgcgtcgcctccatggagggaggatgaccgcgacggacactacgtcttcgatctcggcgagaacttgacccgccgatataaaatcttgagcaaaatgggagaaggttcgggttttctgcaatctgtcgtctcctcttctggtgggtatcttcgttattattctaatgaagagggctacgagttgggttttcgtaggtacatttgggcgtgttttggaatgctgggaccgtgaaacacgtgaatatgttgccataaaagttgttcgcagtatccgcaagtaccgtgatgctgcaatgattgagatagatgtgctcaatcgccttgcagaaaatgagaaatacagatctctctgtgttcaaatacagagatggtttgactatcgtaatcatatatgcattgtttttgagaagcttgggccaagcttgtatgattttctaaagagaaatagataccgacctttccctgtggaacttgtgcgggagtttggacggcaactgttggaatctgtagcatatatgcatgacttgaggcttatccacactgatctgaagccagaaaacatactacttgtgtcttctgagtatataaaagttccaagtacaaagattcaatcgaaaagatgagatgcattaagaatgcgtgcgaccgtacagctgcgttgaaactgacgctgggcattcgaaggccctgctggcagacttgctatacagtatcctccggttcgagccatcagaacgtctgacagcgcaagaagctctggagcatccattcttcaggaacccgacatgacttgttggacaggcttgactcgtgtaactctctgcttcaagaaggtatcgaggaagcaggcagagccgtccattgcaaagctgatgggtatcttgctcctcttttaccagagagtttgtgtaagcctgtcagtaaggcttcttgcggtggtgataaagctgatggctttggtcacccaatgtaatgtacactagcatttttttttttacctagggagtttagtgcctgtatgttgttaaccgggacgcgctatgagctgcgtcccaatgccctggttccataatccaattgcagatgttg

SEQ ID NO: 58448 - DNA, 819 bp, Zea mays
  unsure (1)..(819): unsure at all n locations
  Clone ID: MRT4577_1532C.1
ccttctatcccgaacaaggatgtatgctgagaatggcttaccccagaatgcaacgtcacaatactctcagagcaacaccaacaccttttttgatgtcagcgagccaaagatggcccatccaactgaatcaatgccaccgccttcggtggccagtccttatatgcataatgtccagcatgccaacgttaaccatatgccgccgcaaatggtgagcattgggggaccataccccagttatgttgccgccactattgggcatgtgggtgtgcccccatcggcttatggtgttgatcctgcgtatacaaaagccactattaacccaatgagcgagcagaaggatgttatgcctgaagtttatcacaaggaagctccacatgaatccattcctcctccgaacgctaatgctcaggtaccactaccgacaccagcactgacaaatcatgctccagtcgagcaactccaggagtctggtttacctggtcaacagttcagcaatgtacatgcgctgccaccaagacctaagagggtagcaagcagggagaacatcagctcaaaggatccccattcccaaaactctctgttgaattgcaaagggccagatttgaacatcccggctgaggagcaaccatatcacaaagacacacatgcagaacaagctcagtttgtcaaaggtgatggtatcactaatccagacttgctgngtatggaggatggtctagccgcatttgagcctccacctcctgtgctgaatgaagggcttgngaatgtcactaatnaagtagacgggcaagctcacaccaatgangttagcaagggcaa

SEQ ID NO: 58449 - DNA, 768 bp, Zea mays
  Clone ID: MRT4577_153300C.1
caatggcaacgatgacgacacggccagctgccccgtctgcctggaggactacgcggccggcgagcgcgctcgggagatgccctgcaggcacaggttccactccaattgcatcgttccgtggctcgagatgcacagctcctgccctgtctgccggttccagctgccggccaccgacgacaagggctcatgcagcagcggcgacggtggttttgtcagtgtcgatgcggatggtgaaggcaatgacaacggcggcggcgatggtagggcaagtattccaggcaatgcggagccagccgaagccgaagagaacggcagccggttgccgccatccttgcagtggctcaacagcctgttctcgccatcggcgcagtcctccggtagcggcagcggcagttcgcatcattgggagaattgagcaataatgcaatataaggatggatgattgttgctgcttgagcccattggtgccaatgtacataggaagagcaggagcatgccggcatgaaaatttggagcctttttttcagtgtgtcaatttggctcatgtaacgttctctctgatatagttgtcatggctataaaaagaacaaaaattggcaagtatatgaacttgcctcttgcgtgaactgggtgtgaatatatccttggactcgacgaagaaactgaatcaggacgactacacgtcctaatcggaccctaaaaaaaaaaaaaaaaaaaaaaaaaaaaaaaaaaaaaaaaaaaaaaaaaactcggagagggcccggtacc

SEQ ID NO: 58450 - DNA, 1089 bp, Zea mays
  Clone ID: MRT4577_153301C.1
ccggccggggtcaagggcttgttcatcatatctcactatcactttcatacaatgtctatcaatactgtcgccatcatcggttgcggcgcaatcggcgcttcatggtcagccctcttcctcgctcaaggcctcaaagtccaggcctttgacatcaaccctgcctcagagacatatctccgcaactttatccgcgacgctctccctgtactatcatcaatcggtttggtcaagaacaacaacgccaagcctgaggatgttgttttcacaaccaccatgagcgaggctttacaagatgccgatttcgtacaagagaacggccctgaacgaatcgactttaagagaaggctctttcaggatatgggagagatgcttccaagtcaagttattatcgcgacaagttctagcggtttgacttgctcttctattcaggagggcatgactgctgctgcatcgccggaaagatgtgttgtaggacacccgttcaatccaccccatctcattcctctcgttgaagtcgtcggcggcaatcagacatcatcggccgttattcaacgtactatgaagttttaccaagatatgggcaaacaacccattcacctaaagaaggaagttcccggccacgtcgccaaccgcatccaagcagccgtcatgcgcgaagtcttccacatcctccaacaagacgtctgcggcgtacaagatatcgacgatgctgtatcttacgggcctggtctacgctggggtgtcatgggacccaacactctgttccatctcggaggtggagagggtggaatcgaacattttgcggatcacttactggggcctctgcagacgtggtatgcacccgagaacccggtcgttgatgatagtttaaagaccaagtggattgagggaacgaggaccgcgatcgacgagagagggtatggggacttggtcaagcagagggatgaggaacttgttagactgctgaatgtgagaaaggactgggatggatatgccaagggtgcgaaggacacatgatttgaagagattttattattgaagacagataacacctagattaattttactaaatttatatattttttattg

SEQ ID NO: 58451 - DNA, 315 bp, Zea mays
  Clone ID: MRT4577_153302C.1
gccgtgtgtgaaaggaacccatgcttggagcctgtggacatctggatgaatggtggtgcaacatgttcagggtttagtgcatctttgcattcattcggaccttatcgaatggagggctcctaagttcatatcaacgacagtccacgagtagccgcgaacccttactcatggacaaagatggctagctacctattgctcatgtagcagcaggtgtggtctactcgtacgctgatcatgaagatgactacaccgcaaatgacacatgcggggtagcggacctgtatgcctttgtgccaaagtggttcgctaaatact

SEQ ID NO: 58452 - DNA, 514 bp, Zea mays
  unsure (1)..(514): unsure at all n locations
  Clone ID: MRT4577_153303C.1
ttgggtacctcgaggccggccgggngttgcctccaccgaccgtagcgcgccgcgcgtacctcactcctgaatacgcacgaactgccgaatcggcggcgacggtatatcatctgggtgactctcacgatggacatacctgaggtaccgcacggcgcacgtggccaggtctatctggcgacctcggaccttccgcgcgagatactcacccgcaagtatatgacgtcaacctcgatttcacataatgataggacggctccaagagaactctccgcccatgcctgagttgttatccagatgaacatgaccatcatccgaacaagaatcatgcacgtacataacctcatggcaagaaaggccccgatttctccaatactataggacggtgcgctgctttcgctgtcacatctacggctccatcacaggagcaaacttcgttatcgagaattgaacatgccacccgaatatcaaggcgattgaagatcatactgcaccctgcgtgaccatgtatctgtca

SEQ ID NO: 58453 - DNA, 441 bp, Zea mays
  Clone ID: MRT4577_153304C.1
aaattctatggttgtttatgtttggtctgtaaaaggaccagccgtgaagaccgtatgccgggtgtaacggacccttgtggatgcaccttcagtttatttacatgctggaggaatattgccttccacataaggttaccgagcaaagcttctttcctgcggaagagaagattttacaagctatcgctttgactaaaaataaacatcggggcgtgcctgcaaggtgaagccttcaagaggttgggttttgtccagggaggggcgtacctaatatcaccacccaaggggcatgacggataaggcttgaaaacactcacgccggccaggactagcgaaacacctatacttgctggaaagcgcacaggggttcttcaccttttaactgcctcccggtggggctaagacccccaggccgtggtggaaaccctcctgaacaggaatggg

SEQ ID NO: 58454 - DNA, 109 bp, Zea mays
  Clone ID: MRT4577_153305C.1
cccacccacaatattacacagcgggagcaaagagtacaagattgagcatataccaaaccaatagtgcggtacccaaccctgttcccccccatcctgacccgataccata

SEQ ID NO: 58455 - DNA, 191 bp, Zea mays
  unsure (1)..(191): unsure at all n locations
  Clone ID: MRT4577_153306C.1
ggcttggcntnaccnacntgtacntgtgtacccnccaccgcccgccatgccgacgangttgccccccaccgccgatacgcacnagatggagnntggtantggtgcggttgtncctnctnatncttcagataggtaccganagtnctgntaaacctttggaccaanagacaatgcgacggcttgancaanat

SEQ ID NO: 58456 - DNA, 299 bp, Zea mays
  Clone ID: MRT4577_153307C.1
tttggtttttttttggtactaattttgggtaaaacatgaactaaatgaaacccactgccacatataccgacaaacccaaaaagacggtctgcacaaccagaccaccaaacttataccctgtgctcgatgacaacgaacaccatgccaaaaacgtaaaggaggcacaaaccaaaacatatcacaccatgtttatttacgacaaaaattaagcgggaggcgtgctcatgcgacctcttttttcttcagctcgatcttgctccacacaaggagggccgtaagctcgaaggatccaaacctgt

SEQ ID NO: 58457 - DNA, 318 bp, Zea mays
  Clone ID: MRT4577_153308C.1
gcctgctgcaaatcagagcatgggtgcttgcgcgcgtaccattcaatgacactcgatcacacatattgtgaacggagtacgtggccactacatggtatgcagctccagaatcatgtgtctcctttttttcaaagtacactacatccattgatattatgagcaggaggggcatatctgctgaattagctacagtgaagccactctttccagggaagaatgttagtgcatcaggtggatcttatgactgatctactagctacaccttcagcatagtctatccgcatgataaggcatgagaatgctcgacgatgcatgaac

SEQ ID NO: 58458 - DNA, 942 bp, Zea mays
  Clone ID: MRT4577_153309C.1
ttgggtacctcgaggccggccgggctcagacctcagtcctcaccaccgagtggccgccgcctgtgcagtggccagcaccggcatcgtccagccgggttcgtcgggaagcgaccgaaaccctccttcgcattgcaaccaacgcccgcccccaacctccgttttgaccgtcggcgaccgccgcgccgcgccaccgccatatatacatcgccctctcccttgcccgccacggccgccaacgtcgccagggaaatccaacttcctcctcctccctctgccgccgtcgtggagatccgggttggcccgcccggtaaaccgtccccgtccctcgcgcacgtctcgcccgtgattttgcctccttaacccgaccgccgggagccggaggcggcggagcgggggcgatggggatcggggcggtgtcggacgagctgctgggcacgttcgtgccgatcgccgtgtactggctctactcggggctctacgtcgcgctcgacggggtggggcgtctcgacgggtaccggctgcacaccagggaggaggccgccactaagaacgtcgtttccagggccgccgtcgtcaggggcgttctcctccagcaggtgttccaggtcgccgtctcgctcacgctcttcgcggtcattggtgatgagagtggtattggacagaagcaacctcctgctcttataatagcgttgcagtttataactgcaatggttattatggacacatggcagtacttcatgcacagatacatgcacattaacaagtttctgtataaacacatccactccaagcaccacactcttgtagttccttattccttcggagctctatacaaccaccctcttgagggccttattctggacaccattggtggtgcactctcattccttgtctctggtatgactgcgcggacagctatattctttttctccttcgcaacca

SEQ ID NO: 58459 - DNA, 2852 bp, Zea mays
  Clone ID: MRT4577_15330C.1
actccatcaacaacaacacttcaccagctacacacaagtctcaacaacaggacacggcatttcatgcccattcttcacaccacccatgcagtcggaatgcaacaaatcccaaactcgtgacatcacgatacttgcatccaacagactattgcagctacgggagcacagctgcgcagggatcccttcatgcttgattttcaacatctgcaattggattatggaaccagggcattgggacgcagctcatagcgcgtccaggttaacaacatacaggcactaaactccctaggtaaaaaaaaatgctagtgtacattacattgggtgaccaaagccatcagctttatcaccaccgcaagaagccttactgacaggcttacacaaatcctctggtaaaggggagcaagatacccatcagctttgcaatggacggctctgcctgcttcctcgataccttcttgaagcagagagttacacgagtcaagcctgtccaacaagtcatgtcgggttcctgaagaatggatggtccagagcttcttgcgctgtcagacgttctgatggctcgaaccggaggatactgtatagcaagtctgccagctcggccttcgaatggccagcgttcctcgataccaagtcctttagtcgatccagtttcttcacagctctgatgctttctcttgaaacagcaccttcaggccaatttaaacgtgttgccctcctgaaatatttctgagcagaagaactacatattccaggtgacacatgtaagcacaataaaagaatattagaaaataaatgaaagaaacaaaaaaatattacaagagttcccaagaaatttcaatgtcgctggttaaatataacaagcaggcaatacacatagcagagatacacacacaaaactatcaaaatcaaggtacaagaaacaaaaaaaaagggggagcaagctagtattgatagtggccataaaaaggcggttattaaccttgaaaatcaagtagaaaagcagccattagctttgaaaattcaagtggcaataaacaaaatagaataaaacatatgagagttaagtacactgatactctgctaatcatgaaatataatgaaggtgtaccagattagaaacattcaataaataaagaaaatgtcagtttctcaaaatgattacaaaaatataactctgatactctactgcaggcagaatcgaatgcatcattttctcaaaatgtttaaacaaataatgcatagtaaaacccaaaatcccagccccacaaaaaaaaagaacatacttcaagtcatcaaagacatgcttatcatagcctgatttcaacaccgagacattttttttaaattacagtaaaatctattcaatcaccgttgcgaataacacactttgctggaagtatcatatgcttcgctggaattgccaaaccaaagtccatcattctttgacctcaaaaagtcgcatgtgcatgcaacaaaggatcaccctagaaaaaaggtgcaatatgacttcaactttccaatctggaaggctcagccaaattcctaccaccaccttcagtagagttacatgagtcaagcctgctcaacaagtcatgttgggttcctgaagaatggatggtccagagcttcttctgctgtcaggcgttccgattgctcgaaccgtaggagaccgtatagcaagtccaccagtgccacctttgaatggtcagcgttcctcgataccaagtcctttagtcgatccggtttcctcacagctctgatgcttttcttgtgaacctgctcctacatgccaatttaatacgtgctgatctcctaagcagtttcttatctgacgagcgtgctttgtggatcaaatccaactcgtgaatatccgatacactttccaacagtgccagtcgaaccacctgctcgtgttccacaaggaatgctccctatctacttctcttaagaaaattatacaagcctcgcccaagcttatcagaaacatgacaaaatcatcctcatcctttgaatgacgacctttattagctcgaagcaacagtcgagccatgcttaagtatagaacagtgtgttcttgcagtaaagctaatctatatggacctgaattatcataggtactacagatgagtttctcattccatattatacctattagtaggacctgtaatataaacagaagaaacaacaacacatccgcaagtccgcaaaaatgtattgaattctcggaattggtaactgtcttttacagattactataattgaccataagatagtggttccaattcctaaatgataactgtatacatactttctctgtacttatcatcacctggtaggtgaagaggcacatctgtattacaaatttactggagttcgactttgcatatctaagtttctcaattacgcaaaccgatctttattgttcctgctctgcaattcgatgcaacaattttaaccaattcatcgccgcacaacttgccgtgagtgcgcacaacttttcttgcaacatattcaagtcatttgcggtaccgtcctaccaaaacatgccaaaataaacattccccaagaaaacccaagtctttatcctcggcaggtgaagtttgcgcaaggtacgcatacgaagtggacatcacggtctgccgccctccctagtctcgacccatcatccccaggtaccaattctggcgcggctggctgcgggagggaacagtgatgcactggccgcggcggcatccgacaccgcgaggacgcgacgcgaaaccccgcgccaataaggacgaaacagatggcagcgcggccgcgcagtcatacgcttggcgcgtccgcttccgagactgggatgactccatgcg

SEQ ID NO: 58460 - DNA, 230 bp, Zea mays
  Clone ID: MRT4577_153310C.1
aatgccgtaagtttttgatcccaagcctgattcttggactggtctagggaacctatccggggttgtcaccgtcagagttgacttgcattctttgctcctgatcctgtcggttaccgtggatcacatttcctgttgaattacacaaaagcctactggtttctaatagattgctgccacctacaatattatgacgctgctgaactttaaaagcaaccaaatgcggccgaaga

SEQ ID NO: 58461 - DNA, 1572 bp, Zea mays
  Clone ID: MRT4577_153311C.1
ggtacccttcgtagccggccgggatccgttgcgtctaataatacggccaggaggggaggttcggccgggtaggctactacccggtgtgagccgtcctcaccagtcaccgcagaagccacagaggggcagccgcctgcgcggtggccagcatcgtccggccgggttcgtcgggaagcgacccaaccccacgcccgcttccaacctcgttctgaccgacggcgaccgccgtgccgcgccaccgctatacttacatctgctccatcatccctcgcccgccgcgaccaccaacctcggcagggaaatccaactccggtttctcctcctcgcagcgtctctcccgcagtcggggagatccgggttggcccgcccggtaatccatccctcgccctcgtgccgcctgtaatttcgcctcctaacccgaccgccgggggccacagcggcgccggaggcggtggagtggggacgatggggatcggggcggtgtcggacgagttgctgggcacgttcgtgccgatcgccgtgtactggctctactcagggctctacgtcgcgctggatggggtggggcggctcgacggataccggctgcacaccagggaggaggccgctacgaagaacgtcgtctccaaggccgccgtcgtcagaggcgttctcgtccagcaggtcttccaggtcgccgtctcgctcaccctctttgcggttattggtgatgagagtagtactggacagaagcaacctcctgttcttgtcatagtgttgcagtttataactgcaatggttgttatggacacatggcagtacttcatgcacagatacatgcacattaacaagtttctgtataaacacatccattctaagcaccatactcttgtagtcccttattcctttggagctctatacaaccatcctcttgagggccttattttggacaccattggtggtgcactctcattcctcgtctctggtatgactccacggacatccatattctttttctcctttgcaaccatcaaaactgtggatgatcattgtgggctgtggcttcctggtaatatcctccaggcgctgttcagcaataacagtgcttatcatgacattcaccatcagctctatggaaacaagtacaacttttcacaacccttctttgtgatgtgggacaagattctcggaacttacatgccctactctattgaacaacgaaaaggaggggggatcgaatcaaaaccagctaaactcgactgagctgaggataccaagactgattagtacatgcatgcatagtttctattttttttttttttgacttgtccaatactcatgccttgtggtactgctgactgcgcaaatgatgtacacaccctgtgtcataacttcatatagtgaggctgcttttgctctctacatttcttgttttgttttttagggtgttctatcttgtaacaagatacagtgagtaaagtattgtaatgtaccaaagaatactcaacaccacttagatttgtgtcctgtggattgatctgttcttcaatctgccatgttgttaacaaagaaagttgggcacatggcacttcg

SEQ ID NO: 58462 - DNA, 1166 bp, Zea mays
  Clone ID: MRT4577_153312C.1
cattgggtacctcgaggccggcctgagctcggaccgcgcacgggagctggagacgcttgtgagagacaccgtcgaggaggccaccaagcccaacctctcggacctcttccccgtgctcgccaggctcgacctgcagggccgtcgccgccgcagcgctgagttcatcgggaggttctacgacttcttcgatccgatcatcgcccgccgtgtcaaagctcggggcagtggtgaacatgttggtgatgatttcttagacgtgctgcttcagcttcactcgatggatcaactcagcctgcaaactgtcaagtcttttcttttggatctcttcgccgcaggaacggacacgaacacgatcgcggtggagtggacgatggccgagctgctccggcacccggccgtgatgtccaaggtccgcgcggagctgcgggacgcgctgggctccaagccgtgcccggacgagtcggacgtcggcaggctgccctatctccgcgccgtggtgatggagagcatgcgactccacccgccgagcccgatgctggtgccgcacctggccatggccgacggcgcggaggtgggcggcttcacggtgcccgccggcaccaaggtgatcataaacctatgggcgatcatgcgcgacccggcgtcgtgggcggagcccgaggcgttcgtgcctgagcggttcgtgggcgcgagcgacgcggacttccgtgggacggaccggcttgagttcatgccgttcggggccgggcggagggcgtgccccggcgcgcccatggccacgcgggtggtgacgctgctcctggcctccatgctgcacgcgttcgagtggaggctgcccgaggggatgaagcccggcgacgtggacgtcagggactggttcggcacgtcgctcaacatggtcacgccgctcaaggccgtacccgtgccttcgtcccggtgatgcactgcggcggcttgctgtgcatgtccaggatatggttctacttagcccagtctcggcgaagacttctatagcgctgcgttataactatccgacaggtttcatcacgatgaaattgtcgctttataatttccctgttaaatcattaaatttggtaatgtatcagtgttaaatgtaaataaaactaagacaaaatttcacctaaaaaaaaaaaaaaaaagcggcc

SEQ ID NO: 58463 - DNA, 279 bp, Zea mays
  Clone ID: MRT4577_153313C.1
ctggggttattttttttccttttctttttttgaataaatggaaaccattgattggggagctcacttcgtctttttcaaaaatcaaaccgctaaatggtccatacttgttaaagggaaccaaaaaaccggggtttcaaccccactcaggggaccgtaaggaaccaacccgtctttgagtctttgtaccatcaatgcaccctagcaaccaaaaaaacaaatacattcctttgctgaccacatatcttgataaaaggcccctgtggaacaacagggttttct

SEQ ID NO: 58464 - DNA, 264 bp, Zea mays
  Clone ID: MRT4577_153314C.1
agctagcacctgagcttgttttttaaaagcagtactggacagatggtttggtgtcagtggtcccctctgggaacctacatggcaacggttcataggctgggatcacaggtgtggggcggtgaaattggcttcgagcgtttgatgcgttttgcttatttcatggtgaaactgattgacttctttcctggtgagaggtttttggtcacattcagttttcttgtaccctatatccctatgatacactcataatgttggtccgaatat

SEQ ID NO: 58465 - DNA, 243 bp, Zea mays
  unsure (1)..(243): unsure at all n locations
  Clone ID: MRT4577_153315C.1
atcggccgccctttntttttttttttttttattttttttctattttttntaaacaaacagctctgggtccttcaaacttgatttatttaaagagcccatttttagtgaccatttggcagggttctccaaaagccggagccctttcaaacatgacctgtttgaaccatccctgatccctcttaactgtgcttagaattgttggcaactgcaactttttactttgacctattttgaaaagttaaa

SEQ ID NO: 58466 - DNA, 611 bp, Zea mays
  Clone ID: MRT4577_153316C.1
ctgggacgacttccctcgctaccccatccgcatccttacgagatacctcagtcgcccctcgccattgagaatcttcgataaaccgccaatatggtcaagacttccgttctcaacgatgcgctcaacgccatcaacaacgccgagaaggccggcaagcgccaggtcatgatccgcccttcctccaaggtcatcgtcaagttcttgaccgtcatgcagcgtcacggctacattggcgagttcgaggaggttgatgaccaccgcaacggcaagattgtcatccagctcaacggccgcatcaacaagaccggtgtcatctccccccgctacaacgtccagctccgcgatgtcgagaagtgggtcgtcaagctccttccctcccgtcagttcggtttcatcgtcctgaccacctccgccggtatcatggaccacgaggaggctcgccgcaagcacgttgctggcaagatcctcggtttcttctactagactagtcttggagtgcgcgatgtggagggatgcatatacccgggcttagctaggcatgaaaactgtttggctaggtatccatcacggccctgctagatgaagaaatgaccaaaagttcatgacacttg

SEQ ID NO: 58467 - DNA, 289 bp, Zea mays
  Clone ID: MRT4577_153317C.1
cctcgacctcgccacgctaggagaaggatgtgcaacggaacaccaagatggtggtggtggtggtggtggcatgccaaggccgagcacgaacgaagacgggaggagcaggataaggctgcttctcgtcgtcgagttatctggcgacctcgacgacgacgcgtggaataagctatgcttcgctgcggctaaacggcgcatggtgccaagcaacgacaacgacagcagcaaggtcatggtcatcgtcacgagccggtcagagaaggtaaccaggttcgggacgacgacagcg

SEQ ID NO: 58468 - DNA, 415 bp, Zea mays
  Clone ID: MRT4577_153318C.1
cccaaacgggcggttatttttttttttttttttttttcccaaccgggcgggcaaccgggaattgcagaccgggaccggcacggggaccaaccctgggaatagggagggggataaaaacgtggcggaaacatgggcaaaggtggttgctgagggaaatagggaaccggtgacaattgcacagaacatacgagaaagaaggaaaaagcggaaagcctggggagcctaaagagggagccaaaaaacaaaaaatgcggggagctcaatgggggggttgcagacaggaaaactggactgccaaaaggaggaatgaacccgccaaaaaacggggagaggcgggttgcggatggggcgacaaggggggtcttgttggcaccagagaaaccggcaacagaggggggggcttcaccggccgggc

SEQ ID NO: 58469 - DNA, 571 bp, Zea mays
  Clone ID: MRT4577_153319C.1
cccacgcgtgcgcagacgctacgacactaaactacatattgtaacaccctttgcttaacccttaatttagccccacgatcaatcactcgatcgatcacggacttagtcatgagctgcaccatcagatacaccctggagatcgccccgcagggggtgccgcacgccctgttgctggactgcgacatgctgtggcacaccgtggcgtccaacgtcgtctccaacgcgcacgccagggagcacgacggggagggcgacagcggcagtcacagcaactggaacttaaacttgcccttaatcttgctgaacaagtgtatgaaggagcttgacgagttcctggacgagggcaagagcaagctcatgaacacactcatcgtgggaggcggcatcgaagcggccatcgaaaacatgacggcgcacatcaaggtcgaccccgcgagcgtcgtcaagagcgaatccaatgacaaactcatttacaacctgctggcgaacgacgagatcaacgacgacatcgacaacgtcaacgacatcgtcaacggcgtcttggactatctcgaggcctacctcgacgcct

SEQ ID NO: 58470 - DNA, 756 bp, Zea mays
  Clone ID: MRT4577_15331C.1
ggtaccccctcgagggccggccgatatcatcacagacataaatatccaacacaaacattaatataccaagttcccaacacaaacataagtatcaacacaagttcagaagtatcaaaacataagtctcaggctctcacataagtattcaacacaagttctgaagtctgaacactaaaaacataactctcatcgaggtgggcggttcgactggtgctgcgatgggctgggcagttcatgagggttgttggatgccgccccagattggccctgcacagagaagagattgcatgtgttataccagatgcattatcaacgtctaactacaattttgatactcacaggggtatggaatagagcagggtcaattatagggaacaatggaggtggcggagcgaaaccctgtgtggcgctaaggctctatatgtattggaacatctcttccatcctcttgtgatctgccaggtgagccgcccgctccgcctcccactccgccatcatcctcgcctccatctcgtgacgttccctcctatcttcttctagttgggtctgtaatattacaagccaatattatagtaactcaaagagaatgtatataactcaaggaataacgagttacagaagcactaacctcgagttgttgtatgcgatgctatgagttgtcgtgccgaggtcgtatggctagactcgagcccgtgctccttgctcgcacctgagacagagttgggagtggatgacgaggtcgattgccccgtcggc

SEQ ID NO: 58471 - DNA, 400 bp, Zea mays
  Clone ID: MRT4577_153320C.1
cggacgcgtgggaaaaaaaaaaaaaaaaatttttttttaaaaaaaaaaaaaaaaaaaaaaaaggaaaaaaaaaataaaaaaaaaaaaaataaaaaaaaaaaaaaaaaaaaaaaggggccccgtttgcaatttaaaactctaaattttgagcggcccttttaaagaatccaatctttctttcgcgtgcttgctatttaattatttttttttttggtgccccctaaatttatttccttggctcttttttttccaccctttagatttggaaaaacccttggttttcccaatttattccctttgaaaaacatcccctttttcccattgggttttatagcaaaaagcccccctctcttcgccttttcaaaaatttgagaagtcttattggttattcgtcccccct

SEQ ID NO: 58472 - DNA, 611 bp, Zea mays
  Clone ID: MRT4577_153321C.1
acgccgcccgcgcgaccatcaccgactaattgagatagaaaaaccggaagacgatagaatctccacgaatggcgctgcatggcctgctcaccagatccggtctgtggagggccaccacgtgcttcctcacgttgatcctgacttgccgtgccacaacgaagagaatggcgcccaccatcccggcgaccgctacgtccagaagtacatcgcaagcgagtgcgccggaccatctctacgacgtgtgcatcggagggatgatcttctcctacttcgacagtctgccctgtgagcgcgaccacctcgcccacctcgaggagatggagaggaccggagttaatcactagatccgctgccccgatgcctcaccgggagcgggacaggacgggtgagtttcatgtcgtccattcaggctgatgggttctgttttcttctgctgttgagctactggagtcatgctactttggtcggtggctttgcacccagacagcaagatactgtccagattattgtcttgatcctcgcgacttgtcataagtaacttcggacaaaggagcggatgcattgtgattacaaacgttttcagcaattgagcacgaatattctcttttttt

SEQ ID NO: 58473 - DNA, 491 bp, Zea mays
  Clone ID: MRT4577_153322C.1
gctggggttttgttttttttttttttttttttttttttttttttttttttttttttttttttttttttttaaaaaaacaactaattcgggtttctgggggggaggcaaacaaaatggcctgggggccagtcggttacagccaaatgaaaaggggggggagggggaccgggataacaggcaaatttttattggtattaaaactactttaccacgggctcccacaggaaataataaggggcttaaaaaaggggtaaaggacaccacatttttttcacagggggggcctggtacgcacactaacatggggacagcgggggagggatcagtttgacgagtatttaattgacaacccctaaaaaatttggattggcggtaaagaaactgagggctggatctttagaagagaacgttcgaagggcgggttttaaataaagctagacaaactcaggggggggggcccctgggaccggaattccaggtttttttccaag

SEQ ID NO: 58474 - DNA, 839 bp, Zea mays
  Clone ID: MRT4577_153323C.1
tttgggtacccctcggagccggccgggagtcccgtccgtccacccaggcacccaccgctccgctctctcccgcgtgctttctctctcccgctccaacgcatggcaaaggcggcgcccgcagccggcggcggcattgctgacatcctcgtcacccgcgaccgggactttctcgtccgcaactccggcgagcaggtgaagatcagcagcattgaggcgagccctgtggccatctacttctcgaactcatggttcccgccatccaggtggttcacgcccaagcttatccaagtatacaaacaactggcctcacagggcaagagcttcgaggtcatctttgcttggggcgatcttaaagaaaaagcattcaatgaatactttgcaaagatgccatggttggctctccctttttctgacattgaacgtcgtgaggcccttgatatccggttcaaggtcactgataccccacacctggtcatccttgatgcaaaaactggtgaagtttacactaaagacggtgttagaatcgtgagtgagtatggcgtggatgcttaccctttcacaccagatcggatcaatgaactgaaagaactggaaaaggaagaaaaggagaatcaaactattcaaatcgtgcttggcacatctactcgagactatctcatttcaaacaagggagacaatgtacccatctctgagcttgaggggaagtatgttggtcttttctttgtgggggttggctatccaccattcattgagttcattgacttgcttgctaagatctatgagaaactcaaagaagtggggggagaaatttgaaagtgtagctgtatccatctacagcg

SEQ ID NO: 58475 - DNA, 177 bp, Zea mays
  Clone ID: MRT4577_153324C.1
gggttctttgatgtttttgttatttttgttgagggagagcagccggcccgatttttattccagctcctactttactgcacagggcaaaccacaccattcactggggctggggacacgaacctgaaaaaagaataagagatcacccgggctcttgatgaggagctcacatggaattgg

SEQ ID NO: 58476 - DNA, 476 bp, Zea mays
  Clone ID: MRT4577_153325C.1
ggccgccccttttttttttttttttttggtatcgcgcaaagcataaaaatctttataaaaagttatataaatatctacatcgtacatcataattgatgaaaatatttctaatatgggtccaaccaataggccccatgcataaacaaggatggagcaggacgtcgccggaggaagcagccgagaccacggatcggatgagttggtcaccgaaggacgcccataccgcgccgatttgagggtgtatgcgcgaccgccgccacgtgcacctgcgtcgtcgccgctcgtgcctaggtgtgcgccgccgtcgctcacccgccataagggcgccgtcgctcgcccctcctctaggattgccgcttgctagcgccacgccatcgacgacgctcaaccgccactcaccaccgtcgcttgcatctccggtggtcaccgcctacgctcgtgccccgcgaggccgcagccaccgccaccccggccgg

SEQ ID NO: 58477 - DNA, 360 bp, Zea mays
  unsure (1)..(360): unsure at all n locations
  Clone ID: MRT4577_153326C.1
ttttcttcnnnagcnaancacaaccagggggatttttatttctgttggggggtaaaccagcaaaattgtttgtgttgtttgataggacccaaaaaagcccccccttgggaatggggggccttgtttttttagggtttttcacgctcactggagaaaatttctttgtttcaaaggggggggagggaatttggaggataaattttttgaatgacaagggggggttaaaattgaaaaagaaaacttttccacaaggatatctgggttggagcttccaatccttggaaggaggaggtttgggccaaaatttgaacggggggagccctggtggcaatagcacttccctttccctgatagctgatg

SEQ ID NO: 58478 - DNA, 367 bp, Zea mays
  Clone ID: MRT4577_153327C.1
gtttggaggggtcggatgattttattggatgacacatgtctacagcgcatggcatacaaagttattctgcggtttggtatcaactgaagtgctcaataaaatagcgtaacaaatgtttgagccacatactatgcgagggagaaaaacaaaggcgagaacgtgaagtatctttattggtcagcaacgaacaccaccgcaaaggcatattacatgaccaatacaccggtaagtcaatcagcacctaaccaacgtgtcacgagcctaatgtatattcccggcccaggttggttgtttgacaccattgattgtaatcctcagcttaaaccattattccaacctaaatatagaactacacgccttttggaag

SEQ ID NO: 58479 - DNA, 869 bp, Zea mays
  Clone ID: MRT4577_153328C.1
ccggccgggaaaaagggacggtcacggtggcccagagccccagactgctgcgcctcaccaaccaacgagagagcacgaagcacctagcagcccggccttgtcgttgtaccgtacggtcccaccggcgccgcggcggaggagatggaagcttatgcccccgccggcagctaccggccggtgtgcgacacggtggtgttcgtctgcctcgcgtccgcctccgccctcatcgtcttcatggtggccgtctgcttccgcaacgccttcgccgccaacgggtacgcgaccgctgccgtggccacgaacggtgccgccagagccaccgctgccaacggcagaagccggtgcgggctggcgccgtccgcgctgtcggcgatccctatgctcgcttaccagaggggcgccgggtgggcgcagtgcgcgatctgcctcgccttggtgcgggacggggagacggtgcggttgctgccggcgtgcggccacctattccacgtcgagtgcatcgacctgtggctgcgctctcacgcaacatgcccgctttgccggcgtggcgtcgtcgaggctcccgtcgaaaaggtttgagagctcgccgctcttggccccaaaaaaaaaaaaagccaagatcacacgctggctgctatactagctagttcagcagacgctcactagttaagcttgttccctgccgtgatgttggatatcttataccaagggttgtagatgctagggcttaggcgtagtttatatatttctggtctctggaatcgaaactttttttttgctagggaaaagtcatatttttatgatgcactatgttttgtgttttctataattaatcttcaatcatgaaaaaaaaaaaaaaaaaagcggcc

SEQ ID NO: 58480 - DNA, 227 bp, Zea mays
  Clone ID: MRT4577_153329C.1
cagtaggcgcatatatttggcagcaggagctgcctctcacttgcttcgacgtatttctctatctatcgatactgttcaagggaccgaataaggtagagagagaaacttgtttgtgataggaaggagatacatgttcatgttcatttaggtgtcagttcatctgatgtctcagaagcaaaattgtgtttggagctcagtgacaccattttgtaatgcatgttcctttt

SEQ ID NO: 58481 - DNA, 1332 bp, Zea mays
  Clone ID: MRT4577_15332C.1
aggccggccgggccgcctatccctccccgtcgcccccgctcccggaagcttcaagaaggtggacggtcggagggacgggctacatgggtggctgcttctggtagcttcggtcgcccgccgcgccgccgccaggctgagtggaaggtagggggaagcaaggaaccagagggtgggatgtggatgtagaggattggatgctataatggcgcaagctgctgtcgagcccgctctgaatggtggctctttgattgggaggcagccggtggttccaaggatgaagaggaagacaccatctgaactgaggggtgagcaactgaagcggcgtacctctgaaaagcttggagatgatctgttaccttctgccacattggataggtcaaacaatggacttcggaacacagagcaacaaaagatttccaagtacatcaacacacgtgttacagaggtgttccctgtgagaaaagcaagaaaccttgggaaggaaaattccaaggatgtcttacagaataatgagaaggtttctaagtttgttaatggtacaccagcctcaaattttgcatcatcttcacttctatgtggtcatggtgacactgctaagttgaacacttttgttccatccatggaggctgcaaaaccaggtttcaaggaagttgagaaatggagtgaaaatgctttgtggagtgtatctgagcttcaagttggcgatgagaagcagactggttctaacaaatttgatatggaaagagtactgaaagggtttggagcttgtgatgcttttgtggcttctgggctcaacgcccctaatggacaagttggtggtattacgtttaagtcttcagacattgcccttctaatatgattgttcgtaggaaagaaagctcctctggattttgcctcaaagactagcttgcagtttgtttcattgtcaccagtcaagtggtgggtgtgcactagcttctcttgctgttgtgtatcgaaattttgccagttagaaattgtattaacattgtgtctatgttgcctgaacctataacatttccttagtttggaattgtgttctattatttctgcattttagagatgatgcatttactgctttggcagccataagtgtacatctttttaaagtagcatgctgaaggttgcaaagctaaattgtctgttgttcaatgaaaacaacactcttcaaccaaaaggtcctagatattttttaatattttgtggagtaaagtagaccaatcatttaattttgtgtaggagataattatcttaactttttcattaatttgttataccataccatatcaaggttagccgaggatatgaccgcta

SEQ ID NO: 58482 - DNA, 417 bp, Zea mays
  Clone ID: MRT4577_153330C.1
ccccggcgggcccggtcccggatttccgggttgtgcccacgcgtcgttttcatcctaaacgcggcgatctcacgcgccgtggcctcgtgtggctgatgcggtgggaaccgtccaccatacggccaagacgacgaccccgccggcgctcatgcccatcgggaagcccctaccacgaaagaagctctgcaagcagaccctcaagctggtgcgaccagcctcctctgcaccttgcactctgcgcgcgaggcacaccgtggcaaggtgcgtacccgggtgacatcggttgtgacgattgctggcaaagacccctattgatgtgatgacacacagaccagtactatgacgaggcatggtaatgtgtcttacatgtgtgctccactcaaggcagatcttgcgaccgaagatccactaagaggc

SEQ ID NO: 58483 - DNA, 340 bp, Zea mays
  unsure (1)..(340): unsure at all n locations
  Clone ID: MRT4577_153331C.1
ggtgtgttgcccattnggngatgcgcgcgatcgcagatccgcctttcgcatgctcgtatgttgtgggtgataaagcatgacttgcagagcgagactgcaatcattaaatgtcaggtagccaaagatgacttggaagaagctttatcagggtacattttactgtgaaggatgaggacaactatcgatacaacccaagaactatgacgaataatggagattatcttcgctttaccttttagggatagctgaataattctttcttctgctggcatagttgccccttatacaatattgtcaaatacaaatggaggactgaggtgttacttttcttctccttcag

SEQ ID NO: 58484 - DNA, 201 bp, Zea mays
  Clone ID: MRT4577_153332C.1
ggccgcttttttttttttttttttagttaagattgctcattctagacattaaacaaatgtccgagtacagaaatgatgaatccattcaaacaatatgcgatagacggattgcacttcctctacgcaatattccaagtaatgggatttccaatttgggagtgggtgaacaacacgatatgtttccccggacccactgcccct

SEQ ID NO: 58485 - DNA, 586 bp, Zea mays
  Clone ID: MRT4577_153333C.1
ggcgattgggttccggccggcccatcaccaaacacacccaaacggcaccgcacatcgtcgtcaaaatggtcaacattcccaagacccgtaacacctactgcaagggcaaggagtgccgcaagcacacccagcacaaggtcacccagtacaaggctggaaaggcctccctgttcgcccagggtaagcgtcgatatgaccgcaagcagtccggttacggtggtcagaccaagcccgtcttccacaagaaggccaagaccaccaagaaggttgtccttcgattggagtgtgtcaagtgcaagaccaagctccagctggcgctgaagcgatgcaagcacttcgagcttggtggtgacaagaagacaaagggtgctgctctcgttttctaagtgctttgtgtttgggtctcagggtcaccatttctatgcttacctcggcggcatttgggcatcatggatggacacaggcgaaaggaggtacacgtcctcggtttgaggcttgttcatagggaatgaatgaaaagaaaaaatctctgtgttgcaccaacacaacaaaaaaaaaaaaaaaaaacccgcggccacccgcggcc

SEQ ID NO: 58486 - DNA, 557 bp, Zea mays
  Clone ID: MRT4577_153334C.1
gttatgggttttttttttttgtgggggtgttttttttttttaaaaaggaaaaagaaattctttttttttcggggggctatagcgggaccctattatcaacgggaaaaccatcggcatccaaaacaaaaaacccctatatcgggaaattccccttgggccaaacccaacacctttagggggggccccgaacaaaaccatctttttaaaccactcttaacccgctgtaaggatcccccagggggggaaaaaacacagggccaaaaaaccccccacgggatccctaggacccaggcgggctcagtaccggaaaatatcacttaaaatgctaaaaaaaggggggaaaactattttgtcttccccggaaaaaatggcttgggcccttcccccggggggccccggggcacccatctaaacaagcgggcccagttttttgattggcaaataatccagggcttttgctggggcaaaaaggcccccgcccctcaacccattaagaggaggcaaaaccttttgcccacccccctttttaacgtgggggacctggtttttcacaaaaa

SEQ ID NO: 58487 - DNA, 251 bp, Zea mays
  Clone ID: MRT4577_153335C.1
ccggaaatgcccggcccgacccacgacggccgaggtctctctttgcctcactctccttcaggatcggcagggcaatctacacgatacttcactgcagcaaaggaatgactacagaggaacaagtacttaatgttgcggaaaaggggtagagcgtgacagcaggaactttgtattgcttgctagatgctctacttcgccttcctacatcatgaaggacgcgggtggagttacgcgacagctcgctcttttca

SEQ ID NO: 58488 - DNA, 198 bp, Zea mays
  Clone ID: MRT4577_153336C.1
cccacgcgtccgtgttctccctccctctatgcctgaccagctaggatcagcgtaagcagtaatggtgatggcgtcttccaacgaactgatgagctgcagcgccgtaggcgtgcccagcctgctggctccttcatcccggttcgaccgtctggctccgatctgcgccaacaccaccaactatagtcgttataccattgt

SEQ ID NO: 58489 - DNA, 737 bp, Zea mays
  unsure (1)..(737): unsure at all n locations
  Clone ID: MRT4577_153337C.1
gtctacccatacgcgcaactaccgcacaaccgtcttccataacatcccctctatgtaaacacatgcctcagcccctcccctttgtgtatgccagttctcttcactttatcctcgtgcaaggaggttctaagatgaggagtccctcgggcgttacaacaaccggaggagaggatgtgcgtcgttcaccttacgcaggtgtgaattctctcgttcctttctttcctgggctcatcttcctcgtttgcctagccccataaatgtacctccactacgctctagcagccatagccggcccgcccctaggccagcagcggcgtggcgcccatcctagcctgcgcggcggctagccagccgcagccagtgcccagtccgaggccctcctctgcgcggtcgcgcggctcgccgtggcagaccagccagccggcgggctgagcccccacgtccctgctcggccgcggttggaccttgcagcctcccgcaggtacatcaccgtgccgtcgctgcccgcttgtcgccgaggctggcctggatagccgcctcagtgagccaccgagccaccccgacgtgcctcgctcggctccctgcgcgcataggcctncgcaggtctcacctccatcccacgtccggtcggctgctccctattgctttgctgccgccatgaattttggaggaaaagcgattattcgcgtgttggggcgaaaggcaaaaaccccccctacgcttgagggcctttcccg

SEQ ID NO: 58490 - DNA, 451 bp, Zea mays
  Clone ID: MRT4577_153338C.1
aaaaaaaacaaaaacccccaaattaaaaaccccagggggggggggggggaaaaaagtctaacaagggggggggaaacccacccacggccgggaggataaaacccgggggaaacaaaaccgggggggggcccctggggggaaacaaaaggaaagggggggaaaaaaagcccgacaaccccggcccagaagggggttaaaaactggaaaccctggggggcgccctacccctggaaaaaataagacccgaccccctgggggccttttaaaagggccgcaaaatcctaaggggcctgggaaaattggcctttttaaaaaccctaacggaggaaccagggaaaaaaggggggttggggtaccccgggaaattggggacggggactggggggggaccaagttttcctatagggggggggattaaagggtgggggaaaaaagggcaaaagccggcccc

SEQ ID NO: 58491 - DNA, 403 bp, Zea mays
  Clone ID: MRT4577_153339C.1
ttccgaattcgaggcacgagtcacgcgctgatcccgcatctcgtgccaactaccatagcactttcatcgtcgtacgacacaagcacaatgcgaaggggaaatacgacgcactgactccaccggcaccgtgagcatgggctaaggctaagaacgaagcgggccaacacaaggtccgccttccaaggaagaaaccagggtcgaggtccctgaaagccgatcttcaattctgcgtacgacgtatcgggcgctacttgaagaagggccaatactcacagtacgtcggtaccggcgcccatgactacctcgacgctgctctcgaatacctcaccgctcaggatctggaactcgacggtaatgctgacacggacaacatgaagactcgtattattccgcgccacgtgct

SEQ ID NO: 58492 - DNA, 2151 bp, Zea mays
  Clone ID: MRT4577_15333C.1
ccatcctgctcagtgctcacttccacgcgggccccagcccgccacgagtccccgcggccacctgctcctcgccgccgttagcgcgccccgagccccgacagcctttctccttctagggtttctctctgtttcgtcctcatcgaatcggagtttcgcatggagtcatcgcggtctcggaagcggacgcgccaggcgcatgactgtgccgccgcgccgccaccagagcgagaagtggtagcgaggggtggcgcgtcgccaccatggagggaggatgaccgtgatggacacttcgtattcgaccttggcgagaacttgacccgccgatataaaatcttgagcaaaatgggagaaggtttgggttttctgcaatctgtcgtctcctcttctgctgggtatctccgttattattctaatgaagagggctacgagttggattttcgtaggtacatttgggcgtgttttggaatgctgggaccgtgaaacacatgaatatgttgccataaaagttgttcgcagtatccgcaagtaccgtgatgctgcaatgattgagatagatgtgctcaatcgccttgcagaaaatgaaaagtacagatctctgtgagtatctcagagacctaattacttaaagtataaccctattctgtttctgacttgacagttcctcttcaatttgtcagttgtgttcaaattcagagatggtttgactatcgtaatcatatatgcattgtaagtactagcttttggtcaattatactagtttctaaaagtcagttaccaattttgagaatgcatttttttgcagatgtgttggttgtttataatatttatcttattggccctcccagtacattgtatggaatgagagacttgtctatagaaattatgataaatcgcctgtagtatagtctttttgttcttcgctcgtgaaggttccctcatatggtcacaaattaaaaatattctttattcaatggatatcaatgattttgtcaggtttttgagaagcttgggccaagcttgtatgattttctaaagagaaatagataccaacctttccctgtggaacttgtgcgggagtttggacggcaactgttggaatctgtagcatgtgtgttagttattgcttgattctgcacatcaattattagctaatttggtagcattggcttcacttttctattgcttcaaaggggcagtgttaaccatcttttcttttgtaacagatatgcatgagttgcggcttatccacactgatctgaagccagaaaacatactacttgtctcttctgagtatataaaagttccaagtacaaaggtttaggctggagttttccatgtgatatttggagtgttggctgtattcttgttgagctatgctctgttagatctcttcacacactttatttttctagtaccagtctggtaattgttttcctaacatcacattttttagggggaagcattgtttcagacacacgagaatctggaacacctagcaatgatggagagggttttgggacctctaccagaggatatgatacggaaagcaagctcttcagctcagaaatattttaggagagcaacacgattaaattggcctgaaggtgctgtttcaagagaaagcatcagagctgtgaggaaactggatcgactaaaggacttggtatcgaggaacgctgaccattcaaaggtggcactggtggacttgctatacggtctcctacggttcgagccatcggaacgcctgacagcagaagaagctctggaccatccattcttcaggaacccaacatgacttgttgagcaggcttgactcatgtaactctactgaaggtggtggtaggaagcaggcagagccgtccccattgcaaagctgaaggcatcttgttcctctataccagagagtttgtgtaaggcctgtcaatggggcttcttgtggtgataaaactgatggctttagtcacccaatgtcatgtacactagcatttttcctagggagcttagttcgccagacggcgcttgtatgttgttaaccgggatacactatgagctgtgccccgatgccctggtgctataatccaatcgcaaatgatgaaatcaagcatagcgtgcgtccgtatagtttatgattgaattgtaccttggaatgat

SEQ ID NO: 58493 - DNA, 2675 bp, Zea mays
  Clone ID: MRT4577_153340C.1
aagcatacggaatggtacgtacggctatgagcctagcttgtgtgaacaaagaatcttattgtgcttcctcgggtgcaggctcaccacctccagtagtagcttcttcgtacggattgtatgggtcctagttgatcccatcgataatgcccagaacttcatccatctcctcgtcttccagcagccatgtcctaagagtagtggtggtcatcatcaccgccctcctcaagtagctcgcagagtcttcaggaccatgctccgccctgtgtgtgtccagctccttgtccgttttttgcatgatagcatgctcgttggccctcgagacgatacggccattttgcttcctctctaggtacatcttctctctgagaaacatatatcctccccctccctgctccagagtgaccgaatggcccaacgcgtccgcgatcattctgtgaatagccccctgcctgggaacccttatagcggcgcgtgagctgagctggtgacgcgcgcagaacgccttgccggtccactggaaccctcgaggccccgggcccacactccccctagtttcttttcccccggttttttccgtcctctcctcactcgtgtccgatggctcgcccccgccgcctcctctgacggtctgactgacccccgcctccccggagagcggctccgctgtctcgccggatatggcgccgcctcgtccccctcctaacccggcgggggagcagcagccgcagctccacggggtggtcatcatcacgctccctcccgcggaccagccctccaagggcaagaccgtcaccgccttcgcctacaccaacgaccccccgccccctcgctcgcccccggatccggttatggggtacccggcggcgacggaggctaggcggcggccgaggcgggcgctctcgacgcggcgggtggcgacggcggcgctcgtgctgggcgcgctcgcggtcgccgcctactactgcttctactcggacgtggccgtgcagttcctggggatggagcaggaggaggagcagaggaacgagaccaggtctttcctgctgccgctctaccccaaggcgcgtcagggccgcgccctgcgcgagttcggggacgtcaagctcgccgccaggagggtcgacgacggcggaagaaaggctaggaacaggatggaggtcgcgaaggcggccacggcgaggaccaattccacggcgttgctcccgatcaagggcaatgtcttccccgatggccagtattacacatctatctttattggcaaccctccaagaccatactttcttgatgttgatactggaagcgacttgacgtggatccagtgtgatgcaccatgtacaaactgcgcaaagggaccacatcctctatataagccagcaaaagaaaagattgtccctcctagagacttgttgtgccaagaattgcaaggcaaccagaactactgcgaaacctgcaagcagtgtgactatgaaattgaatacgcagaccaaagctcctctatgggtgtccttgcaagggatgatatgcatatgatcgcaaccaatggtggaagggaaaaattagattttgtctttgggtgtgcatatgatcagcaaggccagcttttatcttcaccagctaagactgatgggatccttggacttagcagtgcggcgataagctttcccagtcagctggctagtcacgggattattgccaacgtttttggccattgtatcactagagagcaaggtggtggaggatatatgtttctgggagatgattatgtacctagatggggagtaacatggacttctattcgaagtggtccagataacttatatcacacacaagcccaccatgtaaaatatggggatcagcaactccggaggcctgaacaggcaggaagcactgttcaagtaatttttgacagtggaagctcctatacgtacctcccaaatgaaatatatgaaaaccttgttgcagcaatcaaatatgcgtctccgggctttgtccaagacacttcagatcggacattacctttatgctggaaagctgatttccctgtgaggtatctggaagatgtcaagcagttcttcgagcccttgaaccttcacttcgggaagaaatggcttttcatgtctaaaacattcactatttctcctgaggattacttgattattagtgataaaggaaatgtctgtcttgggcttctcaacggaacggagattaatcatgggtcaactatcatagtaggagatgtttctctgcgcggcaagttggttgtgtacgacaatcagcggaagcagattggatgggcagattcagactgcaccaaacctcaatcacaaaagggctttcctttcttcctctgacgaagcatcactctctacataatacatgtgtaaagcgtaaatagtgaacgccattgtattgtagaatacattattaagtggagactgcctttgtgtatgggtatatcgttccattggaactgtcagaaatcctccactgtgttgtacccgtctgtaatgtgtatactatgttgtttacttgtatgatgtatgtacactatctcctctacatggagttgtcccctacacatggattttttgtagattagttacattatgaacattttcgacagaagttgggtactttaaaaaaaaaaaaaaaaaaaagggcggccgtcgcgatca

SEQ ID NO: 58494 - DNA, 625 bp, Zea mays
  unsure (1)..(625): unsure at all n locations
  Clone ID: MRT4577_153341C.1
ccggccgggacccattgcttgttcgaaacccccacgttgcggcgtcatttgcactcaaagcatcccactctgataagaccctgtacgtacagacgcaacctgctgctcagggccattgcaaatcgcggcgccgcattccggtgtccccgtccggtgtccgaattccggtgtctcgtcttcgcagtctagctagtggccatttgagtttatgtatcggtgcgcggccggatgctggcgtgtcatggcatatttttttcttcagtgcttgtgcccgcgtggagatgcatggtgccttgggggtctcatggggtcaaggtcatggaaaaaaagagccctgaaggggcttcaccacgttgaggacggcctagttatatatcacctgcttgtagaatggcccgctcctagatcacccgtaggtgctccgcatggccgtggtgcccgaggttcaatcgctgtccacctgccactgggacgtgggtatcctggagttccatatcagtgggtacaatcacggccgccgccgcgtgtcccgaggttgtacctgaagtacagtatgtgcgaatggcctgttgtaagcgattcacggattgtcactctgcagaaaaaaaaaanaaaaaaagcggcc

SEQ ID NO: 58495 - DNA, 317 bp, Zea mays
  Clone ID: MRT4577_153342C.1
gcgcgacaacctgatcgctaggcacaccaaccttgactggtacaaaagcccaaccctgagtgaggctcttgaccagatcaccgagcccaagaggccttcagacaatcccctgcgtgtgctcctccaggatgagtacaagattgctggtattggaactgtaccgggtggccgagtggaaactgtagtaatcaagcctgttatggtaatcacctttggtccaactggactgactaccgacgtgaagatctgatgagatgcaccacgaggcacttgatgacgttcttccggacgacaatgatggcttgaacctgaagaat

SEQ ID NO: 58496 - DNA, 256 bp, Zea mays
  Clone ID: MRT4577_153343C.1
ctgacttcattttgctggcagatgttgtggctggcattgatcttcaaccgggagttccagataaacattattggaggttctcttccaatggtatctattcggccaaatttgcttatgagataatgtttttgtggttctacctccctggcgggctttgaaagagtgtggagcacctgggcgctggctaagtgtcagtttttcctctggttggtcctacataataaatgttggacggctgaccgactcgctaagaggg

SEQ ID NO: 58497 - DNA, 272 bp, Zea mays
  Clone ID: MRT4577_153344C.1
ccaagcagaccacaacaaggagaattttttttgtcgacggacggaaaggccccgaccaagatgtcttggccggcgtacgtctccgagcacctgttgtgctgagatcgaaggacagcatttcatagtctccgccattcgtctgacactgacggctagcgtttgggcgcagtccgagagcttccccgagttaaagtcctgaggaggttgctcggcatcattaaggacttttgatgaaccctggtactcttgcaccaactggtcttttcgttgga

SEQ ID NO: 58498 - DNA, 339 bp, Zea mays
  Clone ID: MRT4577_153345C.1
atgggacggggcaattatgttacgagggaatattctgacaaaactccacttgagagccgaggaattacaaaaaacacataagcgccaaggggggaacaaaacatgacacgagcaaacctaagacattgcaggtggagcggggagagcccagaacagcgatacaaatgcaaacgaacgaggaatacctcttggcgccaccagctgtgggctacttgagagcgagaatctgcttggaccggttctgaggctgttgcagttgctggcgggactagtcaagggagcaagcaagaccatcacgaggaggcggctggggggcatcaacatgtgggcagcctgaag

SEQ ID NO: 58499 - DNA, 516 bp, Zea mays
  unsure (1)..(516): unsure at all n locations
  Clone ID: MRT4577_153346C.1
acgccgccgnagcacctcgnaccccaccgccccggcnaccccctcgtccgcctcctcctctgctgccgtcgcggnagggtaaatgnncgtggctgnngcctccctcgccgcggnatggtgggagggnncgaggcggtnnggcggaggtgcccggcggcgggagcgtggcnngctgggtccccgacccccacnnaccgcgcggggtgggggcctacctccgcgcgnctgnngcctctgcttcgcagnngggcggtcccgcgccctgccggaatcgcggctttgcggggctgcnngtgcgcaggcggccgagtaccgcgccgaggcggcgcggttgcgggaggctctcgcgcgcggggggctcgcgagggacgcactcgcaccacctggagccggggcggcacgagccggtgctgcaggcgctaacctcctgggcatccgggacaccgagatgagcagctgtgtagtggcaagtgcagacttgtcgtctgggcgagcagatgtggaggagaagaggga

SEQ ID NO: 58500 - DNA, 152 bp, Zea mays
  Clone ID: MRT4577_153347C.1
tcgttataatccaggagccggaacgccacttgctttgtacttgaaggcgaagcccgcttgcagcactcgcgccagcatgctagggtgagagaacaaccagagggaccacggagaggaaggggccgctgacgtcgcgtggcagggggagacgc

SEQ ID NO: 58501 - DNA, 701 bp, Zea mays
  Clone ID: MRT4577_153348C.1
cctcgaggccggccgcttcggcaccgacgccaagcgcccgcgcctggcgcgctcctcctccatcgcctccgtctgctccgtctcctctctccacgccgacccgtcccccgccgcgccgctgccgctgctgcgcaccacctcgctgcccaccgagaccgaggaggagcgctggcgccgacgcgagatgcagagccgccgccgcctcgaggcgcgccggaagcgcgtcgagcgacgcaactccatgggctccgtctccgtggcacccgccgacgccgtcagcgggaggaggtccaacgcctcgcaggggagcaactctgcaagcaccacggagcaaggtattggtggaagcatgtttaaccaatccgcagacgcgaagagtccatctacctctgataatagaaatcaaaacgacatgcttcctccgaccaaagcggccgagaagccactaaacggtactgcgacagagcagcagcctcgcctacggacgcttgggtccctcacgacacggacgggcagcaccagtgacatcagaaagctcatgatggaggacatgccaatggtctcatccaaggtagaagggcccaacgccaggaggatcgacggcctcctgtacaggtacaagaaaggcgaggatgtgaggatagtgtgcgtctgccatggtagcttcctcactcccgcggagtttgttaagcacgcggggg

SEQ ID NO: 58502 - DNA, 261 bp, Zea mays
  Clone ID: MRT4577_153349C.1
cagctactagcatcttcttccatatatcatacgagcctacgtcagtagctctaacccatattgaatccattaggacgtgggtcgtcgagcacaagctacgtactagagggtggatatggttcagaggcatcacgggctcgatcgcttacaattggtctcgacccaacatgaaaactagtgttacgatcatgcacgcaagggtgcatgcacaggctcttacactgtgagcattagccgtagctgcactagtagaatattatg

SEQ ID NO: 58503 - DNA, 118 bp, Zea mays
  Clone ID: MRT4577_15334C.1
ttttgaataggtttcacacaaatccatccatgtgcaaagcggaggattaacatttatacacggggccaatcaccgatggcgtgaaatgaaacaaggaccagaccacctacaaaccatg

SEQ ID NO: 58504 - DNA, 555 bp, Zea mays
  Clone ID: MRT4577_153350C.1
gaggtcggccggggcctccgtcggttcctcccgttattgcagtttcgctcccagagtgttgaccagggcatggcgcgggcaccgcaggcacctcgcagagccgggttactggcctcctcctgaggacggaagggccgtggggtcgccgtctcctttgcacggagtccacccgctgtgacgttgggcgctgcacctatgatcaccttcggccgcctgaatgagtggctgcggtgggagggctcgctatgtgctgagacttgtcttcgactagatggctttggcaaggattggagtattcatacggaaggagctggtccggatgcttggacccatctggcactgaatggcacggctgatacttcggtgtttactggacgcacgtgtcgagctactgtgtctatttctacgtctgactctgaggctggcgtgctgttcaggcctgtgtggattgttgcaggcttcacagcccggcttgcctgcctgcgtgctcttgctgtcttggttggtgcatacgctgcgctttctcctcagagtcttctgctgcctctgctggga

SEQ ID NO: 58505 - DNA, 327 bp, Zea mays
  Clone ID: MRT4577_153351C.1
cagactcgtgggcggactcgtgggccgacacgtgggcactgcaccggtgccatatgccgggcaagatgcacaagatggccggcatctcggatgcagacattgatctcgacgttcttctctaatactacgacgacaagtcttactataattctaaatccatgatcaacaagtctcgcacttgtcacgcactactaggagatttctgcacgcataagatcaacgagggacacgacatctatacgctactggaaagcgagccgggcaactactacatcctattacaagacgaacacattatctagatctaagaaatttgttcctggttac

SEQ ID NO: 58506 - DNA, 861 bp, Zea mays
  unsure (1)..(861): unsure at all n locations
  Clone ID: MRT4577_153352C.1
gttttntcggccgcgcggaggccggctcaagaacaagttcatcgtccgatcccagtccggcagccccgcatttgatcccctcgaccggcatcccattccatcccctcctcaccccgtcgaggaggatgcacaaggcgtcgtcgctgtcggagctgggcttcgactccggcggcgcgtcgtcgggcttcttccggcccgtggccgacggctgcccgccggccaccccgacctcctccgccgccccgcaccgccgcctcaccaaggtctccgtcatcggcgccggcaacgtgggcatggccatcgcgcagaccatcctcacccagaacctggccgacgagatcgcgctcgtcgacgcgctccccgacaagctccgcggcgaggcgctcgacctgcagcacgccgccgccttcctcccgcgcgtccgcattgtctccggcaccgaccccgccgtcaccaagaactccgacctcgtcatcgtcacggcgggggccaggcagatccccggcgagaccaggctcaacctgctgcagcggaacgtcgccctctaccgcaagatcgtgccgcccgtcgccgagcactccccggaggcgctgctgctcgtcgtctccaaccccgtcgacgtgctcacctacgtcgcatggaggctctccggcttccccgccagccgcgtcatcggctccggcaccaacctcgactcctcccgcttcaggttcctcatcgccgagcacctcgacgtcaacgcgcaggacgtgcaggcatacatggtgggtgagcacggcgacagctcggtggcgatctggtcagcatcagcgtgggcgggatgccggcgttcaagtcgctgcgagacagccaccggaactt

SEQ ID NO: 58507 - DNA, 431 bp, Zea mays
  Clone ID: MRT4577_153354C.1
ggcccaaacaaatcccattccctttataaaacattggccccttacctttcgagcgagcggctggggaggggccagggcaacccaaaaggggggaagtctaccacggcccgtgaagacaaaaaccaaacaaaatgaaagcttgcttcatacagtcacaggggcggtttcattaaacccaacaactcccggaagctccttttcttccaacaattccaggctagcgccccctcccggggaaaaggggctaataacgtcagcaactcccaccttttccacggggggaacggagtctccccccccgatgatagttgggacccccttgccgttgagttctgccagcttttttgccacaaccttggttcctacggaaaacctgtgaaattcgaaaacccccatgggcccgttccaaaaaaccgttttggttgtttcca

SEQ ID NO: 58508 - DNA, 225 bp, Zea mays
  Clone ID: MRT4577_153355C.1
cggacggtggccggagctcgacggcgacaagatgctcgtcggcgccaacttcgcgtccgccggcgtccgcatcctcaacgacaccggaatccagttcgccaacatcatccatatctccaagcagctgcgctacttcgagcagtaccagaggcggctggccgcgctgatctacccggaggcggcgtcgcggtgaagcgacgccgctggtgctcatcacgctaggcg

SEQ ID NO: 58509 - DNA, 106 bp, Zea mays
  Clone ID: MRT4577_153356C.1
aagatacctagggagtacggccacatacgaatcccctacaaggtacgggtcttgtgggaggactaccacgcccacttgtacgcactggccatctggcacgccatcg

SEQ ID NO: 58510 - DNA, 314 bp, Zea mays
  Clone ID: MRT4577_153357C.1
acctacttctagatcgcgagcgccgccctttttgtttttttttctattgaccaccacgtatagatggttacaaagtttgatcacgggacgttatacagctgactgttattaagacgaccagatctgatgtctccatgacttatggccacagacctttcggacctacatgcggcatgcccagctggacaccatatcttggtatcatccctaatgtcttgagtaatcttagagatgtcaggggtagtcccatcagtgacacaagagtttctgtgtttgcagaacagcaagccactacgatcacaactgacatgagt

SEQ ID NO: 58511 - DNA, 2400 bp, Zea mays
  Clone ID: MRT4577_153358C.1
ttgggtcggaaaaggccaaaaactcatcggcaatctccatctgaaaattctctcgcctgaacgtccaagcacaatcccgaaccctaaccagcgccccagctcgccgtcggcatgtccgccaggttgctccggcgagtcctccaggagcgtgaggccactccgcaggacaccgacgtcgccgacgacgaccagtcggtggaggaggaggcttctcctccgcgcacctccgcgcggaatctcttcgatctcctcgacgacggaaacggcgacggcgacgaagaagatgaaaaggaagatgaaacagaaataattcaagctgtgagctatacagaacagagacattctgtgcaaaagaaagcgaacgctgttcccgaaacaaacaaaaaatccaagaaaaagaaaaaaaagagcaaggcggagccgtcatcaacaaaggcaaaggatgcacagtcgttggagtcaattctggaagacttatgtattgaaaagaatccaatacaacaaagagctcatcagagtgacagggcagctggaaaggaatttgagacaaatgaagctactcatgtggcatcctctgttcttgcaatagacccaaaacatctaaagggtgaaaatgagatgaggcgcatttttggatcaaaggtagtggattcatttgaaaatcaacggagtatgccaagcagttcaaggcaagtacgtggtgctaggcgtgttgcccataatccaagaaaaactcttcttgtgtctccacctagctactggccaccatgggataagtcaataacaatggatcttcttgagatgaagaatggtttgaattacttcaggtacacatatgacccttcagtcagccatgtgcaggaattatttgaaaagcgccaagcagcaaatgatctcaatgctattgcagctatattagggaaatatccatatcatccagaatcactgttgacatttgctgagcttttcaaatattctggagagcatcaatcatcagcagatgcagtggagaaatgcctatttgcattggagtgtgcttggcatcctttatttagcccacttcagggcaactatcagttgaaattcaaccatgacacaaataagccactgtttacagcactctttagtcacatgaaaaatctggataggcgtggctgccatcggtctgctttagaggtctgcaagtttctgttgtcactggacttcgatgatccaaagggttctctattttgcattgattactttgctctaagatcacaacagtacaaatggctggagcaatttgcagaagagtaccagtgtgataactccttgtggttatttccgaatttctcattttctcttgctactgcacggttttaccttgagtgtgatgcagcgtcagagggttctgatgatgctgacaagtcaacatctcttgatctcatgaagcaagctctgatgcttcatcctatggtgcttcgcaagatagttgacaaggctcctctgaaagactcatcatggacccaaatactcagaaatgtattctttggatcagcaaaaccgggaagcccttcacttgagcatatgatcaatatatatgtggaacgccattatatcatgtggagattcccagaactgcagaacttgctgaaagaggctgctcttttggtgattgaatcactaaagcaggataacagagaagccctggactgggcttgtgttagaaaagaagcattctcgtcagacaagaatgagtactctcatctgcttgtttcagacttcactgacacaacgccgtcgctcccaccagaagaactgcgaccatttatggtcggtccaggaatgttgcatgagatgccacctgttgaacaagaagctggacccgagagactccgtgctcctcgtgaagtcgctgggcgtaatcctgcagtagtcttccttgaatcactgctcccatgggtcgactatggtgacaaccatcaaggtgcaaatgacgatgacaacgacgacgattgatcagttggatgtataaagtggcaaggactcacaattgcgcctgaactattgaatgtgacacatgattaagaaaagttgttgttgctcatagggtcacctcggtactatcaataaccaccacaagtctgcaagccaagtggtcttgtgtttttcatgatggggcagaggcctgaggtatgtatggggatcgaccactaagttgccaaaacatgtataccaaattttagggatcgagtaccatccttgtccgagacttgactctatgctaattctgcaaacatagtgaaagggtttaatactttacggtgctgttagaaaatttaccccaggctaggaaagcctttcacaaagaattaaatgtcttatttaaataatatcctcgtggattgttcaccctgaaaa

SEQ ID NO: 58512 - DNA, 467 bp, Zea mays
  unsure (1)..(467): unsure at all n locations
  Clone ID: MRT4577_153359C.1
gagatcaaggccaanatcctgtacgcgacgtcgaagcaagccctgcggcggctactggacggtgtccactacgaggtgcaggccaccgacccctccgagatgggctatcgacgtcatcagaggccgcgcgcaatgaggcccgcgctgcgctctgctctactactacctgtgcgtgtgcgtgtgtgatcggccggatgctaattggcgttggagtgctcccgtagcgatagcaacgtcgatgatgccaatctgacgaggctttcgcgtgtgtttagctttggtattttcggttttgtttggagagatgattaaatgatgcatgcgtggtgtgtgtgtgtgctgatgttgttgggtggagtagaagctgaatgagtggcagcagcagatataatgaaacgtccatctctgcgacgtagaaattgcctgagacttcaatatttaagatacaaaagggtcttatgttattg

SEQ ID NO: 58513 - DNA, 366 bp, Zea mays
  Clone ID: MRT4577_15335C.1
cccacgcgtccggatggtactacggcttaaagaggcgcaagtgctgcaagagggcggtgaagagcagacccaacccgaggaactactaccggtgctcggcggtgggatgcggcacgaagaagctcattgtgaggaacagtgaatacctgtgctacgtcttaacaacctactacggtatgcacaagcacgccaagtcgtgcgactgctacctatgcccgcctcctgctgcgcgcagcgcagatcactactcgtctcctactgcagaacgacgttggtgagccactatttacgcttgactggcgcatatgctaccgtaagctgatgatgcagttgaatgaggactgtcgcgctcttgcaatatcatta

SEQ ID NO: 58514 - DNA, 256 bp, Zea mays
  Clone ID: MRT4577_153360C.1
gttctagatcgcgagcggccctttttttttttttttttttgatgtaggtattagtattacgaagaagttttattcaggtcacgagcttattgtcgtaattcgtacaggagctgagtgcgtgcacgtacgatagccaagtacgatgaccctgcacaaccagtcaaccacagacatacatcaaataaagttcacttccttgtacttgctgcttgcagtggctctatttttctgtcaataaagtttttttttatgtctc

SEQ ID NO: 58515 - DNA, 344 bp, Zea mays
  Clone ID: MRT4577_153361C.1
tttttggggggacccggcgttttttttttaaggggggactaacaacacataggttgtgccgtagaagcatacagtcatacacatgcacatgtgcagcgcgtacgtacgtacgcacaagttagcaagggagttggtcactcacagcttgtcgcactgtgcaggccctaaaagcagcttgttgttctccacgttgtagacaacgggcatgttctggtgatggaagttgcctatgagcaccatggtgtcttccgcgccggtgatctggaggcacattaccctggtgtccgggtcctccaaaaaatatttgtcggggggcaaattaatgtacgcgcccgccaggtgca

SEQ ID NO: 58516 - DNA, 654 bp, Zea mays
  unsure (1)..(654): unsure at all n locations
  Clone ID: MRT4577_153362C.1
gntggtttgtctttcataggtagaagaggagcttcaaatatgaacttcccaacaaatgatcccacccccgatgaggtagcgtgcagcaagtgcatgcatactcagccaccacctgatctcaaatgtgctgtctgtgacctgcacatacacaggcagtgctcaccgtgggatcaaggtgaagaacctgttgacagcagcaattggagctgtggtggttgccgggagtggcgatgattgacttctgaacttcgttgcatctgttaatagtgccagctgccggctgttatcacaaggtgggaggtacatcgcgaagtgcgacgtggatctgtaggaaaaatctccaccaagctgttacgcagtgctaattgttgttcggatgctggggttggttatttgaccaaagtttaaccatcatacagttacaatagcaatgactcctgcgatatttacactgtacatactaaagaatgggtcgacgaagaccttttgtcattctttaggctgcttgtgtgtgtgttggtggggggggggggggggggcgtagagataagggaggatgttgttatcaccatgtgtgtggttctgaaaaccatattcatgaagctgtgttaccttgaattctcgtgctgtctttcagatagaagtgtcttggtc

SEQ ID NO: 58517 - DNA, 137 bp, Zea mays
  Clone ID: MRT4577_153363C.1
ctattttggaagacgcgaaaggagtgtcattgcattgatgctgatgcactactgaatgagcttaagaacgatgttggaagcaaagacagtgaaattggttcaagtaaggggtggagagatcgaataaatatagcaga

SEQ ID NO: 58518 - DNA, 360 bp, Zea mays
  Clone ID: MRT4577_153364C.1
accaatctggggggaaaaaaattcagatttaataatccttaaccggcattcaacatcaacatatgaggaacactaaaggtgaactagagtgggaccaaccaatccatacccagcttccaaagctccataattaaccatctagaccagcgccttcactttgacctctttctttgtatcctggacgtttcataacgtaacaggaccaccatgtattccctcttaagcgggtctggaggggcaaccatcatacccattcgatctggcttcctgacaaacacaccaactggtttaataacctgtgggccctgaaatctaagattccaaacctgatggatcgccttttctttaagcttatggggg

SEQ ID NO: 58519 - DNA, 324 bp, Zea mays
  Clone ID: MRT4577_153365C.1
ggcaagcacgggcggtcggggcgccagcaccaccactggctcggccgtctccacgacgccgtagtccaagcggacggagacgaaagcggtcgcgaaccaggcagccagccagaggactggttaccgaaccggaggagattttacacacccacctaccccgtggtagatcgacgacggccagaacatgttgaattggggatggggagggtacagattcccactgttttgctaggaaataggagtatcgttggcaggcgtcggatggatggcatcaatgccgctgcccctacgtctactaacagaaaggcacacgcaacgcacgag

SEQ ID NO: 58520 - DNA, 579 bp, Zea mays
  unsure (1)..(579): unsure at all n locations
  Clone ID: MRT4577_153366C.1
ccgggtcgnacccacgccgtccgnaattggtcacttgctnnctccctccaacaagncgtaattaagggccccggtcatccccctcttctagnnctcgttnnncattatcccatggcggnagggagnaagnncaccaccacncnnaccacctnngttccnnaccacaagnaaggnnacgaggnagcnnnagctcgnnccgccgnngcgggtacccggcgaggtnnccgccgnnagtaccacggnagnggccacnnggtgnacggnagggtnnggtgtcccccacgggcgaagaaacccgagtacgnnnacgagtaccaagaaaggnaggnagnaaggnnnagcacaagncaccaagncagcnnnacctcgnngcgagggcccggnnncgccatncnngccgcncnnggcgccntnntcgcactttctacgnagnnaagcacgnnnaggcgaagaaaggggacccggnagnncacgcgcccaccgnnccacaagnaatcgaggnagnngaggtcnngcggcggnncggcggcccccgtcggcttccgnngcggcttttcgcctttccacgnagnccaccac

SEQ ID NO: 58521 - DNA, 637 bp, Zea mays
  Clone ID: MRT4577_153367C.1
cattgcattctattcaacagccagagattggaaatatcataatgttacattcattagaagaaaataagtaaccggagacataaacacaagataaaacttgatctctcacgttcttcacatgattcatcaaacgaaaaacattagagcaattatcctaagaaattaaaacttgataacacagcaatcagaaatcgaaaccacccatgtcacccatgtcacccatgtcacccatatcagcgatgtcagaaaccgcttcaccaaccaacaacccacccaataaaccagctccaagcccaagtcctagtcccattccagctccagccttaccatgcttcttcggtttctgcggtttaccatgagcttgctgttgcgggtaaccgtatggaccctgtggtggataaccttgttgcgggtaaccatatggaccctgtggcggataacccgggtatccaccctgttgctgaggcggatatccagggtaacctccctgttgtgggtatgcaccaggtggcggataaccaccggttccagctggatatccagcctgctgcgggtatccataaacaccatcgtgcttatcgtcatgtccttggggtggatatccggcagaagggacccgcggaggagcagggtatgc

SEQ ID NO: 58522 - DNA, 220 bp, Zea mays
  Clone ID: MRT4577_153368C.1
ccgcggcgtagctcgaatcgctcgaggtgcacaagaagtctgcatacgttaccatcaacggcggtccacttaacctgtgcgggtaccaactgggaggcgccgcgacgtcacgctgttgccggaggccgagcgctccccgggtggaggccctgtccgcactgggccagaactgcagagcaacacgctccttacggcaggccctgtctttcgcgcaccacca

SEQ ID NO: 58523 - DNA, 245 bp, Zea mays
  Clone ID: MRT4577_153369C.1
ggcggcggcgttgtctctgacgatgaacaccgccgtcctgggcttcttgggagcgggcgggcacgccaccgcctccgccggtatcctccacccttcccccctcggcgtgacgggctcttcctcctcctcgccgaactcggtggccgacgcgtgccgtcagcggacggacttgacctcaacacgtacggacttgagctggtgcagcggtagggcggttatcccggtgccggacaggcccagcaccc

SEQ ID NO: 58524 - DNA, 1786 bp, Zea mays
  Clone ID: MRT4577_15336C.1
tggggagaccgacgcgtgcgatatatgcttgcggaggttgggaagattttttattctttaaagtactgccaagcatctctgaaggtgctcaagtcctctggtcgtgcacctgaactagaagcatggaagcaactgtttattaccctggaggaccggatacgtacccatcaacagggcggttatgcaacaaatcttgcccctggaaagattgttggaaagcttttcacatcacttgataaatctttgtcccgcatgatgggtacacaatctgcaccgttgcctcaactgccgcagggtgctgcaaatgagagaggtgtttattcttctcctgatacaaaagtagtaaatagtcagtcagtgatgtccatggcaccattagtgtcatctgcttcagagcagtctatgagtgaaattggaggaaatagtgtctatggcagggaagttgcacataacagaagtatttctgaaccagacttcggcaaaaccccccaacagcagggtgctgctgtatcaagtaaggcacagagcacatcaggttcaggcagttcacgctttggatggttggtgcagaagacaatagggcttgtttcaaaatctcaccgccaggcaaagctaggggaacagaacaagttctactatgacgagaagctgaagcggtgggttgaagaaggtgctgagatccctgccgaggagcccccacttcccccacctccaacaaaagtgccattccagaacagcgttccagatcccaactccaatgctcctcccactggtggaggttattcctcaaatcctcccgagcctagttccgggatgccaccgatgccacccacccagaaccagttctcagcacgtggaaggatgggtgttagatcaagatatgtggatacttttaacaagggtggcggtggtggtggcgcaaatgccttcggagtagcaacatcttatagcaaaccagcagctccttcaatgtccggtgcgaagttccttgtgccaactccagtcaatgttgcttcagaacagatggctgagctaggtgcccacagtgaaaccgcccgacaggatgaatcgtcgtcctcaccagcgatggaaacatcatttagttcgccgccatcactgatacagatgcagtcaagcattccgcggtacccaagcggtgacaacattccacggtacccgagcggtgacaacattccgcggtacccgagcggtgacaacattccgcggtacccaagtatggataacgtcagctcccccacaggcagcattaacagctcgatgtcaaggtcaagagcgtcatcatggagcggaacgtacccagagcagttgagcagcactgccgcttccaggtcacctgatggacagatgacgcagtcaccatcgatgcctggaagaagacctccgcacagccgttccaacagcgcgtcttcttccgcccagctcaatggtttgggtgaggatcttcacgaggtggagctctgacacctggccgcagattttgaccataatgtgatttatattaatagctgcatgtgtctagagagcaaagcaaaggaaattaaagtgcggtgtccctttttcaatttttttacatgtgaaagactgtggatgccgctgcattgtacagatagttgactcgttcgccagatgaaaaatgtataacaagagtcgtaggttcaagatagggagaagatgaaaccgtgatgattcatcattgttaaaaagatggactgtctgttggaaaaataaagctgattaataaccgcaataatgtcggtccgcagac

SEQ ID NO: 58525 - DNA, 315 bp, Zea mays
  unsure (1)..(315): unsure at all n locations
  Clone ID: MRT4577_153370C.1
attgaaaccaggggtggtttttttggnntttcattcattgataatacacaaacttagcaagggatatacatggatcatggatgcatgctgatggaaacacaccggaaaagggggggacacacacatcgtgcaaacatagtgctacacacaatacacacaccctcttatataaagagagggcattctttcacaaacaatattacttattaatcatagccaccaagatgttatatggtgggtaccacgatgatcggtggcactattatgctcttaagagccttctacgacgaccgtcccaaaaaatggtggaagaag

SEQ ID NO: 58526 - DNA, 387 bp, Zea mays
  Clone ID: MRT4577_153371C.1
ttcattcgtccggcactgcatgcacgtctggtctggaccaatgaagccatggacaacatggtgttcctgcaaaggtggctccaaaagttcccacagtacaggggcagggacctgtacatcgccggagaaagctacgcaggtaggatcggaggaggacagggagtatatacaatatacacagctatcattcagctagcatggtcgttgtttcgatcgagaaacatgcatgctattaacgctggctcgaatgtgatgcagggcactacatcccgcagctcgccgaggccatggtgggagttcaacaacaaggaggaggagggatctttaacctcaaagtgcgtcgccctgcgcaacccggtgcttggagtcgcgaacggactttaactt

SEQ ID NO: 58527 - DNA, 1519 bp, Zea mays
  Clone ID: MRT4577_153372C.1
aagctattgaagagacaccaccaccaccttcggcatcaaaggcaccagatgtagagagcgctacagctaccgaagctgcaccttctgaagccacgattaccgaagctgcaacggccaaggatgcaaacttagaaagcacattccctgatatagataaaatacttctggatatggccgcagaagaagctgctgcagccactgaagagaccatggccacagtgcctgggaaagagaaggatatagccaaagatacttcagaagaagaaaacttcaattttcaaaacttaattggacaagaattgtcaatggctgagaaagaagaattaagagactatgccatatcctgcgggtatcagtcagaggcaatgctcttcggcggtattgacgatgaaagcttaggttgtcttcgataccggactgcagcgaaggtcgtcggtactctgtcgaagagtattggtttcccgaagcttgagaccgatatcagccgctaccgacgacagcatatcgtcggtagtttattctattctaacttcaaggtaaaaacttttcttcgacttttcattgtttttaacgacgaaggtgtttgctgacgaagcttgcttctactcagagtatgctattaagcaaagctttgaggatgcaacaggaccttaaagacaaaaaacatgagatcataattgaaggtttagaaagcaaaataaaagatcaagcagctgttcttgaaaagaaagatttcgaacttcagacaatggaaggtttactggcaaaagctgaagccaaaattgcaaagttagataaggagcttctctcaaaatcagaaagctttgaacaagaaaaacatagatttgatatgaagtttgaggctgaggtcaaaaaaagttcaaatttgcaaaaatcattgaaagaacttcaagataaatgtctagagttcagcaaccgatgcgtgcagcggttaaggcagatcttcaactcggttggagccagctctgagaaattcattccttcgattgaggacttgccagggaccttcaaacacattaagggcgaagttgatgctcctgatgaagttatagccggacacggtgatttctgtgccctgctagcttctcgaggcacggctgttgccttcatgaaatctggttgcacgcatggaaagattgttaatagaccaaacttcagcttatcactagcagatctgatttatatccccagcctagcttgaagcataggaaacagatttataaagcaaatatgggcaaagggtgggcgaagcctagctggtgacgaagctcgaagtcacctcaagccggatgacgaagccgaagaacacagagtcgaagcttagcagacaattcgaagctcaacagatggtgatgaagctcgaatacctagctgtggaagaattctaagaaaactcttgtattaacctttataaagagtattgtaacttaagaatcagattctactctgtaaatttgtccataccttgtaatatatttttatttccattttacctttc

SEQ ID NO: 58528 - DNA, 636 bp, Zea mays
  Clone ID: MRT4577_153373C.1
tttttttttttttttttaagtggtgatatgtgtctgatataaaaactgctttttttcgtaatcaagtcggcaagagagagagagaaatggtagcttcgttcataagatggtaatcatacatttaacacacacacacataatgcccaacaaccacaaccacatcttgtgctcttgaaaagatggcttgaatgtcggttggagtctaaattgggactatctacttggccaagccagtaacttctccatcttcaacttggacgcgggcgagggattgacgagccacttcggcagctctctttccggagagtaacatggcgccgaaggtggggcccatacgggcgcttccgtcgaactcgctcaactccatgccaccgacgatgaggccgggcacgatctccctggtcttgttggcgatgtggtcctcggcacgttccatgtcgaggggacgcatgtcaccgagtccctcggtcaagccggcagaggcgatacgcttgacgcagaaggccccaaagggcccgtcgtgtcccgcaaacgaacacaccagcggcgccgtaatcgtcgaggggtccatgcacgattggtggtcgtggttcaaggacactaaggtccagttggtcacgcattctgctactcgtt

SEQ ID NO: 58529 - DNA, 405 bp, Zea mays
  Clone ID: MRT4577_153374C.1
cttcttcttccctgacggcttacacctgactcgccggaaccgtttcaactgccatgtgctcgtgcactaccaagggcaggacgtttgaggggtatgcccctacttatgccgccgtattaactgttaggcgtgccgctggacggcatttcaatctgtggtgaggtctgcgactgttgaacacgtcgcttacatggtcacatgttgaggagcgcgaaagctaccgactacgttggtgatcaaacggcttatgaggtgggctctccttaggcgttcatagccgcgacatgacactcgggggattaaacggatgacataacctgcttgatggatgagaatccatggacgtgcgcgaatgcaaatgaaaatgctggctgtgctaccgagaccaagaggactgtgactgct

SEQ ID NO: 58530 - DNA, 289 bp, Zea mays
  Clone ID: MRT4577_153375C.1
ctggccgttcgcgtctgccctgctggtagcggcttcgcgtcgcatggacccaacgctgcgttcaggtactgcagcaaggagtgctgcttcagtctcacctacgccgactcgtcgctgcagtgagcagtgtcgcaggacgctctcggagtcacaggctgcggatcgaatgccgacaccttcggctccatgcagagggacactggcactgctgcgctgacgcaggggctgctgggtctcggcagctgccggttgtcgctcctgtcggagaccaaggtcatgtagtacgcca

SEQ ID NO: 58531 - DNA, 242 bp, Zea mays
  Clone ID: MRT4577_153376C.1
ccccggcaagaggccaatattgaaggctttctaggacagctggactgcaatctccagacccactggatatggtggggtggaccaaacttacacagaaaagcctccactgtgagccattcatcagctacatgacatgatttattggaggaccaaatccagagtgactgctaaccgattatatgcgtccagaggaaacaacactagcgtccgtgtggcagcattgatttgggggcggattcacc

SEQ ID NO: 58532 - DNA, 338 bp, Zea mays
  Clone ID: MRT4577_153377C.1
gggggggattcaaacgaacgcagcccttcatttatttaaaggaggagggctggacccattacaagtagtttttcgaggtaattctacaaatttaactaaaaaatcccgcaaaaaaactcggaatcttaaataattttgtgcacgccccaaccctttgctccaccaccggggattgctcggcctactatgggggacccgccacttcccaagggggctcaacacaaaaaataacatttttggcttgaaaatcaaagaactctggggtccaattttgccattttggaatttgaaaaatgggccaagccaacgaaggccacctgaagaaacttttgcactcc

SEQ ID NO: 58533 - DNA, 449 bp, Zea mays
  Clone ID: MRT4577_153378C.1
cagctgctccgtctctcatttcaaactttaccgtaaatggttcgttctacagtatttccccccgtaagaggtgtatacggtgccagatcactaaccctgttggcgtgcattgacatacaatcaattgcagaacagcacaccgcacgtattttgtgcttttgccgcagaggatcctggggctttgcgccctgcttcagcctacaaagaccccgcgcacccaggctgcgtcctggtccttgctcttatcctatcctgcttttcttcgcttctctcttccccgctctctcattcttctcatacaagtctgttgttggagggacacacgtatccagcccaccaaagatttactcaatttatcccagacgagacacacactcgcaacgaccggaccgtcgaatctcgcgactccggcgacatgtcgacggcggtggcagaggtgcggccgctct

SEQ ID NO: 58534 - DNA, 172 bp, Zea mays
  Clone ID: MRT4577_153379C.1
tttcttagtcaccgacaaggcacaccaagtcatggatgaagacatattttacaactgtaaccattacgacatacatcctaggcctccaccagtgatggagagcggtgagatcactgatgtgatgaccaaagcgcgaaggatgcataggctaccattgagtgcctcatgttac

SEQ ID NO: 58535 - DNA, 315 bp, Zea mays
  Clone ID: MRT4577_15337C.1
gttgtagatcatcagcagccgctcttctagatgctacaagactaccgcctccatgctacgacgtagttgttctattatggcgcctaaaaacaataaactagtcgccgttgtacaacaacgtgactactaaaaaaacgctgtcaccaaacaaaataatcttgtagcacatcatccttttttcagctggtgtaataataaagaagagggcaccgatcatcgttcttaacaagagttgagcctgcatgatgaataatacgaccccccctgtagcgcattaatcaccgcgggtgttgtggttactacccgcatgatcac

SEQ ID NO: 58536 - DNA, 568 bp, Zea mays
  Clone ID: MRT4577_153380C.1
atcccatcttcccgagcgagttcttgtatgacgtcttcctcttcggatgacctccgaggctcttgtggtagcttgccactctcaccaagcaagtgctcatgactgatctcgacattcagagcccaactgacttcgagcccttcgctgacgccaatgctgagatactctcggtgcggcagcagggtgaaaggactaagtacacgcgtccatgaagcagcgtactgctccgaagagcctgactactgcctacggatggaagaatgagttcaggtacagcaagatcctcaaagatctctcgaaagagctctgctgcaatggcacagtggtgccgcacccagaagttggacagtgcattcacgtcctaggcgatcagatcaagaacgcctccaatatcctcgtccaggccgcgattgtcaagaacgagcacatcaacatgcatggattctgagaaaacgccgggcccatagcaaatcaatcctgtatggagggccagcttattatatataatatctgacgtgtagcatatactatctgcctgggaactacaagcaagcctaccacgacgact

SEQ ID NO: 58537 - DNA, 310 bp, Zea mays
  Clone ID: MRT4577_153381C.1
gttctttttttttttttttttatcgaaaatgggtgtgtggggccattaaatccgcgtaaccttcaccttaaccttcataaggttaatataagttgattaaaaccccggagcgccggccagtggaaaacccacaacccatacaatttttttttcgtcacaacaagaaaaaacctaaagcgaaaccacttaaaacacaaacacaaggcacgcacgggactcgtataccacgcacgcacacaccaaaccaaaaataacataccagccgtattacaccatttcttgagcgcgccgtccgggcgtaatgcacctg

SEQ ID NO: 58538 - DNA, 234 bp, Zea mays
  Clone ID: MRT4577_153382C.1
aataataaaaaaaaaaaaaaaaaaaaaaaaaagggggatttttaaaaaaaatgaaggagtcaacatttatggccagagtaacaaggaaacccccctgtaatatgtaaaccgggttcgttcttttgaaggctccacccgacggctccctggcctttttggtacctgctggctccgggtgcccccgggttgcatgcctggattctggatgcttcgcgacgacctttgtggtaaaac

SEQ ID NO: 58539 - DNA, 286 bp, Zea mays
  Clone ID: MRT4577_153383C.1
acgggtctgcacgcggctggcggttgaatgctctgacgggccgtcctgtgaatatttggtagcgtgtgacaaaataatatctaacacgtagctgcctcccgttgccttaggatatacagctggccatgaccacgatagccagcttacctctctggattcttagaataactacaggaggaatacgtacttacaactaacatgtgtttgcccacctgggtcatatggaaaaacttaaggagttcctctctttaaggagaaaaacccacgcttccgctggcgcctgggg

SEQ ID NO: 58540 - DNA, 503 bp, Zea mays
  Clone ID: MRT4577_153384C.1
ttttgaatgcacaggatatcccatgagtaagaagttcaggcaggcgactacatgttctagctgtgcaatccatcatacacgtgcactacattagaataaattacgtgtccactttccaggaacccacggtatctgcaaacgccccataggatcattgtgatttcttcgtctcgacagttgcagcccatgtgacggggtgtttgttgaacataggccacggtgggatgacgaccagagcgagggccacggtggagatgccgaagatggcaaacgtgagttggagggactgcgctacgaacccgatgatgaaggacacaagggtgatggcgaccagggcgatttttgagatgttttcgaccgatttttggccctcaaagtcaattcggccttcgaacagatcctggaaagagttcgacatggcgttcccccctccccgtcagagcgatagaggcgtgaaaaaaaagtgtcgacagcgtggaggtcgagtaccaaggcagatgccg

SEQ ID NO: 58541 - DNA, 565 bp, Zea mays
  Clone ID: MRT4577_153385C.1
ttttgtgcattcagactcttaattcatggtttctcttttggatcatttctttcattcattaagcggtagggtctcaatcaacctctttcccgcatcttcatgcatcaaccatcctagttcctgatgttcccccggatggagtcatcaccaccgttgttgttgatataagtctgattcctctcctcaggtgcgccgacacctccgtgagcaaagtcacccgccttggtaggttgaccgttggccttgatggaaccaccctcgtcgagcgggatctcgcggttgttgccagcgccgctggcagcggagccgtattttacttctgcgccagggaacttgccctctacgtttgcggtgtcgacgccggattcggtggtggaaagaccaacgttgtggcccttggtagcgctatcgctgctgagttcctgctcagccttcttggcgatctcgttgacgttggtgttcttgtattcggcagacattgtgatccctgtacccccaagtagtttggaaatttgtaaaagaggaaagtattggaatcggagatatgggtatcaaagaagcgcac

SEQ ID NO: 58542 - DNA, 1500 bp, Zea mays
  Clone ID: MRT4577_153386C.1
cggacgcgtgggcggacgcgtgggcggacgcgtgggcacagaatggcaaggcccttgctctgcctcgcactcttgtgcacttccctggcgttcaccacctgcgccggcatccgcctggagctcacccacgtcgacgccaaggagcactacaccgtggaggagcgcgtgcgccgcgccaccgagcgcacccaccgccggctggcgtccatgggcggagtgaccgcacccatccattgggggggccagtcgcagtacatcgccgagtacctcatcggcgacccgccgcagcgtgccgaggccatcatcgacaccggcagcaacctcatctggacgcagtgctcgcgatgccgcccgacctgcttcagacagaacctcccctactacgatccctctcggtcgcgcgccgcccgcgccgtgggctgcaacgacgccgcgtgcgctctcggctccgagacgcagtgcttgagcgacaacaagacgtgcgccgtcgtcaccggctacggagccggcaacatcgctgggaccctggctaccgagaacttgacgttccagtcggagacggtgagcctcgtcttcgggtgcatcgtcgtgaccaagctctctccggggtccctgaacggcgcgtccggcatcatcgggctcggcagaggcaagctgtcgctgccctcccagctcggcgacaccaggttctcctactgtctcacgccgtacttcgaagacaccatagagccgagccacatggtcgtcggcgcgtcggccggcctcatcaacggcagcgcgtcgtcgacgccggtgacaaccgtgccgttcgtcaggagccctagcgatgacccattcagcacgttctactacctgcccctcaccgggatcacggcgggaaaggtcaagctagctgtcccctcggccgctttcgacctccggcaggtggcgccggggatgtggacgggcacgttcatcgactccggcgccccgttgacgagcctcgttgacgtggcttaccaggcgctgagggcggagctggcgcggcagctgggcgccgccctcgtgcagccgctggccgggacgacagggttcgacctgtgcgttgcgctgaaagacgccgagaggctggtgccgccgctggtgctgcacttcgggggcggcagtggcaccggcacggacttagtcgtgccgccggcaaactactgggcgcccgtggactcggccacggcgtgcatggtggtgtttagctcggtcgaccgcaagtcgctgccgatgaacgagacgaccgtcatcggcaactacatgcagcagaacatgcacgtgctctacgacctcgccggaggagtactctctttccagccggcggactgcagctccatatgatcgatcactagcttgcgtgccggccgtgtgcatattctgtactatttgtgtgtgtatgtgcgcgcgggatatatatatgtaattgtgtatcactatccaaattgctcatgcaattgcactgataaacgcgtttgt

SEQ ID NO: 58543 - DNA, 482 bp, Zea mays
  Clone ID: MRT4577_153387C.1
ctacatatacttttgcctgccttttggttgcataggacggtctgtactttcagctcaccgttatctaacagtggttccagcaacaacacaaaccgattggcgttctcatctataaattgagtgactgtgatcatttaaaggatcaggagatgccctgagccgttcttctatttcaaactcaacttttatgaacagatggatgagcaatgcaaaaatcccgcattagcgctcatctgactctgcacaaccgtacgcagcttaccttgtggttctcgggcgaagcacgcttatggattacatgcactaagcatcacttacctttatcacttatgcaccgattccgtgtgcccgactaacaatgctgtccttttctatcctcttgaacctaccataaggactgaaatggggtgacaaaactccaactttttaattatcaaggacctggcttaaaccgaataaatgaggatttttaccttccaaca

SEQ ID NO: 58544 - DNA, 393 bp, Zea mays
  Clone ID: MRT4577_153388C.1
atggaggaagccttggatttggacttctctagaacgttgctagagctggacgtgaagtggtgggagcgggagcggtggcgagagtctagacgcctgctcgtcgagggagtcggaggtacgcgcgtgtggaacgcagggatggaggcgtcgcgtgagatgcaagcaagcacatgttccttttccccggagacggaggccacgctgcaggagcacgcgcgcaacggcggcatgtggacgcgaatgaagccaggcatgagatgccccgatgcccggacgcggcctctcattgttgtgccagacgacgtgatccgccctgcccgattggacgaccacggcctcctaggccaggcgtccgctggccggccgaaagccgcactggcaactgccaactag

SEQ ID NO: 58545 - DNA, 613 bp, Zea mays
  Clone ID: MRT4577_153389C.1
aatattcagttgagatggccgagttggtctaaggcgccagattaaggttctggtccgaaagggcgtgggttcaaatcccactcccaacaaatatatttttacatcaaaccagcgggcgccatacagagaaatcggtagatccctgggggagagagagaaagcgggtagagacgacgccatgacctcggcaccacgcctccttcggtgcgcgtccagccatattgccgccgccgcggggctccgctgtcggccatcatcgtcctcgcccgggccgccaaggggaggatctcgcagacaccggagtggtcgctcgtcgtaggcatgcatctcggtgtcgccatccatgtgtgaggtcacgagtcatctgaagatcatcctggtacctggaatctcaagtctcaggtcaagagcaggtactgcaggatgaggcgcatggaggatgctgtggcgagttcgtgagaggtctaggccgtcgtctcccagtcaacttcgggttgctggaccgttgtctccatataatgtaattatttatttattttgtacagaactccgattatatagtaaagatgtgacattcgatccaaaaaaaaaaaaaaaaaaggcccctagggcc

SEQ ID NO: 58546 - DNA, 770 bp, Zea mays
  unsure (1)..(770): unsure at all n locations
  Clone ID: MRT4577_15338C.1
taccctcgggctctccgggtgttgccctaagcctttaccccttgtgatccagcttctagtgccaggtgggctctggccaaggtaacacctggggtgttacaaatggttctttactcactcgagcaacgttctctaaatggtcctctaaatttagaggacgccgctggattctctttatgtagattttctctaaacggtcctccatcaatttgaatactttaaacaaccggtttagcaaaactaagatatatacaatacatttgagagtatagcaaatatgtatctacaaaaaataaaaaatctctataatatagatgtttacgtataaagggcgtgatttagagaacgttgttagagaggaagtagatatagaagatgaaatattttagatgaaaatgtaaataacagatataaaagatagatatagaggatgttgatggacagtcacaccacggaaaggcaccgaacacgacgatgatgctgaacatggtaaaaaaaaaagtggaaagcgatatgtcgaactggatgtcaacggacatgtgtcttctggtttgtattcaatggttggtccccgaaaacctagtttgtatggtcgttgtggtcatccgcgggcgggcgagggtgttaattggaccttgcctgatcgatgaccaagacacagaggtttacagcttctatcaaaagcgcccacttctggagttcttgtttctgaacggctcgacaccgtgtgctctactactctacccacttnccagccagcatacagttgg

SEQ ID NO: 58547 - DNA, 396 bp, Zea mays
  Clone ID: MRT4577_153390C.1
cataatcctaccggtgccgcaggagcgagctcatggagtccgtggccgggcagcgtgcaggtgcagcagctcatgtacttcgttccccagcacgacggcctagcggcgcagcccgtcgctccgtggttcggctacagcgggagcgtgccgtgcgcggtgttctacccgcaggcggtgggttcagctcaggagcaccagcaagcttcagagcctctggatcacaaacgcgcgcagagggaaaggtccctgacaggttcgaacatggcctccagcgccgcgtcggcggcgcagaactcggacaccgcgcagtcccgccacggccccgggcaagaaaacaccggcgacggctgcgcggcgctacgggctgccatcccgcggctggccaagtgcgcgagt

SEQ ID NO: 58548 - DNA, 254 bp, Zea mays
  unsure (1)..(254): unsure at all n locations
  Clone ID: MRT4577_153391C.1
aacgangcgcncaagnccangnacaacgcnngagaagacggcaagaggcaggncangancaggccgncgnccaagggcancancaagnnccngacggncaggcagggccacggcnacannggagagnncgagnacgnngangaccaccgancgggcaagaacgnggncgaacccaacgggaggcngaacaagngcgggggcancagcccgcgcnnngagancggcgggaaagacanngaggganggacnggaag

SEQ ID NO: 58549 - DNA, 333 bp, Zea mays
  Clone ID: MRT4577_153392C.1
gggggaggaaaaaaacctttttttgcatgccccccttggccaactgggggaccattacatgactgggggggccggcaacaccacccggggtttttttaagctgggcaaaaaaaacaccaaacttgctttggttgcaggccttggcgtttggtttgggttttgctgccccggaaattccttcgttggggacattattttatccttaccaggagtcccccgggaaactccataatttggggggggagaaaacccccaagggtcttgagctggatgtgtaacttcctttaaacattttaccacttttaaacacgaacaccattttggacttttttt

SEQ ID NO: 58550 - DNA, 255 bp, Zea mays
  Clone ID: MRT4577_153393C.1
tgctgttcggtctacgcgatcactcagacgctgcaaaggatccaacaggacatagtggctcagaagaaaacactgggggctctaatgggccagtaccagcagcgaatctggacacccgaacccgaacgtctaccaccacagctaccacatacacatggtgggccaatactgcaaccctctcccgaacaacctttcctgaccattctgcaccatcagtacacgctcatacgctggccaaagagtcacctggctctt

SEQ ID NO: 58551 - DNA, 591 bp, Zea mays
  Clone ID: MRT4577_153394C.1
atccacctgtccatccgcctcgtagcgaccagagacacgcactcatttctcaggactacacagatcggagaaaccgagccccccctgcccagccgcgcgagcaacttcctccacttcgatcgatccagcaagagaggggttccgatggggctgcagtggatgctcctgacgtgcgtggtgggggcggaggcggcggtggccgcgctgctcacgctcccggcgccgcgggccgtgcgggcacagatcgtcgggctcacctcgatgcttctgcagcccttcgccgcggtgctccccttcgccgccttccagctcctcgatatctactggaagaacgagcacaggctgatttgcacgggagagatgtgcacctccgaggagcgtgtccgcttcgagaaatccattttcaagtcccagaggaatgtcatcctttgtgtttcagtatttatcctttattggtccatctatcgcatttgcaagttcaacaaggacattaaggcactggaggaggttgagaagcgcatcaaggacgagtagaatcatcctagtttgtgatggattttgtggtattctcggccttcagcagatgtatcc

SEQ ID NO: 58552 - DNA, 319 bp, Zea mays
  Clone ID: MRT4577_153395C.1
acacgcttacatccaacgctataaatattttatacgttcatgtacttctagtcctttgagcgagcgcaacacaacgcgttcattattgcacaccgctcacttgctcatattgacattattgcacaacatctcccactagttacttgaatggacttcgaacatgcaggcatgcaaggctacaggctacaactagcgcttgtggatggcgtattacaacaaccatattgccaattgctaaaacaattgcttggcacatgtaaacctacaaaccattcgaaacgcaacaacaacaacagtttctgccattactgaaccacct

SEQ ID NO: 58553 - DNA, 143 bp, Zea mays
  Clone ID: MRT4577_153396C.1
cgggctcaccacgttccactccggcgcgcacaaatggtcctccgccatgggagatctcgcatcctcaaccccggacgcgacgcaccgggcacagcgggagcaggtcgccacgtctgcccccatccgcaccgccatcgactcac

SEQ ID NO: 58554 - DNA, 277 bp, Zea mays
  Clone ID: MRT4577_153397C.1
aaatattcgccaagaatcagtcaacgctcgaaataattgcttgggggggagtaagagagattaatgctttgttcattgaaacatgctggctagtcaaggtgcttgtactgtacttggtaagcactgaattgtggaatggttggaatagacactaccatctcaacacttgtctctgttactagtagttttccactaagagttacaagtaagagctaccctattttctctgtacagattgattgcaattgctctataacctacagacatgttggtccac

SEQ ID NO: 58555 - DNA, 621 bp, Zea mays
  Clone ID: MRT4577_153398C.1
cgtgtgcatctctaactctaccaagcatccgcccacattcgcccctcctagtgaccctatggcgcagctcctccatgagaaacggaaccctagatccaaattggctgaggggatttctggctcaattatgagccgcctcgcttcctcaccggtgctaccgctcgatgatgaggaccttctccaagagatcctcatccgcctctctccacaaccatcctccctcccgcgcgcctcccttgtctgcccgtgctggcgcagcatcctctccaaccacaagttcctctgtcgctttcgcaagcatcacaggaaaccacctctgcttggcttcttcgcaaggtgtttaatcactaaaacgaccgtcttcacttccgtccttgactcgcctgaccgcatccctgctggtcactttctcgtgccgcacagccacaacccatccaagcggttgcgcttcatgggatgccgccatggcctcgccgtcctatttgaaatgtcactacattcccccatgccaacaggtttgattgtgtgggatccactcactggtcaacaatacaaccatttgacaatgccaccagggctcaatggagacaaatggaagtgttggaataccactgtgttgtg

SEQ ID NO: 58556 - DNA, 401 bp, Zea mays
  Clone ID: MRT4577_153399C.1
gggccgccgcactaaacctatccagtacccaggtctgcgtcgggcccttgccgggagagaacgcgcagaggctcgtctggagggtggaacaagacttaaacaaatggtgtgacagagttcacccctgcaagctgaacatagtgacgccaaggcagaagcaagcagagtacgattgcccataaggctacgccacggggggggggggaaccgcagagggcggacaaaaacgccaggaaatgagtgagctgctcaacgagcggcagaaagagaaggagctgatgagcgggatagaggatcagagggaaggggactgagggatggaaagagacggacagagagaacctgggggcgctggctggggagagcaggcaaagagtcaaggaagagaaggagcgcgaaga

SEQ ID NO: 58557 - DNA, 292 bp, Zea mays
  Clone ID: MRT4577_15339C.1
gagctcacctcccggcggccgccctccccctttttttttggtgttttttaaaatttactgcggtgttcactatgcttctattggtgaaagggcccatagataacatgccctacaacagaaagggcaataaaccaccggaaaattgctaaaaacacaaagccctagaaactttagatcttctacgccctaaacaaaaattctgacaaaggtgccaccagaggggcgacacaaactgaaagcagatctccgtgcacctgcattgtaaaaacgaccgccccacagggcacaccca

SEQ ID NO: 58558 - DNA, 1435 bp, Zea mays
  Clone ID: MRT4577_1533C.1
ccggccggggacaatctgatttgtgcattcctcctcccccaccttccacccttcgatcccacgtcttctcaacctttcttcttctctcctcgagaaccccaatccaaacccccaaccgccaaaattcctacgagatatatcacagaaatatcgtcttggctcagatcgtgcccgagtgaggaggcagtgagttttgaggggacgcaggatcatggcgtcgtcgctggccgaggaggaggaggccttcgagcacacgcttctggtggtgcgcgaggtgtcagtgtacaagatcccgccgcgcaccaccagcggcggctacaagtgcggcgagtggctgcagtcggacaagatctggtccgggcgcctccgcgtggtgtcctgcggtgaccgctgcgagatccggctcgaggacccggccacgggggagctcttcgccgcctgcttcgtgctgccggggcagcgggagagcgccgtcgagaccgtgctcgactcctcccgctacttcgtgctccgcatcgaggacggcagggggaagcatgccttcgtcgggctcggcttcaacgagcgcaacgaagcattcgacttcaacgtcgccctctctgaccacgagaagtacgtcaagagggagcaggagaaggagaccacgggcgctggcggcgaggagactggcggcggtgagattgatatacatccggctgtcaatcgccgactcaaggaaggtgaaaccattaggataactgtaaaaaacaagccatcaactggaagtggtatgctttcagctgctggtttatctggagggaccactgcaaaacccaagacaagcatgcttcttgcgccacctccaggcgcagctgggaagcttagatctccacttccaccaccacctaacgaccctgcagctgcaaggatgaattctggacatactgcaggaatcagggctccaaaagaacccaccaagagaaataacgatcctttttcagatctttctgctataaagcaaaatctaccttcatctgctgaacccggacaaacaaagagcacaggagctggatgggcagcattctgacgatggatgcatgatctactgctactattggcatttgtttatctgaagaaggggaatgggtagttgaagcaccgaacaaggatctggaactgctggatgcctctacccctttcgaaactgaatggttaaaatgattgatcaacctaccagttccagttgtcacttgtcagtcgagaaataaacctttcccagagttgtattacccgtctcaccacatgaatggatgctcacattttctggatttagatacagcgtcccatcttgtttttatgttattcgtgctatgtttcacaaagcaataccagaatcatactgacctcgatgtgtattttgcggcgaaagattggaaatactgttacaagtgtgtct

SEQ ID NO: 58559 - DNA, 227 bp, Zea mays
  Clone ID: MRT4577_153400C.1
gtttttgtttttttttttgttttttttgtttttttggtttttgttttttgttggttttgtttttgttttttttttttttgttttgtgatacttcaagtaaatgattgttagggaaaatctttacagcacatgacgccgagacacattacgtggcttaaaggcgcgcgctggcgcgcgcgagggactagggcaggtgcacacacggccaggccgagcgacgtgatcga

SEQ ID NO: 58560 - DNA, 245 bp, Zea mays
  unsure (1)..(245): unsure at all n locations
  Clone ID: MRT4577_153401C.1
aatnctnntacttttncacaccccctcctcncccaatccgggggggggggaggtaatccgcctnctccttatgcttcctcaattgatggtggtggggtcactgtcccttttccatttttnatacgtatacttccatctccttttatgattctggcaacgcccgcggggagggggattacgttttgggctctgttcctcttccgggggggggactctntgntgttggtttttttgttgcggctatt

SEQ ID NO: 58561 - DNA, 248 bp, Zea mays
  Clone ID: MRT4577_153402C.1
gctcacctcgcagtacggtccggaatccgggtcaccacgcgtccgcacgcgactcaagtcgctcaccgcggcgttccacgcctagggcgtccagtgcgtcgccgacgtcgtgatcaaccaccgctgcgccgactacaaggacggccgcggcatctactgcgtcttcgagggcggtacgccgagcagccgtctcgactgtggccccgacatgatcttcagtgacgttacgcttgactcttacgggcgtg

SEQ ID NO: 58562 - DNA, 110 bp, Zea mays
  unsure (1)..(110): unsure at all n locations
  Clone ID: MRT4577_153403C.1
atgcccgccgacnttatccntccgnatcggcggagtccgttttccctctcnacaaggcggtgatggtgcccaantgcggtacatccgccgggccgtngatgcgtggcgac

SEQ ID NO: 58563 - DNA, 208 bp, Zea mays
  Clone ID: MRT4577_153404C.1
tgactagttctagatcgcgagctgccgcccttttttttttttaggttggttttttccccttttccttctttcagacaccttgctagcacatcccatatctaaaagccgggatcatttttggtttaggtctcataatataaggcacatctcactacacacgtttatcgatgcagtgatatatagggattaaatacatcttttggttctt

SEQ ID NO: 58564 - DNA, 750 bp, Zea mays
  Clone ID: MRT4577_153405C.1
gggttgtgtttggattctttgcgctatgctcgcaccctccccccatatcccgcccctcaagtgtcgtcggctgcggttcctcccccaacttcttctgcgctacgtgctctgccctctcccccctggggtttctgcgctcggaatccagaaagggaggccttcctggtagcttttggtgactccagtgagactcagatttgtctctgctagaatcttgcaatgacaatttttgacgacgatgatgatgcggagccacaactgaaggtcgttgacaactactattttgagaaagccaagaacgagtttgtttgtttcagcaccttgccccttaagtttgatgagaatgataaagtctccgggaagggtatctacttgcgtcgatatcccgcagatggcgcccctgcagtatacaagcaggttgtagcttggacagtagcacttaaccgtgagcagccaaagatctcagtgctttcaagtgagggctattggatagaattggatctattgaaaccacggaaaatctattggaagtttgctcgatcagcattaacgacagttcaaatgctccactttgtcaaaaggcaacccagaaaactgatgataagtctttctgttcacctccgtgaagtattcagtaaatttgaaacggaagagatggaggatgctttagggaaacaccatcacataatcaagcgatgtgcagagagggatcctgctttaatgaggtcaaagattctgcaaagctttatc

SEQ ID NO: 58565 - DNA, 4047 bp, Zea mays
  Clone ID: MRT4577_153406C.1
atggcggagagagaagagatacgccaggagagaagggcgcaacagcagctacaacaacaatttcagcaacagcagcaacaacaacaagtaccatttcctccaccaccaccaccagttccacctcgtgataagcaccaggaatttatgagccataagccaccgaccttcgccagttcgccagatccacttgatgcagatgattggttgaagtcaattgagaagatgctcaacattgcccaatgctcagacagggagaaagttctttatgcctcaggtcgtctgatagatcctgctgctgactggtgggattcttatactgctgcccatgatgctgctgatactattacttgggtggagttcagtacacagttcagaaactatcacattccagctggtttgatgaagatcaagaagaaggagtttctgtcattgaagcaaggcaacatgtctgtcagcgagtacagagataaattcattcagctgtcgagatatgctctggacgagaggcttctggataaggctcttgctattgaacacaagcgtgttcaactgggtgatttgaagaggaaggctatctcacagggacagggtagcagcagtgtttgtccccgctacgttccaccacagggtacaccgactcgattaggagggccacacccagttcagtatgctccacaggcgtctccacggacacctcctactcgtcaggctactcccaatggtaccccgacgaggcccacaggacagaagaccgaccctacatgcttcaagtgcagtcagattgggcactatgctaatgcttgtccgatgggaaattctggtacaccagctaagaacaagcaacagactcctggcaagggatattctatagccagggtgaatcaagtcagcgttgatgctactcctgacggtgcggacatcgtacttggtatgttttatgttaatgcaattcctgcaaccatattgtttaattctggtgctacacattcattcatgtctactcgttatgccaacacaaatgagataccactgctaaatatgagaaaaccaatgatagtaatcacacctaaagggcctattgaggcaaatcaaatgacacgtagattgacattaacaattatgggaagagaatttggagctactgctataatattagaggccagcagtatagatctgattcttggtatgtcatggttaaggaaggcaaaggccattatagcatgtggtaggggtactatagaactcactagccctaaaggagaaacgtttcaagttcaatttgcagtaaccacctcttccaagcgggctatatactttatacctgaggagtttgttggtgacaacatccgtgtggttacatattttccggatgtctttccagaggagttaccagggatgccaccagatagggaagttgagtttgtgattgatcttctacctggaactgcccctatatctaagcgaccatacaagatgtctgtagaagagttaaaggaactgaagaagcagttaacagagttacaagaggctggatacattcatctgagttcctcaccttggggagcaccagtgctatttgtacagaagaaggatggatcgcaacggatgtgtgtggattatagatcacttaatgatgttactgtgaagaacaagtatccattaccccgtattgaggatttgtttgatcagatgagaggtgctagggtattctcgaagattgatctcctatcgggataccatcagatgaagattagaccatcagatattcctaagacggctttctcaacccgatatggattatatgagttcactgttatgtcttttgggttaaccgatgcaccagcttattttatgaatttgatgaataaggtgtttatggaatatttggacagattcgtcgtggtgttcatcgacgatattcttatctattctaagagtgaaagtgatcatgaagaacatctaaggttggtgctacagaagctacgagataaccaactctacgctaagtttagcaagtgcgagttctggattgacaaggtgccattccttggacatatcatttctaatggaggaatagcagtggatcctgttaaagtgaaggagataatggaatggagcgtgcccactactgttacggagattcagagtttcttggggcttgcgggatattatcggagatttattgaaggattctctaagattgccaagcctatgacctcgcttctggagaagggcagagaatttaagtgggacgagaaatgtcaagacaactttgatcaattgaagaagagattgatggcaccaccagtgttgattatgccagatctgcagaaaggatttgacatttattgtgatgcatgtggacaaggattgggatgtgtgcttatgcaagaaggacacgtgattgcctatgcgtctcgtcagttgcggaaacatgaattgaactaccccactcatgacttagaactggcagccgtggtgcatgcactgaagatttggagacactacattatgggaactaagtgtcaagtgtacatggatcataagagtttgaagtacatattcactcagaaggatctcaaccttaggcaacgccgttggttggagctcattaaggattatgatttggagattcactatcacccaggcaaggcgaatttggttacagatgccttgagtcggaaggagcatggagtcaccattgaattggagcctaccttggagcaagaaattcgtaaaggccaagtgggtgatgctaaaattcaagagattaaggatctgattatggaaggtcgagtgccagatttcacggaggatgagcaaggtactatatggttcaatgatcggatatgtgttccagagattgatagccttcgtgagactattttaaaagaagcccatgattctgattactctatccaccctggtagcactaagatgtatcaggatttaaagcaaaagtattggtggtatggattgaaaagagatgtggctgctcatgtggctaagtgtgatgtgtgtcaaagagtcaaggccgaacatcaaagtcccgctggactattgcacccattgaagatacccgagtggaaatgggaagaaattggtatggatttcattgttggactaccccgcaccccagtaggatatgactctatttgggtgattgtggacagattgacaaaagtggctcatttcatacctgtgaggactaattacacgggagccaagctagtagaattgtatatgactcggatagtttgcctacatggagttcctaagaagatcgtgtctgatcgaggatcacagtttacttctcggttttggaagaagttgcatgagagcttggatacaaggttgaattttagttcagcctaccatcctcagactgatgggcagaccgagaggacaaatcaagtactagaggatatgttaagagcttgtgctcttaaacatggtggaagttgggataagagcttaccatatgcagagttctcttataataatagctaccaggccagtttgaagatgtcaccgtttgaggctctatatggcagaaaatgcaggacaccactacaaaagagctatgctgataataggagaagactactggagtttaaggagggtgatcacgtgtatctgaaggtgtcaccaatccagggtatgaggagatttaaagtcaaaggaaagttgtcccctcgcttcattggacctttcttgatcttaaagcgagtgggagaagttgcatatcagctagaactactcgatcacctatcaaatgtacatgatgtattctatgtatctcaactgaagaaatgtctcacggtacctgaggagcagctaccaatggaggaccttagtgttcaagatgatctgacttatgctgagtaccctatcaagattctggacactctgactcgagttacaagaaataaggtgataaagatgtgcaaagtacaatggagtcaccacggagaggatgaagctacttgggaaagggaagaagaccttcgcatagattttccccatcttttccctagaccttcctaa

SEQ ID NO: 58566 - DNA, 293 bp, Zea mays
  Clone ID: MRT4577_153407C.1
tctgactctttagcaaacccattatcaaactactttttattcttaaaaattaccctcagggggctttcctattttaagaaggagtgcatcatacatattttttatacctcttacaactattcctacaaaatctcatttcatcactatttccaaattactccattaccataccacaatccttacttcaactatcattgcactctcttaactactctcaacatttgcttaaaaacaaatacaaaccttatcattaaactaatcaacctttcaccatttcatcctttctccaatac

SEQ ID NO: 58567 - DNA, 290 bp, Zea mays
  Clone ID: MRT4577_153408C.1
ggacgctgggcggacacgtgggagcggagaaacgcccaacccaacccggcggtcctcctacaaagcgccctcctgccccgcaaaaaggctgtccttttttctagcaccaccaccctacacagcacaaggcctatgccctcgctcctaacctacactctcatccccctagatatcgtgccatcaacaccctagttgttacaccattcccgcaatcatctcccgatgtcgttatgaggagacagtgacctccgtcccatagcaactggaggggggcgtcctcctggcgggta

SEQ ID NO: 58568 - DNA, 291 bp, Zea mays
  Clone ID: MRT4577_153409C.1
gggacaaaaaacttttcatttttataatttaaaaacccgtcccagattaaaagcaacccgggagacgaaaacagagagcccgcaaagcaagcccaaggacattgaggggctgctttgttagcgaaatacgtgctacgggattttccgttcgagggacaccaccaccaccacgggggggacacttaacaaagggatcactaggggggggggggcatgatctacttttttattttgggccaatttgatgcttgaaacacactttgcttggaaatttttttttaaaaaacaact

SEQ ID NO: 58569 - DNA, 224 bp, Zea mays
  Clone ID: MRT4577_15340C.1
gtgcctgcacgcccacgctagaggctcatctcggtgaattccgcttccacgataggcctgataagaggacgcagaactgctcatcttttattagcatttatgtgttcttatattaggactatgctgaagccgaaggacacgagagcggaactcctcagggaattccaattccacgttatgccgaaatagagaacgcaaaaatgctcatctatgaattgcattta

SEQ ID NO: 58570 - DNA, 252 bp, Zea mays
  Clone ID: MRT4577_153410C.1
attatatacttttattcactggccaagccattgcgttaattgttgttccccaaggtttgacataaaagggcctccggcacacggaaccatcagctggggagctgaaacctgtagatgtcatggcacgactactacggcagcagggggcaaagccgaaaggagaaggcgtaccgcgttggaggtagcatgtactgttcgtgcacccacggggaccagctgtcaatgccgcccacccccatgtgcctgtggtca

SEQ ID NO: 58571 - DNA, 528 bp, Zea mays
  Clone ID: MRT4577_153411C.1
actcttttaatcatcttttttttttcttcttactggcgttttcttcctttattctttttcatctttttttcttacctcttcatcctttccatatgccaattattattccacgaataatcccaccgatgacaataatgcctttgcctaatataatgccaacaataaaaaaaccgactatcatcacaccaataacaatagctagtatgatgcctccaaccacaataccaacacataatttaccagtgttgatccctaaaaaatgcctttatccaagacacccaaaataataccacccgataataattcctaatttaataccaccaaaaataatgcccatcatgatgccatgaatgattatcccaaacatcattacaaagccacaattttactccaattccatctctcacataatacaacaacatcaattaccattcatgttcaaacccacacccatggcgatctcacccaaaattttacagcagccctatgttcgcacctcattctagatataaacattaatgttgaacc

SEQ ID NO: 58572 - DNA, 924 bp, Zea mays
  Clone ID: MRT4577_153412C.1
atggacaagagtgttgctcaagaagaatccagcagtgaaggatatgaaacgcctagcgacccttttcctaccactaggatagatagggccgctacgcgtgagttgctacgtgaccctacttatgatccacaagaccatgaggaggtcttgtctcaatttcgtgcgatgctcgaaaaagctgcggcacgataccaagacgcaccggaaccgacccaagacgcaccggaaccgatccaaggcgcaccggaacccacccaaggcgcaccggaatcgaccgagataaccaccgagaggtcaaggaaaaggaagcagagcgatcggaacagaggtgacagggggctaaacaagtttcctgacaagacatataaaatcacagacgtgagcctgaatggtcagcccctagctccagaagaggcactgcctaagttccggaatgcacttgggttcttagttagagataatcttgacatcacaatccgacagtggagagatgtatcagatgatgtcaagaatcaaatgtggaataagctaataacaaggtctgagatgaatacaaagtttgcaaagaaaggcctagacccgacgaaaaaatataaaatctcagcaggtcagtgggcagtatttctaaagcagaggagcagccctgatttcatatcgctaagtgagtcaaattcggaactgtctaagaagaacaaataccaccaccaccttggcacaggtggttacaagcgtcaggttcctaaatggagacaagaagacgccgtgaagaaggctgcaggattgccgacgctttccgagcaacttggtgaaaggacagctaattggatccgtgctaaaaaaccaagggaaactgagtctggtatatcttttgatgatcccactgtcgaagaagcggcaaaaaaacatatatgcaattgcagctaa

SEQ ID NO: 58573 - DNA, 2643 bp, Zea mays
  Clone ID: MRT4577_153413C.1
atggcagcggaacctgagaggagtaacggttggggccaccgctcaatgagttctccaaccaaggaacaaggattagggcccgaccacatggacaagagtgttgctcaagaagaatccagcagtgaaggatatgaaacgcctagcgaaccttttcctatcactaggatagatagggccgctgcgcgtgagttgcaacgtgaccctacttatgatccacaagaccatgaggaggtcttgtctcaatttcgtgcgatgctcgaaaaagctgcggcacgataccaagacgcaccggaaccgatccaagacgcaccggaaccgacccaaggcgcaccggaaccgacccaaggcgcaccggaatcgaccgagacaaccaccgagaggtcaaggaaaaggaagcagagcgatcggaacagaggtgacagggggctaaacaagtttcctgacaagacatataaaatcacagacgtgagcccgaatggtcagcccctagctctagaagaggcactgcctaagttccggaatgcacttgagttcttagttagagataatcttgacatcacaatccgacagtggagagatgtatcagataatgtcaagaatcaaatgtggaataagctaataacgaggttcattttgcctgggggtttagaagaactcgtgaaaaaatacacgatgaagcagtttgcaatcaatttccgaaactggaggtctgagatgaatacaaagtttgcaaagaaaggcctagacccgacgaaaaaatataaaatctcagcaggtcagtgggcagtatttctagagcagaggagcagccctgatttcatatcgctaagtgaggcaaatttggaactatctaagaagaacaaataccgccaccaccttggcacaggtggttacaagcgtcaggttcctaaatggagacaagaagacgccgagaagaaggctgcagggttgtcgacgctgtccgagcaacttggtgaaaggacagctaattggatccgtggtagaaaaccaagggaaactgagtctggtgtatcttttgatgatcccactgtcgaagaagcggcaaaaaacatatatgcaattgcagctaagcagagccaaggaacatttaagccgcaaagggagagagacattctaacggctggtctcggtaaccctgagcatcctggtcgtgtacgaggaatctcatctaaggaaggatggaaggaaggattcagaccacaatgggaagcagctcaaacgtcggcttccattgagggtacgaccatcccaagctctgtcgcgtcaacgggaaataagctccgctatccagttgatgacatcacaaggcctgtggagtgcacactagttataagatatggtattaacaatcagcgtacaaagaaagtagccacaggccttgcgatcccaggacgcaagttacatggaaacgacattccagaagaatattgcagggtagaagtgacgacagtcgtccaaggatacgaggacgaaatgctagacatccctgggcccgaagggagtggacggagcctcacgtcagacactgttgatttggccgatctcgaggagtccgcaaaaaaggctgaggcaatggccgcaaagataaagaagccaactaaggcagattataaaaacatgcctaaaaaatatgtgccgggcagaccactactcacttttgagaaactaaggaaggtcccggctaatattaaaaggttgcatgattggtacatgcgggcatcttcagttggcatcgacaccatcagtgttaatataccagcccatgcttttattggttcaaatcaaaaagtcgttgttgcattcgaggacatgtggttaatgatgaaccttcagagactcgacgtgcaacttgtaaccatatttgcattaatgcaacatgatcagcaggagatcctttatggtaccaatcccaatgctagtgccagtaaaagggttgggtatctcaacccaataaagatatgcgaggataaccacacttttagaatcggaaaaggcaacaaagcattacaggggctaatagacgaagaaattgaggtgcgtatccaggatctgaagaaggattttgaagcaagatacaccacctacataggacacgcaatacttcaatttcaagacagggaatccatagtggccccgtacaactttaaggaccactggatatgcttcttcatttatcctaaggttggaaaggtgctggtgctcgactccttgcacaccgagccttcggcctattcaaaattcctcagcatcttagagctggcatttaggttttataagttacaaggtggaaagtacgacacgtccaaaaaaagcgtgccactagacatccattataactggccgtgccacaagcaaccacccggatcggtcctatgtgggttctacgtgtgcgagttcatgagaatgaacggacgatacatcacgaaccctggcaaggtttggtggtttggacctggaaaccacacagcgctacggatggcgggttttgctgagtttgggcctcaaaactcagcggcagaggttttagagggaactggtggtgacacgtggcgtgatcgcggagggtgcgtaaaggcgaagcgactccatgtgaaggatgtggccctcgaatcgaaaacctag

SEQ ID NO: 58574 - DNA, 2811 bp, Zea mays
  Clone ID: MRT4577_153414C.1
atggacaagagtgttgctcaagaagaatccagcagtgaaggatatgaaacgcctagcgacccttttcctaccactaggatagatagggccgctgcgcgtgagttgcaacgtgaccctacttatgatccacaagaacatgaggaggtcttgtctcaatttcgtgcgatgctcgaaaaagctgcggcacgataccaagacgcaccggaaccgatccaaggcgcaccggaaccgacccaaggcgcaccggaatcgaccgagacaaccaccgagaggtcaaggaaaaggaagcagagcgatcagaacagaggtgacagggggctaaacaagtttcctgacaaaacatataaaatcacagacgtgagcccgaatggtcagcccctagctccagaagaggcactgcctaagttccggaatgcacttgggttcttagttagagataatcttgacatcacaatccgacagtggagagatgtatcagatgatgtcaagaatcaaatgtggaataagctagtaacgaggtttgttttgcctgggggttcagaagaactcgtgaaaaaatacacgatgaagcagtttgcaatcaatttccgaaactggaggtctaagatgaatacaaagtttgcaaagaaaggcctagacccgatgaaaaaatataaaatctcagcaggtcagtgggcagtatttctagagcagaggagcagccctgatttcatatcgctaagtgaggcaaattcagaagtgtctaagaagaacaaatatcgccaccaccttggcataggtggttacaagcgtcaggttcctaaatggagacaagaagacgccgagaagaaggttgcagggttgccgacgctgtccgagcaacttggtgaaaggacagctaattggatccatgctagaaaaccaagggaaactgagtatggaatctcatctaaggaaggatggaaggaaggattcggaccacaatgggaaggtctgtacaagaaacgtgatcgatacaaggaagagatggcaaattattttaaggaggagaccaagaaagagttcaaaggcctgatgtctgaaatgctatcgaatcctcctccagaattgatgcagcaattggcgatggcgagtgcgatgtctgttcaacagatgaccactccacatatgcaaataattccagcagctcaaacgccggctgccaccgagggtacgaccatcccaagctctgtcgcgtcaacgaggaataaggtccgctatccagttgatgacatcacaaggcctgtgtcatgcacactagttataagatatggtattaacaatcagcgtacaaagaaagtagccacaggccttgcgatcccaggacgcaagttccatggaaacgacattccagaagaatattgcagggtagaagtgacgacagtcgtccaaggatacgaggacgacatgctagacatccctgggcccaaaggtatcgagacacttggacaagctatcaagaattttatcctttggcctcgaagggatgtcgaattggttgattggtcgaattcgtcgcaggcccaaccgtcttcgccttctcaaattgttgttcctattgtacatccatcatcacctcctcaaacttcacatgctgctcctcatcctctttctgaccctccttctcctcatcctcatggtggcccaccgtctccgccacatacatcgcccttcagggatccaccttctccacagccatctccacgaccatcaaagaaatctaaagtttctataccaaaattagtgtccccgttcgataagaaaaagaagagtaaatccactgctggcactgttcgttttttgaaagggattggacggagcctcatgtcagacactgttgatttggccgatctcgaggagtccgcaaaaaaggctgaggcaatggccgcaaagataaagaagccaactaaggcagattataaaaacgtgcctaaaaaatatgtgccgggcagaccactactcacttttgagaaactaaggaaggtcccggctaatattaaaaggttgcatgattggtacatgcgggcatcttcagttggcatcgacaccatcagtgttaatataccagcccatgcttttattggttcaaatcaaaaggtcgttgttacattcgaggacatgtggttaatgatgaaccttcaaagactcgacgtgcaacttgtaaccatatttgcattaatgcaacatgatcagcaggagatcctttatggtaccaatcccaatgctagtgccagtaaaagggttgggtatctcaacccaataaagatatgcgaggataaccacacttttagaatcggaaaaggcaacgaagcattacaggggctaacagacgaagaaattgaggtgcgtatccaggatctgaagaaggattttgaagcaagatacgccacctacataggacacgcaatgcttcaatttcaagacagggaatccatagtggccccgcacaactttaaggaccactggatacgcttcttcatttatcctaaggttggaaaggtgctggtgctcgactccttgcacaccgagccttcgacctattcaaaattcctcagcatcttagagctggcatttatgttttataagctacatggtggaaagtacgacacatccaaaaaaggcgtgccactagacatccattataattggctgcaaccacccggatcggtcctatgtgggttctacgtgtgcgagttcatgagaatgaacggacgatacatcacgaaccctggcaagtggaaatggcgatttccactggcccctagcactggcggcactgaaaagcgccagtga

SEQ ID NO: 58575 - DNA, 342 bp, Zea mays
  Clone ID: MRT4577_153415C.1
gacacgcaaacgcaatcaaaactcttgtcattctacgcaccataacgagtcaccaacttgcctgttatgccacatcagagaatcacagtccactcatacaccaacgaaaggctcaaaccacaactccagactctcaggtgccgtttacacaaaaagcttcaacgccacgccattgcaaacaatgaaaaaagtctattacgtgctgtgccaccgctccgtgactctttaatcccacaatccccaacgatgcaatagaccttgaacctcaagatagattttcaacccctataacacaaatcggtatcttattgtatttgctaacaacgaatcaccggatatctg

SEQ ID NO: 58576 - DNA, 109 bp, Zea mays
  Clone ID: MRT4577_153416C.1
gatctcatgtttcatggaaaagccagctaaagaaggtcttcgagcttagtagaggcgatccagaaagccaagaccgtagaagagtctataataatggcaaagccagatt

SEQ ID NO: 58577 - DNA, 263 bp, Zea mays
  Clone ID: MRT4577_153417C.1
gtggtttgtggacgagagggctgtgagcatcctggcaggtgccccaggatgccacgcctggacgggccggcttctgcctggggtgcatttcccccgcagtgcataccggacttgtcacacggacctcgggctacttaaggtgtgcaaagatctctagagtttagtccttactgtctcactcgttctgttacccagggttctgcagcacttcacctgaaacctccattccatatcggcatcactcatggaacactcatgtctgg

SEQ ID NO: 58578 - DNA, 267 bp, Zea mays
  Clone ID: MRT4577_153418C.1
agcactcttttcctcaatcttgattaaatataaattccgtcgaacctaccacaaatcacacataccaccatcataaacaaccgccaaaatgtccgttaaagacgattccttcccctcaagcgccgcctttgacgccatcagtgccgccctccagaacgaagcagaccgcaaggacgccatcaaacaaggcgccggcctctatgccttcacactcaagaaagatggcaaggaggcatcatggcacattgacctgaaggaaaaggaact

SEQ ID NO: 58579 - DNA, 262 bp, Zea mays
  unsure (1)..(262): unsure at all n locations
  Clone ID: MRT4577_153419C.1
gntcgtcctcatggcgccgccgaagccgaagtcgggaantcatggagaacatcaacaggggggatgtattaaccaagcgcgagctgcctatgcgcccgtcccacgagggaggggaaagcaacaaaaagggtgtccatggacaggggccttatcagagaagttgctggctttgctccgtatgaaaagcgtatcaccgagcttttgaaggttggcaaggacaagcgctctctgaagcttgccaagagaaagcatggaactcaca

SEQ ID NO: 58580 - DNA, 400 bp, Zea mays
  Clone ID: MRT4577_15341C.1
atggctactaccctcaagtttatattggcgacggaaacacctggtcactgggggggtgtgtcaagaggcttatgctctacgaggcgcctgcagcggaggacggagacagtgatgaggagcaaggacagctccccaagcgtggggccatcgtcttactctgcttatgcacatttatacactgcaacatggaccgcgtaaatatgagcaatgctaaacagcctatgtccgcacaggttggatggaacccacagactgacggtatcatccagtcatcttccttgtggggctaccttctaactcagatagcttgagggatatgggcagatactgttggacgaaagactgacctgggatttggtgtggcttggcgggccatagctacagctactacttctgttgc

SEQ ID NO: 58581 - DNA, 224 bp, Zea mays
  Clone ID: MRT4577_153420C.1
atacatagtgaagtacactagcaacattttagcaccaatgggagccaagatttgtgccctccttgccctccttgctctttcagcaagcgctgctacctcgactttaattccacaaggctaacaaaattacctctttccggcaccagccgtgggttttaattcccaaccattccattccacatgggtcaagaagcccttccagcaagccttttaccgtcctttac

SEQ ID NO: 58582 - DNA, 133 bp, Zea mays
  Clone ID: MRT4577_153421C.1
gtcttacgcgcttttttttttttgtgaacttagattttattgaaactgcctaaacgttgaaccgattgttgtcatataacatgttgcctatgttggagaaagatatatcaagactacttgaagcagatcattg

SEQ ID NO: 58583 - DNA, 493 bp, Zea mays
  Clone ID: MRT4577_153422C.1
ggcaagaccagcaagattttcttttccattaaaatcagttttggcaaaccacatttccacgggggccgacccccccttgttagaattttgaggggttgaaaaaaaagggtttttttttttttttggggctcccaccacaaaatcacctgggtaggttttgggcaaacaccacctttctttttttgggaccgtccaaacattttaacaaaaggcagcagcgagcttttttttctccacaagaaaacatccccatccttttccttttttaggagggctccactggggccctgaacttttcttcggggtaaaccgggggattaccgagctttttcttgatccttaacaatttgttttttttggccaggcccttaaaccgggaaggggctccccttttgatttggcccctaaacaggcccacttagagggcagcaatgaaggggtcctttgtcttcccactcctgtgggttggcataacttcccattcggggcgctt

SEQ ID NO: 58584 - DNA, 410 bp, Zea mays
  Clone ID: MRT4577_153423C.1
ccacgcgttttgttcggaatgctttctaagtacatattaattcaatatcaagcgttacaccgtgtaaaaaaaaaaaaaaaaaaacaaaaaaaaaaaaaaaaaaaaaaaaaaaaaaaaaaaaaaaaaaaaaaaaaaaaaaaaaaaaaaaaaaaaaaggggggccgttttaaaggaacacaagtttacatacacataaatgggagggcattttttttttataggggaacttaaatccaattaattggccgtctttttacaacgttgggactggaaaaaccctgtggttgcccaacttaataaccttgcagaaaatgccaatttcgccagttggccaaataaaaaaaaggcccgaacaaatcgtttttccaaaaagttgtacaacctaaatggcaaatggaacccgcctttta

SEQ ID NO: 58585 - DNA, 185 bp, Zea mays
  Clone ID: MRT4577_153424C.1
ctttaatggcaagcctttcacggatacttttaggagggatctcaagaacagggggctcgagattggcgatatgcctaaaccacacaacatactgactgttgaaagtgttcactccaatgggctgctccctcacgacacaggtagtatctatgacgatcagcatgtcctggaacatggcaaacccc

SEQ ID NO: 58586 - DNA, 2698 bp, Zea mays
  Clone ID: MRT4577_153425C.1
gccggccgggtctggactccgttgcgcttccccttccattcctcttctctcccccggccttttccccttctcttccctcgttcgaagaagctcgcagcagccgcctaatccagcggcagttgaggatggcggcggcgccgccgccgccgccggacgggcaggagaaggtgatcgcggcggcgcagcacatcgtcaagtcgctcgcgaactccaagaacgccgccgacgacatgatccgcatcctctctcgcttcgacaaccgcttctcgctcatgtccgacctcttccctcctccccctaccgccgtcgattccatactggaggcggacgaggggacctctcagggggaaggggacgagcccgatctcgaccccgaaggcgacgcggcggcccgcgccgaggcggagtgggacgcggcggccgaggtggttgagcgctgggagtcccccaccgccgacgcgctggtgttcgactcgcgggagggcgaggagtacctcgccgcggccgcctgcctcacgggcgcgccgggcccgcgcgccgaggccgcgctgcagaccgccatggcgcggctcgaggacgagttccgccacctgctcatccgcggcgcgccgccacttgccgcggaggacctccaggtctcgctcctccgccgactctcgctcacggtaccctccttcaactcctccgccgtagacctagactgcccctcctttgcccaacaccacgccgccgtcgccgccgagggggtaaacgagcagcagggcggcaggagttccgcctccgacgacgagatctcgccctacctcatcgccccggacaccgtcagcgtcctcagggacatcgccgacgtcatgctgcgcgccggctacgcgcccgagctgtgccaggtatacggggaggtgcgccgggacacgctcatggaatgccttgccgtgctcggggtcgacaagatgagcctcgaggaggtgcagcgggtggagtggggcgtgcttgacggcaagatgaggaagtggatccaggcgctcaaggtcgtcgtccggggcctccttgctgaggagcgccgtatctgcaggcagatcctttcgccggacatgaacactgaggaggagtgcttcactcaggcggccaagggttgtgtcctgcagatgctgaactttggtgacgccattgcgattgggaagaggtccaccgagaagctgttccgcatccttggtatgtatgaggcgctcgctgaggtgctgccagagcttgagggtttgttctcgggtgatgcaaagaatttcatcaaggaggaggccgagggaatactcttgcggcttggggatgcagtgtgtggcacgatcgaagagtttgctaatgacatacagggagatacttctcggagagcactgcctggtggggagatccatccccttacccgctatgtcatgaactatgtgtggctgcttgcagactacaatgcctcgctaaataagcttctggaatgttgggatactgagctgaccggggttgataatccaaacatgactccattggggcactgcgtgctcatgctgatcacacacctacagtgcaagatcaatgagaaatcgaggctgtatgaggatgaagcgttgcagaacatatttttgatgaataatctgctgtatattgtgcagaaggtgaaagattcagagctcaagacattgcttggtgataactggattcgcaagcgtcgtggtcagattaggcaatactctacagggtatcttcgatcatcatggactagggtgttagcttgcctgagagatgatgggcttccgcacacgatgggttcatcaagcacactcaaagccgcattgaaggatagattcaaaaactttaacttggccttcgaggagttgcacaggacacagacatcatggagggttgtggatcctcagttaagagaagagctgaagatctcaatctccgagaaggttcttccagcataccgttcatttgttggaagatttcggggacaactagagggagggaggggttctgcaagatatataaagtacaaccctgatgatttggagaaccatgtctcagaattttttgaagggagaaagtcaaatgcttgatggtcaaggcatgttcatatcaactatgcagcctgaagacccgtgcaaattttgatgatgctagttccaagtccccttccaaatttcttggcactatacagggaacttgaccttcaaacatcttttgaaggtctgaagatggaaatataatcttctcctgaactgacagaaactttgtgaattgcaaagcaacccgaattgaatggtttagcttgtcattcttgatcctgtcacagcgagtggtgacgtcattgaggcttgcccatggaattatgacaactgcatctgccatgagctgtgtaattgcaattcttacattttacctgtcttttgtcaatggtaacatctcgtgactcttgtttgactaaaatggaatttcggtccctggaatttttatgtacaatcctaccaggagttatgttcacatttaccttgttgcatccttttttatagtgtgttgcagccttctgttatattcattcgttgatgatagacaaagcgcatagttgatgcgacatgctgttggtcccgtttccttgtcaacctctaatgaaaaattgcatttccaaaaaaaaaaaaaaaaaaggccccta

SEQ ID NO: 58587 - DNA, 1037 bp, Zea mays
  Clone ID: MRT4577_153426C.1
ctgctgtatattgtgcagaaggtgaaagattcagagctcaagacattgcttggtgataactggattcgcaagcgtcgtggtcagattaggcaatactctacagggtatcttcgatcatcatggactagggtgttagcttgcctgagagatgatgggcttccgcacacgatgggttcatcaagcacactcaaagccgcattgaaggatagattcaaaaactttaacttggccttcgaggagttgcacaggacacagacatcatggagggttgtggatcctcagttaagagaagagctgaagatctcaatctccgagaaggttcttccagcataccgttcatttgttggaagatttcggggacaactagagggagggaggggttctgcaagatatataaagtacaaccctgatgatttggagaaccatgtctcagaattttttgaagggagaaagtcaaatgcttgatggtcaaggtgagtgctaactcccaggctgtgtttccatacataactcagatgtattattggaaggcatgttcatatcaactatgcagcctgaagacccgtgcaaattttgatgatgctagttccaagtccccttccaaatttcttggcactatacagggaacttgaccttcaaacatcttttgaaggtctgaagatggaaatataatcttctcctgaactgacagaaactttgtgaattgcaaagcaacccgaattgaatggtttagcttgtcattcttgatcctgtcacagcgagtggtgacgtcattgaggcttgcccatggaattatgacaactgcatctgccatgagctgtgtaattgcaattcttacattttacctgttttttgtcaatggtaacatctcgtgactcttgtttgactaaaatggaatttcggtccctggaatttttatgtacaatcctaccaggagtcatgttcacatttaccttgttgcaacctttcgtatagtgcgttgcagcctcctgttatattcatttgttaatgacaacaaatggtcccgttgtcttgtt

SEQ ID NO: 58588 - DNA, 263 bp, Zea mays
  Clone ID: MRT4577_153427C.1
ttaaagaaaaaaaacaaattaaggggtttaaacaattaaccagcaggaaacaaaaaccaccacttttgcaaaaacatgggtaattttaggggaaaacgccaactcataatttcgacttgcctatgcaatggaacgggaaaaaaaagacacacatgcatgtggcagcatgaataaatcgacgttccatcacaccttacgatcaggaagaaaaatgaggggcgtagtctagcacagatgcgaaaggtgggtggcataggccacaa

SEQ ID NO: 58589 - DNA, 215 bp, Zea mays
  Clone ID: MRT4577_153428C.1
cctcgagccggccgggatttatcagcaacaaaacaaagctgcgtcatgtccgccttttgtgtgggtctgctcacttcaacacatgctagtcggatcactgtccgctccgaaccggcgaccatctagccaggaaacaggagatagtttccatggggcgaagcgaatgctgccaagctgcctgagacacggtctctgcaacgaagacggctcgctta

SEQ ID NO: 58590 - DNA, 805 bp, Zea mays
  unsure (1)..(805): unsure at all n locations
  Clone ID: MRT4577_153429C.1
acgaccatnnnnnaggacccgacagagaggccaaacccaacccaaagcccaagccgaagaggaaaggataggagacggatagggtacccgcgatgaggcccgccgccgccgccagtaccggcgggttccatctcgtgctccccgcggcgcacaggctgcctcctagtcttcctagcatcagtagccgaagaggtgtaaggatacgagcggcggcggcagcaggcggtggcggcgcgctgctggggcgtcccatggaggacgtgtacaaggtgcgcgtggagcgaggcgaggtggcgcgggcacggatggaggcgctgcgggtcatggagacgtggtcgtcgtggcgcacgggtggccggtgccggatgccgtgggactggcaggtcgaccagctcgtgtacatcgtgtccggggaggtgaaggtcatccccgccggcgctgtccacggcgacgactacatgcacttcgtggccggggatctggtcaggtacccgcgctggttcgaggccgacctctacttcgacggcccgtacgaggagcgctaccggtttctcgcctacggagacgacaactagttagtacatctgcatttcaagcagctttgcctagaccctagagtatccatctaccggcaatgcatgcgttgtaatgttcctctgtaatgtattggtgtggcgtagtcaggcaccgaaataaaccaatcattccaatgtttgcgaattttattatataacttattagttcctccaaacttctaaattggctatgatacgcgtgcaagagaaataaactgtttcttaattcc

SEQ ID NO: 58591 - DNA, 1451 bp, Zea mays
  Clone ID: MRT4577_15342C.1
gattgggaccctcgggccggccgggactcatcgtcagtcagtcgtcacagtactcgatcgagcgcgatctgatctctttccgagcaatcatccgttctagcgtagtagagcgcatggacatggcctcgtcctctgcatcagcagctctcctcctggctgtctccctcgccgctctgcacttgtgctgccgccatgggcacggtgccggcgacgccgccggcaacggcatcactgccatctacagcctcggcgactccatcactgacaccgggaacctcgtcaaggaggcgcctccgggcatgttcgagaccatcaagcacctcccctacggcgtcacgttcgggtacccgaccgggcggtgctccgacggcctcctcatgatcgacttcctggctcaggacctgggtctcccgttcctgaacccgtacctgggcaagaacaagagcttcgaccacggcgtcaacttcgccgtcgccggagccaccgccgtggacccggccgaccagttcaacctccccgccgtccccgtgccgttcgcctccaagtccctcaaggtgcagctccggtggttcaaggacttcctcaagtacaccttcggcaccgatgaagagattcgcagacggcttcaagcttctctggttttggtcggggagatcggcgggaacgactacaactacgccttcttccaggccaagcctgtggccgaggtggagaagctcatcccaggggtcgtgaagaccatcgtcggcgccgccaaggaggtgctggacatgggcgccaccagggtcatcgtcccgggcaacttccccatcggctgcgtgccggggtacctggccatgaacgccgcctcgtcggagccggcggactacgactcggcggggtgcctccgggagctcaacgacttcgccgccaagcacaactcgcggctccggcgcgccgtcgccgacctgcaggcgtcgtacccgggcgccgccgtcgcctacgccgactacttcgactccttcctcaccctcctccacaacgcctcctcgttcggtttcgacgccgcgagcacgcgcaaggcctgctgcggcgccggcgccggcgagtacaacttcgactggcggcggatgtgcggcttcccggggacggcggcgtgcgctgacccgtccacgtacctgagctgggacggcatacacatgacgcaagcggcgtacagggccatgtccaggctcatctaccacggcaagtacctggagccacagatactgagcttcccggagaaaaacgggcagacataaactcacgtcttcatcatatatagaacttagttagaaaatatactcgaaacaccggctacaaataagctgtcagtagtcagttgtatcggcaagtacatgcgcgctgttcaactaatgctatcatcaagctgtgagccacactgatgggggtgtttggttctgtggactaag

SEQ ID NO: 58592 - DNA, 272 bp, Zea mays
  unsure (1)..(272): unsure at all n locations
  Clone ID: MRT4577_153430C.1
aataaaaaaccttttttaattaatataacaaanaaaaacaatgcgacattggcaattttttttttttttttttctcccccaccccccaaaaagcacaatttttttctttagaatcaaaccaaaaaaaaatcttacagggtagaaaatacactatactcccacagcataaactcgaataaagactgctgtagctaagcccgcactaaatacccatcaacactcactgaaaaactaaccctgaaccaaaaaccaacactgacttctaaaaaccc

SEQ ID NO: 58593 - DNA, 330 bp, Zea mays
  Clone ID: MRT4577_153431C.1
tttctggcgggggttcgcctccgaccacccggagctggcgtacggccagcataagtggcgccgttgaatggcacaggactggaagaaggggatttcatggaccgaggaggagctcaggatgtgtttggacgggatgaggaggttgcccaagggggactgaaacagcatgtacaagggcttcgacacgagcaggacagtaacgctggtggccagtgacgccgacaagtacttccttcggtagaccatcccgggtatgaagaagcgccaggggagcttatgcaacgttgggatgacagactacaaggacaaccagttgccaggccctaacag

SEQ ID NO: 58594 - DNA, 298 bp, Zea mays
  Clone ID: MRT4577_153432C.1
ggggggggcgattgcaaaagcctacattttcaaattccactcaacaggacatttaaaacagggcctcataaactactggcaaaaaaaagttgccctggaatggccccctttattttttcatttttttccccaacaaggtggtgccaaacttggttattttgcaagggaaaaaaacatgggctctcaaggggagaaaaaaccttttgcccaatgggcgacccccattggagcccccccaccctttttacccggggggggggggcctttataaaagggccccccaggaaaaaaacctttt

SEQ ID NO: 58595 - DNA, 559 bp, Zea mays
  Clone ID: MRT4577_153433C.1
cctcgaggccggccgggatttttcattttttacttccgatattccaaccaaaaaaatagctgtagtctgcaaatttgtccatttcccagtcacctgcctgtgcagagtaccccatgtgatggatgcatttgccaaatccattcattccttgcataacacacctctcacttcatctccatctccacctcatgatgctgctgacactgccactataatacaccagatatataaaggccacccatcaaactgcccattcactcataacagcaacagacagcctgctccgatgaaccacccagcatcttcctctgccctagcagctcttcaacgatatccttttacactttacacaccaatcaacatagaactgatctgcggagctctgagatcatcaagacactacttgtactggcacatccatccacttgacaccgtgacttcgatcagatatctatcactaaaacatcacgaacgagagtgcaaactccctaaccgtacattccatactgcattcctaagagggtggtgacaacgcggataatgagaaccaccaaggatg

SEQ ID NO: 58596 - DNA, 303 bp, Zea mays
  Clone ID: MRT4577_153434C.1
gccacgcttgcgctcactcgtgcgtggacgcgtgggttcgaggctgcccgccatggtgcgtcttgcttgcggtctgatccaatgacaccttccattggggcgcgaacacgctatcgagcgtctaagcaatcagctagctgagtcaccatgcgctcacgcgtaatcagtcttagacgcgttcagacataatccagctcacgatagctatgcgccactggattacaaaccaatcgcgatgtccagttgtgtgaatcatcaggtcctctcgtactaggttgaattactatggcggcccgtgtataa

SEQ ID NO: 58597 - DNA, 325 bp, Zea mays
  Clone ID: MRT4577_153435C.1
ttttgcttttctgtttccgcattgctcctagcgagcgggctaaccggaagctcctgtaggtagacggcagggttcaccatggctagttgactgagcgctggtataaactgtcgccgatgctgatgctgatggtctgcagctacgttcgctagagcaagtgggttggatgcatgcagccgctgttgcaagtcggcgacagggttcaccactgctatgtggctcaatggagacataaaatgctgccgttgttgcgctgccatgccttgcagggttagatgtgccaaccctcgtttcatgcaattgggcaatcggttgttggaaggct

SEQ ID NO: 58598 - DNA, 360 bp, Zea mays
  Clone ID: MRT4577_153436C.1
catccttcctccatcgcttaccggctctccgtgcattggaaataacgccttggcatttccttcaaatacaaaaggggggaaacacgctttctactccccgcccttatcctcagccgaaccgacatcgtgaactcccaccttcttgccttcttcacctcccccctagtctacaggcgtgtgcttctcaatgcctccggcccctccgctcgacgtgatcccaccacacggcatggatccatacaagcacctgccgtgtagctgaagcaactgcaccttctggaccacgaactcccgcgcatccagatggaacaacaactctgccctgaccgtcagacagggaggtccaatcctacttgagga

SEQ ID NO: 58599 - DNA, 240 bp, Zea mays
  Clone ID: MRT4577_153437C.1
gaatgagcaaacagtggggaaagcagcatgcaacaggcagacaagagcgaagaaaaaagacgtgcaagctaattgattcctgcattgctgaatcatggtttcctgttggctaatagtctacaaagatcaaggttggcagaaaagcgtccatgaaataatttagctgattatataaattaaatgttagcaaggaaaatagtgttaatgcctctggaaataaacttataacaaaaaatgtag

SEQ ID NO: 58600 - DNA, 711 bp, Zea mays
  Clone ID: MRT4577_153438C.1
aattcggcacgaggaaaacgctcgacctgccaagccggactgaaccctaggccccgatccggcgtctcgccgtgctgcttggatttgatcgggcggggttggggtcgtatcggcggcgggatgaccatcccgagcgcggaggggttcctccaggcgtcgagctgcctcccgtgcacggcgacggaggagcgggaggtcgttgacgcgcttaccaaggaggccgagaagaatgtcaagcacggcgatctccgctatctcgtctcgcagagctggtggatggagtggcaaggatatgtgggtctagtcaattatggagaaagtggcaccgagcagtttcctcaggccacaaatagacctggagagattgataactcgaagcttgttttggcagaaaggatcaatggtagtgaggagccagagcttcaaaggaccttgagagaaggggagcactatactttggtgccgcaagaagtttggcaaaggctatatgaatggtataaaggtggaccagaaatccctagaaaagttatttttgacaatccaactgacaagacttacgtagtggatgtctaccctctctgtctaaaactaattgatgcaagggacgactctgagaaagtttttaggataagtagaaaggccaaagttcatgagctttactcaatggtttgctcgctcatgtcagtagagcagtctgagatttgtcatctg

SEQ ID NO: 58601 - DNA, 542 bp, Zea mays
  Clone ID: MRT4577_153439C.1
ggggaactaggaggacaggatgggtcgtctggcccgagcggccggacatgatgatgcgcgttcgcgttggcgctgctcatgagaatcgacgtctacttccgcatctgcacccgccagaccaccgacccctccttcaacgccgacgaccgcgaggagctccggaggttatttgaacttacacacctattaagcgatgcatgaatctgcctcatgtaggatgctatatgacaaagaacatagagaaaaacagggatgagactgatgaactttctgaggttaacgtctcattatctggcgcatccaggcgccttgagatgttgcaaaaggataacgagttgcataagcggcatactgaatcactgaggcagcaatgccattgtactctccattgaaaactacgcaaggctaagggcacggatagaatgccttttgtttgtccagcagcaccagatggaggtatactaaactgaggtctaagaattaagacgtactaaaaggatcgacaacctagatctgggaaaccaagaccatatggaccggct

SEQ ID NO: 58602 - DNA, 581 bp, Zea mays
  Clone ID: MRT4577_15343C.1
gtcgacccagcgtccggtcccagcaaagttacgatgcagtctcgccaaccagatagccgtgcagagttgcaagctaggcaaccgcgctcgtcgtgtgaccgtaactagctcacctagtctagtggcaggacgtagtagttggtgatatggtctggatagcatgaaagagcttgcaccggagggcgtcgctgggccataccgtgatgcacggcggtgaccggctgcaatgcagcggcaagtgcatgagccctattctaaggagcatgcgcacgtggccatactcgcatggatcagctgaggcagcatgtggacatgaagtagtgcgaagaagggcgggctagagcaccacggacgacttctgtggttagcagcgccattctggagaaggacgtcactcattatgactaggtgccaagattccaccgatagctacatcactgatcggcgtgctgtgacgtacagcatatgtactgcagttatacagcgtgaggtaccttgaagcgtagtagtactactttctactataaattcattgaatgatactaatgataatatgatcatgcatgttggacatcatacat

SEQ ID NO: 58603 - DNA, 546 bp, Zea mays
  unsure (1)..(546): unsure at all n locations
  Clone ID: MRT4577_153440C.1
cacaagcaccccaaccagccagccagccagccattactcggaagcttgcttgctgctgctggctgctgaaggcgcagcagagctagcaaaggctttcccatccaaaggcggggcgggggagcgactctctcaggcaaaaataaaagcttgatgtgaagccgcttgctctgcgattgctggttgcggcgggctgcagcgttgtctgaggtgcgtggtcaagtcgacgcgaagatgagcaaggaggacgtgctcaaggtgcagacctgcgtgctgaaagtgaatatccactgcgatgggtgcgagaagaaggtcaagaagatcctccacaagatcgatggcgtgtaccagagcagcatagatgcggagcagggcaaggtgacggtgtccggcctcatggatccggccaccgtgatcaagaagctcaacaaggcgggcaagccggcgcacttgnggggcgccnngccnggcgtggngggcccgctcccgnngctgcngcttggcggcggcggcggtggcggtggcnnggtcccgccgcccttgggtggc

SEQ ID NO: 58604 - DNA, 286 bp, Zea mays
  Clone ID: MRT4577_153441C.1
ccatgggctttctttttttgagaaccgaattttcaaggtgccaacccttttgggggtttgggcttaacatgccctgtttaaaccgacctttcaagagttgcatagaaaactgagagatgataatcacattcatccaggggacctgccttcccaaggacgttttgggattccaatggcccaagcaaatgggcctttcactttcttttgacaaaaaggtcaaaaaccggaatgccccaataattcattggccagaacccccagaggttccgattgggctcttttgaag

SEQ ID NO: 58605 - DNA, 351 bp, Zea mays
  Clone ID: MRT4577_153442C.1
caattaaaatggttaattaaggtttttgttaaaactgaccttgccaccggggggggggggggaaaaatttttactaaataatggccgttaaatgactaaattagtttgttggccaggggtttttttaaaaaaaatatttttttaagggggggacacccccggcagaaccttaggggcatggatttggttttttaaggccaaaaattcccgaaatttgttggtttttttgggccgcaaacaaccccgaaacctggccttttttgggttttttttaaaggatggattggagaaccaacccaaaaatcgcttggtaccggggttggggttccacctgcttgagttggtggaaaa

SEQ ID NO: 58606 - DNA, 395 bp, Zea mays
  Clone ID: MRT4577_153443C.1
gatattccaataggggggttttacagttgttttgtttttgtttcacagcttttgaaaacaagggaccaacaggtctcatcctcgaaaatacaggccctgtttacctacgttttccggaaaatttttcccctcaggggtttttacggggctttttgggggagttaaatacaaccggggctgacccaccaaaaatcctacctaaactggggcttacccgggggggcgggcgatccaggatgtaagtcccccgggccccttttaataacttgcccgagttgggactgccccctggtttttagggcgctaggcctacgggagttggaaaggcccttgcctgtcctgggaaacccctccatcccaaaacctttgtttagttgaagaaaacttcgctttcc

SEQ ID NO: 58607 - DNA, 129 bp, Zea mays
  Clone ID: MRT4577_153444C.1
acggcgtcttttcacgaatacaccttcgccaaccagccaagccctaggggccggggacattatggagggacccccgcacatctaaagggaggctaaacttcttcatcacccgccaggggaggatatcca

SEQ ID NO: 58608 - DNA, 821 bp, Zea mays
  Clone ID: MRT4577_153445C.1
tgggaccctcgaggccggccgggcagaattcttgaaagatagtaacttttgctttgcagggagagttccattatattggtagaaatttgtaatctgtagctgtgagctccacttattagaatatgaattgtaacaaacttttcagataggtagaaccatggaggtttgccaccagatacttgtaatcaaccagctccattgttcagcaccttaagagatatatgtttcaacttatcaaattaaaacattactggtataattaaagcaagttaataaacactaatgaacatctttctagcagcaagtaattgttgttaataataacttcctagacaagtagaaaacaagagaatattatatgcttctatagaagatatatgggctatgtagctagagtcactactgactatttagtcaacttcatttgtttcaaagtatatgatgaaaatatgcacacactgctctgaattttatgcttcgagtattttatattggttagtagtgaggctatttgttggttatttccattttctgcatttcaggttgatgctatgcttcaaaagttagaaaaggagattgatgatgttgatgctcgaattggcaatcgctggcagctgctggatagggactgcgatggcaaggtgactcctgaagaggtagctgcagctgcaaattatctcaaagacaccataggagcagaaggcgtccaggagcttatcagcaatctttctaaagacaacgaaggggatatccttgtggaagacattgtgaagctggcgtcacaacagaggaaacaacgaagctgaaagaactgcacgagg

SEQ ID NO: 58609 - DNA, 225 bp, Zea mays
  unsure (1)..(225): unsure at all n locations
  Clone ID: MRT4577_153446C.1
gccggccgggctgncgactcctgcagtccttcntcacctagctttcttgggccaagaacacgccagctagcaagcgcgctcgatcgaataccgttaccgtgtcgccatggccgcgctggtgctgccggacgtcgcggaggccgcgcagtccggcgggctcacgccgccgctcccgaccttcctcctcggcctcgtgtccggtcgcccccctttccccgctccccc

SEQ ID NO: 58610 - DNA, 1701 bp, Zea mays
  Clone ID: MRT4577_153447C.1
gcccctgggcgctgagtgctgactcgctcccgtgcttctgctagccatcgttggccgcccccgccgcgccaatggcgacgaggcgcgagctgtccctcgcgctgctgtgcgtgtgcctcgcggcctgcgcgctggcccccggccccgcggacgccagcaagatggtcggggtgtacgagctcaggaagggggatttctccgtcaggctcaccaactggggcgccagggtgatgtccgtcgtcctcccagatcgcaaagggaatttggctgatgtcgtccttggcagagacaccgtcgctgaatacgtcaacgatacctcttacttcgggccgataacggggcgcatagcacagcgagttgcccggggccggttcgtcctcgacggcaaggtctaccacatgcacaggaacgacggcaggaacacgatccacggcggcgacagagggttcagccggagcatctggacggtgaaggagtacgtcgccggcggcgaatcgccgcacatgaccttctactaccgcagcttcgacggagagcaaggcctgccggggaacgtggacgcgtacgtgacgtaccgcgtgtcgggcgcctacacgctgggcgtgcacatgaacgcgacggcgctggacagggcgacgccggtgggcctgctgctgcacgtgtactggaacctgggcggggagggcagcggcgacgtgctgggccacacgctccggatccgcgcgtcgcggcacgccgtgctggacgacgagctcctgccgtcgtcggggcgcgtggagcccgtggccggcacgcccctggacttccgcgcgcccgcggcgatcggctcgcgcatccgccgggtcgtcgtcatggggggccgcgccgtcgggtacgacaccaactacgtcgtcgacggcgaagggatgcggccggtggcgcaggcccgggaccccgcgtccggccgggcgctggagctgtgggccaaccagcccaccctgcagctctacacggggaactccctcaaccgcaccgccggcaagggcggcagggtgtacgacaggtacgctggcttctgcctcgagaccatgggctacgtggacgccgtcaaccaccccgagttcccgtcgctgacactcaggcccggacaggtgtacaggcacgacatgctctacaagttctccttctaggtgcgtcgtcgttaggtttgatgaagtgtgcgtaattaagcacgaggaagtcatgtcatgcgtccgttggttttgatcggaagaaaaagactatgcatgctattattttaatttgcttccgacgagcagcagggcagggcaggcagacaggcgttcgatcttcgtcttcagttcgtcggcggtgaggtccgccccgtgccgctagtagtagtagcctttgcatcagcaccttttggaggcgtcgtcggggtgtgggccttctccctcgccaggtcggctttggcctttgaaccctgctgcaagcagacagggtacgtacacaacaagattgtggacgtacgtatcatcagtgacgcatggcacacaacaacaccaagctgcaattgccatatgtaattggtggtgtgtgtgagtcgtcgttcaggtttgatgatcatgcatgtacgggtgtaccagctgtacctcggtgaaaatcttcaagacctcttttggggacttggtttccaagatcgtcaaagcttgcttctgcccc

SEQ ID NO: 58611 - DNA, 223 bp, Zea mays
  Clone ID: MRT4577_153448C.1
cggtggcgcaccggacagcgtccacttcttcaggctggctcaggctaactcactgcgatgtctatctccaaaacctcgtgcgggtcaactttcaccggactgttcggtatgcaccggactgaccggtgagccaacggttggtcgaacgatcctcacgagacacctgatctagccaacagccaaaatgatgcacctgactgtccggtgtgcacaagacattgtc

SEQ ID NO: 58612 - DNA, 336 bp, Zea mays
  Clone ID: MRT4577_153449C.1
gcacatgaaacaaagcatttttaaaccattttactataacacaccatttggaaaccaaaatatacctttaaatctggataaaaccctttgttaactttttaacttccaaataaaaagcacttgtggctttttaaaccaaatttttaacttttataactagcttggccctaaacttatgcaaggggcctttaaagatcttattttctaatccaaaaaatattcccctattcatttttaatacaagtcaataagttttataaacccctttctaaaatcggtaatctccacttttatttaaaataaaagcaaatttaaccctttcttttttttcaaata

SEQ ID NO: 58613 - DNA, 333 bp, Zea mays
  Clone ID: MRT4577_15344C.1
tttttgcgtccgctcacgcaagaaggtaatactgctcttgttcgacccgagcgggcgccgacagcccgtgccctcggagccccctttcgatacttctttcctggaatgggtgtcagcgcgaggaccatgagaaattagtgtacgttctgacttcagatcagcctgccttattcacaaggctggagccccatcgaattctgtttctggcgtgatggctgtgcaggttcaccgtcaccgtaacatggttcgtaatggccaagctattaggtgtgcaatggcaactggaaaagagcaaggctcaattttcactgccagtagcggtgatcaaaccat

SEQ ID NO: 58614 - DNA, 385 bp, Zea mays
  Clone ID: MRT4577_153450C.1
ggggccaaaattttgggttcctttcaaatatatatatatatatatatatatatgggaaatccgtataaaaaaaaatttatacttggttttcccgcccactaagccatgggagcattaaattttgtttaaacaccaagcaggggggaaaaaataaagctgcctaactagctatccttccccttcctaaaaatgtttttttttttagctactagggcaaaaactaagaaacaatttttgcaacttgaatgctggctttttatttttatgtaactcatcccctcataatgaggttatataaaaatttatttatataatgggttgcttaacacgtacaaagttaatgatgtgtgttaagtcgaaatcccacttgttctccgttcgtcgt

SEQ ID NO: 58615 - DNA, 798 bp, Zea mays
  Clone ID: MRT4577_153451C.1
atcgtcccgagtcctgacctcgccacacttcgttttctgagccaaacttctttctgttccgttgttcagagtagattttgctctagtactctagatgaacaccaagaagttcaggccgcccggcgacgtcgtcggctcggcagcgctctgcgatccttcgtcgccgcagcagctatcgtcgtcgctccatcaggaggagctcgagaattctgctactagtagccagcagcactgcgcgggttgcaggctgcacgaggactacacgccgtggtcggctctcgcgcagagctgccttggcacagacaacgccgcgttcgactgcgccgagagcctgttcgactacccccccggaatgctcctgatgccgatagccaggacgcactatcagtatcagtcgtcggagaacgaccgctgccggccacggccgcagcgggatgcaatggagacaacacctgcacaactccacaagcagccactgccgccgccgccgcagcagcagcaagagagggatcatgggttgttcagcttcagcaacgcttccaccacttggtctcgtggtggcgagccaaagacatgctcgttctcacctcttgtggccgcgccggacacaattctcccggcgatggagaaccagaaggtgccgctgccaggaaactgcatggacgcgcctgtgaccccccgtcggcgacggcgccgccagggcgccagctgctgaatccagcaccgcgccgaggaagacgcggatccgatggacgcaggacctgcacgagcggttcgtggagtgcgtgaaccagctcg

SEQ ID NO: 58616 - DNA, 281 bp, Zea mays
  unsure (1)..(281): unsure at all n locations
  Clone ID: MRT4577_153452C.1
gaatgcncnnacgtatagtngcgacnnatatcgcataggactcttnnttgtctaatgaattatnnttgttcttaaaacaaatttgttgcttaaannagtttcgtttccctggttcactttgaaacattnnntccttggaacaaattttcanntttgttccaacactttttcacttgtaagtggccaggtgtcnaatgcacccaatcattttgaaatactcttttctttaaatttttcatctaaatttcagaaatttnttcaattggtagggtgacttgaag

SEQ ID NO: 58617 - DNA, 3470 bp, Zea mays
  Clone ID: MRT4577_153453C.1
cggcgaaaccctagctccacagcgccgttgcatggagtcccagcgatacaactacggcagcggcgccggcaccggcggcaaaatccgccgctaccctccctctcgcgccgtggctgcgtcaccatatgctcgaccggccaccgccccgacccacgctcctggaaccgccacggcggcggtttcgcatgagggcgggtggctgtcccggatcatagccgccggcacctcgcgattccttccctccttgttcagcttcagcacgtctcaacctcagcaagccgcgccggccccgtcgccaacgcgcgaccagctgccagtcgtcgagccgccttcgccgcttcccccacctttagtggatgatcgtccagaatgtgaagaaaacggtggagtggctgccaataatttgtgtactgaaaatcctcaaagttgtaccaaggaagaggaagaaaacatgctaagaaattctgatgaccatggtggaacggctcttgaagaattattgaagcagagaactttcacgaggagtgagtttgaatatttggccaatttgttatggtctaaaactattggagcaaattcactgaagctagaagatggtaacgtcaggaaaatgattgtttatgacaaagaaaatgcctcggaatactccaacttacctcttaatttttccactacaacattcagcgctgatgatcaagttgccacgcctgcagaaattgcaaaagcttatatgggtttaaaatcttccaagggttcccctctacgccttagattgcacgatccctcctctatgcctatcacatctatggaagttagtatgtcacaaaaagctaagcctcccacaatcccacttgcccaaggctcaagattgcatacttccaaaacttctgattgtcttgaaagcaactacacaacaccgaatggagtaatctgcaaaatgtcatcatctccttatttcaagagtggtgtgtcttcaaaggagctatttggttctgtatcttcacattaccagacctcaaatagtgttcatacttttggcagacaggttttgaagaggaagagtactgtcagcaatgagtttgtatctgctggtccgatacgcagaattcatcaaagatacaacagaacatcaccactgttggaaacacagctgggttatcgtagataccctgtgggctatggaagcaaactcgaaggttctgagcaattggcacggactcaaaaacgccggtgtctggataaagttggtgatgccagtctcagtagcgtagaggacaaaactaatgtgaactatcctggtcaggtgccagagaagtcagctgagatggcaactaagatactgaagcagcttgacacattagtaccttcacagaaggaaaacacatcagaaacaaagcagaaacatgagagtgccatatatttcgaggaagatgtttctcgacaaaagaaagtacaagcagagagagatcttttggaaccttctccatcagaagttgagtattcattacctgatggtattgcatcgaacaaatcaatctcacaaattaccttgaacaaggaaaagcctccagccttttcttccagaggtaatgctcccaatctggtattatctgatgaaattggacgaagcaaaatgtccactccaggaaatggcttcaccttccctgccccgactgtcaacaatgcctactcacagggccctccaacacctacattgacatctcctatactaacagttgaaaagcagccttcagtattctgcagtgcttcagtcacttctgcacaaagtgaccctaggatttcaaaatcagttttgggaggaccagttacacagaaattagaaagcaagttaaatggagataatcaacgagtgccttccaagaattctggacaagttgcatctttcacaagtaatcctgtatttaaggttgatggccctgggcatgcgtcaaactctgttctctcagctgtacaatcttataatacatcaactggctcagtttcatttcaaagtgctggctcttctaccatctccactaacttaacttcaaacattacacagagctgttcaactggaggcagtttcactttctccaatactcgttttggtagtttatcggcaacctcaaatatgtttgcagcaaaatctttagcgttgtcttgtacagcaagccccggtgcttctttgggtttccctccagttcatactgcaagttctccagctgctcaccgcaaatctgaagcagcaaatagcagtatcagttttagttccatgcagcagtttggcattgcaggttcttccacagtgcaggacaaatccaaggcagtagacagcagtaccccttttggctttccccagaagtttgacaccgtgagttccgcttcagaggatatgtccaaggcagactctcctgagccgacatttttttctgggaatcataatgtgcaatcagaaaattgcagttccctgttcacacagagtccaggaaataatttgagttccaaatcttcagaaaatttgaactctggaagctcgcatagttttgcagattcaccagttggttcagcaacaatgtgctctagcccttcgaattcaaactctctgttttcttgggctgctggctcaggtgcaagaagtgctccaccatcttcccctgctacaagctcatcttttgcttttagttccagtccagcattttcagcacaaccagtattcgccagcaaattgactacacctgcttcactttcatatggctcaccaaatactggccctgctacatcaccattcagctcaatgccaagcgctgtattttcattcacgtcagctactccttcaataccaaatccatcacccacaacaccaatatttggtgaccctactgtacagatgaatggagggaacatagttattgacaggaatgggtccccttcccctgcaacttcgccatttggcttgccaagcagctctccatcgactccaactttcagtacgcctgcaactcagtttgcttctagtacatcaggctcacctggagtttttgaaattggcaagtatagtcaagcttcttcaggtgggttctcaatgggccctagtggtggcaacgacaaatcaaacagaagaattgtcagagttaagagaaggaaatgaaataccaatatttttcaagttgctctgagcatttataagactaaggcaatcagcacgtagaactttttgtttcacatcatttgtctgcggtggcaatgagaatgagatgccattcttaaattgatgatcacaattctggcacagtagcagcaatggaactagccttttcgcgatacggtcgcccatgacattttgttgtacggtttgtcacaacaatgctataatgaaatatataggtacttctccaacttgtattaaacatgttcagcgatcaagctgccctttttttgtgcaattggatcctgaaactaaatttcatcct

SEQ ID NO: 58618 - DNA, 335 bp, Zea mays
  unsure (1)..(335): unsure at all n locations
  Clone ID: MRT4577_153454C.1
aaagcgcagttaagcaacgcaaagcccacggggaaagaaggcaacaacaagcgagccncnngcccgccgcnacgagccaacgacncgaacgcanacaccccaanggcagcgacggnganggcccccaggagcccacncgccnccgccacccccggcgcgcgncgcgaaaaccccggacggggggggcnccaancancnncacccgcggcacgcacacaccccccggccgagaccgngagggcccagagcgacgacgccgaggccgaggcaaaggaggaggcggcgcccgccaccaccccggcgccaaaanccaaggcagcggccaccgcaagccc

SEQ ID NO: 58619 - DNA, 235 bp, Zea mays
  Clone ID: MRT4577_153455C.1
ttttatctcaaaaaataaaaaaatcattaaaaaaaaaaaaacaaaaaaaaaaaaagaaagaaaaacttaaaaccgagaagaacatattaaaaaaaaaaaactcctctaacatacccattcttccttaccactacactcaaaatcattccccttattttaaaaaacttctccttacacttacccccattgttcctaaccccaccatttttaaccccactgcttactccctatccaa

SEQ ID NO: 58620 - DNA, 289 bp, Zea mays
  Clone ID: MRT4577_153456C.1
gcccaacccgtcatctactctaccatctttgcaggcacactcatcacagcgctaagctcgcactgattttttacctgagtaggcctagaaataaacatgctagcttttattccagttctaaccaaaaaaataaaccctcgttccacagaagctgccatccagtatttcctcacgcaagcaaccgcatccataatccttctaatagctatcctcttcaacaatatactctccggacaatgaaccataaccaatactaccaatcaatactcatcattaataatcataatgg

SEQ ID NO: 58621 - DNA, 352 bp, Zea mays
  Clone ID: MRT4577_153457C.1
cgcgttgtgacgccaacgaacaccgaagcatctttgcaacacatgcttgggtagagacgtagtacacgttctcttccaaaccacataccgagagtgtgggtgagagagagagagagaggattctactgtggcgccagcccgatgttgttagacagtgccgtttctactgggaccgttctggaggttcctttcgaactccttgaggtaatccaggagcgggaccaccactaagaggatgaacccgccggacgagctgttgccgccgacgactctttcttctacgccttcccggaaccggaacggtgggaacccgttggccccgttgtacagcctcggattaaccgtttttttt

SEQ ID NO: 58622 - DNA, 147 bp, Zea mays
  Clone ID: MRT4577_153458C.1
ctctaaagtatcagaactgatagaaagaacatatatggtattgattaaccttggccatggaatgtggtctgaggtaggtcttcttgactgaagtattttatcacagcaacagagaagtaactattatagggcctgtgatcatttgca

SEQ ID NO: 58623 - DNA, 249 bp, Zea mays
  Clone ID: MRT4577_153459C.1
acccttttctttccccgaatcaaccccgcaccaccgacctaccaccgagatttttaaaatgattcagcgccttcccaaccttaccaccaaaatactattatcctcagtctcttatccctatgaaccttctccattattcatttttccactttttctcattctatctcaataccaactacttctacctcatattccaatctctatttcaattacaactttaaactaccatctataaaacattaccatcac

SEQ ID NO: 58624 - DNA, 498 bp, Zea mays
  Clone ID: MRT4577_15345C.1
cgtctattaaaaaccttgaagctacaatgtattggtactggggatgacgccctagatgctattggttcattctgtcctcttttagagatcttgtcactcaacaacttcgaacgatttacagacaggagccttacttcaattgcaaaagggtgcaagaatctcacagatcttgttctcactgattgccagttactaactgatagaagccttgaatttgtagctcgtaactgcaaaaagttagcacgtttgaagatcaatggttgtcagagcatggaatctgttgcactggagcacattgggcgatggtgtccgcgccttttggagctctctctaattttctgccccaggatcgagaacagtgcattcctggagattggtagcggctgctcccttcttaggactcttcatttgattgactgctcaagaataactgatgacgccttgtgccacatagctcaaggctgcaagaacttaacagaactttctattcggcgtggt

SEQ ID NO: 58625 - DNA, 272 bp, Zea mays
  Clone ID: MRT4577_153460C.1
gcggcggggtaggtcgagggggtcttaacggcaggcgagctcggctcctgtcacccgtcgttccacacaaccatgtccatgcggaagacctgggagcccaaggtggagaacgctacccttggacccactgtgcgtgaaagagagtttgcctctggtagtcactcacatgcttgcagtacctaatgactcccctattgatgtcactgatttgcatgggagggatactgtgggtcggatcactggtggcatcgaaggctatgctgatcttgatg

SEQ ID NO: 58626 - DNA, 297 bp, Zea mays
  Clone ID: MRT4577_153461C.1
gacccacgcgtacgccacgcgtcctacctcactgctcgttgccgactgcccccgtggccctggccagttcatcccctagattgctccccaactgcagcgggcagatctagatactatcattcattctcggaccggaagcaggaaaggaagggttgaactttgaattccgaggctgattacttgatgctgaacccagacgctccgctctatattccggaggcgtagttgcaggtggaggacttctcgtcgcagcggtgggacctaattatcaccactgtctggtctcgagaccactgg

SEQ ID NO: 58627 - DNA, 148 bp, Zea mays
  Clone ID: MRT4577_153462C.1
ctaacccgtggactcccaggacccgttcgttgacaactacaaccaggcccaagtctaggagatggagtaaatggccatctatcgcacgatcgttgtaccatgtcggcgatcttgacgactactatgcaggccgatacgtgcttatccg

SEQ ID NO: 58628 - DNA, 156 bp, Zea mays
  Clone ID: MRT4577_153463C.1
tccctctccacccacacatacacattcattgtacacctcacctacgcattcacttactcgctcaactaatctacatcggcacagttaataaacaaaactgtcatacacatccatcttcaattacttccaaacaatgactactctcaacaactactt

SEQ ID NO: 58629 - DNA, 212 bp, Zea mays
  Clone ID: MRT4577_153464C.1
ttttgtttttcttgaacggggggccgggaaaaactatacattagctaggattggtggtgcacacacatcaaacggattctttttacgaattgaaaggacagtgggaacgatcgagggggcctttagaagtcggttaggaaaacgtaatgactcctgatgagaacgtcaccaccccagaggtgacccctgcgacgactagggacagtaccggc

SEQ ID NO: 58630 - DNA, 627 bp, Zea mays
  unsure (1)..(627): unsure at all n locations
  Clone ID: MRT4577_153465C.1
ttttntttttttttttttttttttttttttttgggtttttttttttttttttgggggttttccctttttttatgttttaagttgttcctggtctcaaatggtatggggccacaaggggaaaaccagaacctttggaggggcccaccccaccccggcccaaaaaaatggggggaccccccccaaggggacaacccggggccagtaaaccgggaaaacccggcccccaaataagggacagaaaaccaaagggggggattcggcccccaccgcccaaggggggccccccgggggggcccccaggggccaggaaccccagcccaaaaaaaatcgaaagggcccgggggtacccgacccccacgggggggggccccccggggaaggggggcccccccaaaaaaaaaacaagcccccaccgggccccccctccaggggctggcggccaaaaaaaaagaccccggggggggcccggggggaagcccccctttgccaggagtcggccccaaaaaaagcccaggggggccaaaaacccccccccgggggggggggcccccccccgagggggggaggtacaaaaaccggacccccccgggggccggcccgggggggagggccccgaaacccggggga

SEQ ID NO: 58631 - DNA, 500 bp, Zea mays
  Clone ID: MRT4577_153466C.1
tcttttacgcgtgggcggacgcgagaatgatacttggggctgttgccgtagcaatgttgggaagtatttgtaatgatgttactattatggatatacatatggccgtcactccaattgaactaagcttgatcgcacttttattgcgcacgtgcgaagctggcactcagagtgatcactttcccttgacggctcgagcactgaagaatgttatactggacatgcctcaaaggatgtgctgatgagcaaacttcatgcgaacatgggtaggcttattgatgaaccaatagtactggaaacgctgtacgccatatcgaccccttgttgcaaggatctgggcaacaggtcaggtgttattccttatagccccaagacctcaatcaatgtggtgaagccagtgcctgactggatcctatgcagttacgtactttctaggacatatctgcagatgggctgccgttttaaggaataccaccaagccttttggcctataacttgaaaca

SEQ ID NO: 58632 - DNA, 1161 bp, Zea mays
  Clone ID: MRT4577_153467C.1
cttcgtatagaccggattaaaccctaggccctagccaccgcccaccgtcgcctcagcaaatcctcctcccgtttcaccatgccgccctgctgctcccccaccacctccgccgtcaccgctgcggcggcatctcccggcgcctcgcgcagcgggggcctcctgcgccgctcgcgcccagcccccgccgccgtggtgagctccttacccccacgccctgttcttatttgctctgttcgtgcccgggccatgcggcaataatcactcgccgccctgccatccggaccgaccggtgattttacggcgacggcgcgttcggagctcgggaattgatattacggcgatggtcggcgttcggagctcgtttttctttaaatacttttttcgcaagcgcgggtttaaagctttagttttggatcttggacactagagagtacccatcttgtatctgcacacaaaggaagtaagttgggaagttgtgctactaaaagggcgtttttcaggactccttcaatttgtggctcctttaaaacgtctctgtgatgacccaaggtggcggtgcttaggcgcaggtatgaagtattagtggatctttcgagtattagggtttgggccatattagggccgtattaatcttctatgggctgtaataagtgattagccaaggcattagccattctgttagttggatctcagatgtataaatactgtaactgtttgttgagatggaaatatgaaatgaaataggaacagacacctgctctgagggaaatcaaaggagcaccatcttggattccggagcataacaggcccatattgactcaagcaaatgtgtcagaatatgaagaaccaagaatctgaaaaaaaactaaaggaggcattttgtgaggttgacaaagaccataacgttttcatcacagacgacgagatccgccatgacatgacaaatatagaagaaaagctaactgatgaggaggtggacgagatgatccgtgaggctgatgtcgatggtgatggccagatcaactatgaggagtttgtcaaggtcatgatggccaagtgagccacagaaccataatctgaaggcagagaagattctgcattgcatattagtcaagatgcaactttttattccatcgacttctagtgaaactttctgctaag

SEQ ID NO: 58633 - DNA, 357 bp, Zea mays
  unsure (1)..(357): unsure at all n locations
  Clone ID: MRT4577_153468C.1
gcangatgatttatcttcgggtgccagccaaacggacatgatccctcagcaaggatgatggttctatccacnttnccatntnttctttctttaaatatatagaatacttccatataaaacatttggagaggactgcatttcatctggaggaatttctctaatgctatggaccagcaggtcacttctcctatagatttcaacatcacctttcctagattgcttaacctcagcattgatatgagtttagaatttcctgtaaaacaaactgatgtctttggcattcttcaccgcccggagatggaattgaaaaagctggctctggatagttcttttgaaaaaaaacatatatggctttta

SEQ ID NO: 58634 - DNA, 605 bp, Zea mays
  Clone ID: MRT4577_153469C.1
ggacgccgataatttgcagcccctgcgccgcacggctgatcttctcgagaccggcctcgataggcaccctgacacgctcctcggcgagcagctccggcgtcaagagccgtttccacccttcgtgccacgcgacggcctcccccgccgtgggtttcgcagcccacagccaccggcacagcgcggcctgccacttgccgaagaactcctcctccaggagctgcgccatgtcttgcgccggcaccacggacgcccacctcatcaccccggcgaacccgccgtcgtcctgcttcggcggcgtgacgtgcagtgcccgcaggccctgcctcaggtaaggcacaacgtgccggccgacgaactcctcccaggcctccggcccgaacgcttccttccacggcaataccatgccgtagtcagccaaggcgcgcgccgcgtgccatcccagcagcgccttcccgagcttgcgctgcactgtcacgtacagcggctcaagccgtcgtcgcccgaggagccggatccacccgctgcacccagacgtggcacggcacgggcttccaacgcggttcccacgactccacgggggccgacagcttcgggatgaccaccag

SEQ ID NO: 58635 - DNA, 371 bp, Zea mays
  Clone ID: MRT4577_15346C.1
gagggaaactttagaaattacctggattagggagattaacgggttgggccaggcaaagtacaccctttttgccaatgaaaatgaacttaaaacaaatcctgacaggacttacagctagcattgaccccaagtctattgctgtatggctcacggccaacactggaaccaagggaaatcttttcaatgtgctattccggcactagtaattaataactttgctagtgcaggttggtcacagactggactaacgatggaaaaccctgtgaattagggaaatcaccctcagattcaatttggggttgcttgggagctgaagcttcaagagcctggttttttttgatacccgtgacaaaggcatttatttttaaaaa

SEQ ID NO: 58636 - DNA, 456 bp, Zea mays
  Clone ID: MRT4577_153470C.1
ggggggtgtgtttttgttttttttttttttttttttttttttttttttttttttttttggctcaaacaggcctttttaacgcaacaccatttcagtcagggcaaacgacagggctcgacgaaacctttttttttttgggccgaaagcgcttagaggggggggggggttcttcataaacatcacacacacccagggcttatgggcggccagtttcgatgctggcgggcgggcgattttcgctcgggggtctgtgccaaaccccggatcaaataattttgttcacagggattggggagggagactcgtgtggtcacaagaacgggggcattctttgcgaagtgggcacaggggggtgggatccgttgtgggggggactctggggggtgcggttcccagggggccttgttggggaaggttgcatgcgcatgggtgtgactgggatcggaggggcccgct

SEQ ID NO: 58637 - DNA, 258 bp, Zea mays
  Clone ID: MRT4577_153471C.1
tcgcttatgttccagacatctattggccccactggtattagcgtggggaatgtgtgaccagagaccagaacaggttttttttggaaactgcaaggatcagttctattacaacgaccaaaagctcttttttgtgggtgatcaaattggtcaagctatgacaaatgagaactcaggacgaaaaggactcctcagagtgagggaaatcacagtggcagagattgcgcattctgtggacccagaggacaaaggacatccaaa

SEQ ID NO: 58638 - DNA, 292 bp, Zea mays
  Clone ID: MRT4577_153472C.1
gggaatcatcagagtgtccttaccttctattcataaatgttctatacagtggacagccctccagaatggtacttcagtgcctagtgtagtaactgaaatcttcaatgacacattaacatcacaatggcgaatggtgacttttctttcacgatttcattaatttgaaagcacacaggaaagttgctccattgataacgtgtatggagacttcggttttagtcaattccatatctcaatcttaatggtgattcttctctgttgaactgaagtttgtgagagtagttttcctttg

SEQ ID NO: 58639 - DNA, 473 bp, Zea mays
  Clone ID: MRT4577_153473C.1
accctgttttttttttttatttttttttttttttttttttttttttttttttttttttttttttttttttttggaaaaaaactcaagaaaccagaaggggactcccaaaaacccatttgccattggctaataagtggccccaattcttatgcaaagggggttacaagaaaagaaccgttttgacaaaaaacgacaccttccctatttttcaagggtttttttaccaaccgggaaaacaatataattcatttatgctgaataggaggaaaaacccaactcccgacaacacccgggactccatgcctgatgcctcccaccaaagggggggctggggggagcaagaccccaaatgatccaaccgggtgaccttaaagaatgaccaccgaccaacctgtaccactggtaaggcagcccaaggactggccctgttgactgggaatgacatgacaaccccctggagccaaaccaagggg

SEQ ID NO: 58640 - DNA, 445 bp, Zea mays
  Clone ID: MRT4577_153474C.1
ttgggctggattatgtgcttgtggatgtgcgggcgtgtgtctcgacttgccctgtatctgtcggtatgttgtagtgaagtgcggcgtcggatactgagggtatgatgagttttactctgcctgcgatggatgcgtctccttttcatgtttgtgataatgcttgtatgtattcggatgttattcatcttatttgtgagattaaggatgatactgtttcgtcgtgtgtctaggctgagtaggattcagttgaaggtgctgttggtgttgctttggctttgtttgatggtgttggtaaggattgtgctgctgatgtttcggctgttaatgcggaggttacgactgtggtggacaggaagataattctgtcgaagtagccgtagggttatactcggaggatcgggcctgagcgttaagaaactaagggggcggcgcctgatgatgcgtt

SEQ ID NO: 58641 - DNA, 1246 bp, Zea mays
  Clone ID: MRT4577_153475C.1
aaagccatcaaccgcggtgcagccatcaacctctgcagctacaggacagcgtgcttgtgagtggctgtgcttccgtaggggtagtagggtgcttgcgttgcgttgcagtgcagaggacactgacggacggcgaagaatcgaagatggaggcgtacgctgctggagccaagttcgactgcttgctgttcgacatggacgacactctgtacccgctgagccttggcatcaacctagcatgccgcaagaacatacaggagtacatgctgaagaagctgcggatcgaggagagccaggtccccaggatgtgcctggacctgtacagggagtatgggaccacaatggccggcctcaaggttttggggtacgatttcgactacgacgacttccacgcctgcgtgcacgggacgctgccgtacgagaaggtgaagcctgacccggtgctcaggcagctgctgctttccctgccgcagaggaagatcatcttcaccaactccgacaaggcccacgcggccagagtcctggagaagctcggcctccaggactgcttccaagggatcgtctgcttcgagacactgaacccgccaccaccaaccgagaccgagaagaacagtggccagtgctgggacgatcctgtgcaagccctcgctggcgtccatggaagccgtcatcgagatcgccaagctcgacgccgagagaacggtgttctttgacgacagcgcgcgcaacatcgccgcagggaaggccgccggtttccgcaccgtcatcgtggggagctcggcgctggtgccaggggcggacgtggcgctggagagcatccacaacatcaaggaggcgctgccggagctctgggaggttgccgccgccgctgccgccggcgaccgcgtcgacgccgtcctccggtccaccaccgccgtggagaccacagtgattgcctgagcaataataccatatgacaaatgacattaaccgtcacggactcacggccacgtaatataatgctggcgtgtagtatttctcgtgacgtgcaaattaaaatgacttggaatgtggtgtgcctgattaagtaccgaccgaggtaactaatactactgtatatgacagaccagaactttactggtaataaggtttgtatagctcatccctgtcggcccgtgcttttttatggcgcggtccgtggtgcaaatggatgccacgtactgaatacaaataaatatatataaaaaaaatgctttgcccatctcaaaat

SEQ ID NO: 58642 - DNA, 551 bp, Zea mays
  Clone ID: MRT4577_153476C.1
ttgggtacctcgaggccggccggagaaaactcttcgccagtttcatcaggctgactgtcactgctggcttggcgacttcctccggtgcgatccactcccctcagctcccgaactggtgatgtttgcatggaactagcatctgcgtccaaggggcgggcaatcgctggaagcttctgcagacgcgtgctcgccagaaagggcgcgtcatctacgagggccacgcccagctcgacgaacgacaagaacgtggaggaccaggtgagccctgcgatcctgccgaacgatgtgatcgccagtgccgggaccaccgagaattactgaagcacccgctccaagaccggctctttctgcccagctacgagagcaccccaagctgcgaggtgctggcgaggctcacgacgtcgcacatgctgaatacagcgcctggttggcacaaaatgtgcgagaatcgcccgctctatgacagctagaaaccgccccccgtctttggattctgatgaggctgctcagccagtacacacatggtgatcgataataataacgtggtcttg

SEQ ID NO: 58643 - DNA, 1741 bp, Zea mays
  Clone ID: MRT4577_153477C.1
cattggtacctcgagccggccgggcacagtttgcacaaaatttgcatgacttacttttggagagtggtgcattgctaccctcggatttattatctgatcaaaataaccatgacattcacgagaaagagagtaaaggatggttattagttgctcaaacaacacaaaatttgccaaatgcttttgtagctaaagattcgtcatcgcctgatgaagatgaacagccccgtgcagaaaatacagaagcagccatcagagatttggatttgcatggtcatactgctagtgttatttccaatgaggatcaaatggttgctgaaggttctttggtgaacatgtcaggaagtagcaatggaaatttggacacgttgagttggtctagtgtaaaaacgatcagctctgttatagatgatgtcgctgaatacgaaataccatgggaagatcttgatattggagaacgtattggtttaggatcatttggggaagtttatcgtgcagactggaatggcacggaggttgcagtgaagaaatttcttgaccaggatttatcaggtgtttcactagagcaatttaaatgtgaagtgagaatcatgtcaaggctaaggcatcccaatgttgttcttttcttgggatatgtgacacaatcgcctaatctctctatattaactgagtacctcccaagggggagcctatatcgtctgttgcataggccaaatagtcgaattgatgaagtacggaggctaaaaatggcattcgatgtggcaaaagggatgaactacctgcactctagccatcctaccattgttcaccgtgacctgaaatcccccaatcttttagtggataaaaattgggttgttaaggtgtctgactttggcatgtccaggttgaaacatcatacttttctttcctctaagtcaactgctggaacaccagagtggatggcacctgaggtactacgaaatgaaccatctaatgagaagtgtgatgtctacagctttggagtaatcctgtgggaactagcaactatgcgtgtgccatggagtgggttgaatccaatgcaagttgtaggagcagttggattccagaacaggcgactagagatccccaaggatgtggatccacaggtggctagcataatatcttcatgttgggatagcgatccgagcaaaaggccgtcgttctcccagctcttgtcccctctaaagcaactacaacatttagttgttacagaaagctgctgacatgcgtttcctgggacaaatctcaggatacatatattcaagtatttaagctctgttacagggctaaaattttcttttttgaagctcgtggaggagtctctgcggtatagatgtgtttgggcgaaggttctgcacatcagtaatcatcaccttgtgaaaatgcgagtctctgaagccgtgcaaaggcgctgctggagaaagcgtagtgtgtagtctcaagtgaagaaaagtggtgcgacacaaagtgttctgtgccatggtaaataattgttcagttctggatttgaacgggtgataaattcaccacaaagataggatcttgaagttttttccccttgccttacaaaagatggaaagtgaagtgaaaaaaaattcacggtgtctgcaaaaagtcgcagcccgatgccacgtgaaaatgtatatgatgtaatacagttgctttggaaaggcaaacataaagttcacagttttgttcgataatggtgtgtttggttttcctttat

SEQ ID NO: 58644 - DNA, 224 bp, Zea mays
  Clone ID: MRT4577_153478C.1
cacgctcccataagaagagagtctttttatatcaaaggaccttcgaagtggaacaccgagggtgggcgtggccaagcggctggctactacaacaaaaattacggaggtggagcaccgaccggcggaccggaataggtggatgagcgacctgggcaccgacaagcttttcatgacaccaagggtgtgagccgacattcacgaatcggccaccaacaagattggcg

SEQ ID NO: 58645 - DNA, 261 bp, Zea mays
  Clone ID: MRT4577_153479C.1
agggcaaaagaaaaacacagctcattgcattttcatacttaagttggaacctctggggcggggtctttcataaaacatagagaaattcaaaagggaaatacctagttggctgccgccccctcaaaaggggaatatattgctcaaccattccaccgccttgtttactaagggtcccacccccccttagaggaaattagaggaaaatactttgccccatcgaacttgatctttttcgctgaggggggaaagccccctatttgg

SEQ ID NO: 58646 - DNA, 1778 bp, Zea mays
  Clone ID: MRT4577_15347C.1
ggcccgcgccgccgtccgcggcgtctttgccagcgagcgccgcctctgcttccacatcttccacgaccttcctatctccaccaccaccatctccgccgcctcagcgtccgccacgcacgacatccctttcgccgaagccgtcaagggcgccgcgctgcagctcttcggcttcaccgaggccatcagcatcggtcgccgctcccctgagaagctcttcaagatcatagacctccacgacgcgctctcggacctcctccccgacgtctccgacatcttcgccgcctccaaggtcacggagtccatatacgtgcaggccgttgagatccggtctcgcctcgccgatgccgtgcgtgggatactctcggagttcgagaacgccgtgctccgcgacccgcccaagaccgcggtgcctggcggtaccatccacccgctcactcggtatgtgatgaactatagcagcctcatttgcgactacaaggtcacgctctccgagctgatcatatcacgtccatcagctagcgctcgtctttctgctgagggcaatgagctcgcgccgtccttggccgacctcgagctccctgagcttgagaaccagttaccgcttgcctctcacattgtctggatcattgttgttcttgaacacaacctggagggcaaggcggcactctacaaggatccagctctctcgcatctgttcatgatgaacaatgttcactacattgtccacaaggttaaagattcgccagatctctggagcatgatcggtgataattacttgaaacggcttactaccaagttcacaatggcggccacaaactaccagcgcacctcatggttgaagatcttgaattgtttgcgtgatgaggggctccatgtaagtggtggcttttcgtcggggatatccaagtcggcactgcgggagcggttcaagtccttcaatgctgcatttgaggatgcgcatagggtgcagtcagggtggtgtgtgccagacaaccagctgagggaggagctcaggatctcaattgctgagaagctgctgccagcataccggtcattccttggcagatttcgacatcatatagagaacgggaagcatccagagctctacattaagttctccgttgaggaccttgagatagctgtgagcgatttctttgaaggtgttcctccttccccacataacaggaggaaatcacatggatgagggacttttacctcaggtattcaactggctgatgttgctatttattcttttattcttcacaaagaagctggttctggtatttgggctcgatttcttctgtcctgatagatgtgagtataaatttggtggtcttcaatcaaagatggcaaatatgaatacattttgggatctttctgaagctgtcaatcggcccagtgatccctactctgtaagagaagttgttcatttggcttcaatcaaagatgttatatagatcttgcaagtagcatgtccatataggaaatttttttcagtaacgtggatagttggaacaacccatggcatttctgcccctgttttgcaccagcttttgttatccttttcaatgttaacaattatccaaagggtctatgctttgtgggttagatgtaaaaagatttatgtaactctcatgtaccacatgattttgtaatatgataatatcatgcttttacaaattcaaaaactccatggcacagttctatccaaataaagaaaaaaatataaagataactgccaaagtggcactgttgatccctccataagatttacaacg

SEQ ID NO: 58647 - DNA, 331 bp, Zea mays
  Clone ID: MRT4577_153480C.1
acttgaacattcaaaaactcatcaagcatatctcactcaccacaacctaacaacaatcgctgaaaattttttatccttccttgcactttctgccctcaagactatctccacaaatgcttatattactctacacagatcaatttctcatattgccaacatcacacagattttaataccagtcacttcaatgggttatgaacaaccagaccctcaagcctacaatctacaactaattatcattaatagcgtattaaatctaccaattatttaatcactaaaactaagcttgttacatttaaacctacataccatctcaacagatccaacacca

SEQ ID NO: 58648 - DNA, 392 bp, Zea mays
  Clone ID: MRT4577_153481C.1
accgggggaacaaacagggggttaattattaattcagggcaaaaaaagggggtcaaccccggcgttttattattattattacaaagaatattaaaactggatgctagctagctcgtactaataaaaaaaaaacttttggtttcgggagggggccacccccagcatttattggggacaaactaaaaagagctggtggcctaaaaagggagggtgggccctgggtcaacccggaactgttggaaaaactgtttgtaaaaaccgaccccccccttaatttggggggggttgttcccgttgcactcaagggccccgttgatggccctgatgggggggccaaaaccctggggaaatagggggggcacgttgttaatccaaaaccaaaacgccgtttt

SEQ ID NO: 58649 - DNA, 430 bp, Zea mays
  Clone ID: MRT4577_153482C.1
aacattgataacggggcaaacacggaaacgggagctatgaatgatagattagaacgaaggctatgcaggggctgaaattcatacagggtgttttcagcaccttatgagccaatctgtcctaagtttttcacaatgcctactttttaagggggggacagaccgaacaccttattttactgagcggaaccatttgcaaaaaaaaaaagaaggaattgcctacaggaaggaatttttattgccattgccctgtccaattgaccacaggcacaagcttgcacggctttacgcgttgggggaggaacgggacctcaacagaataggcttgaacctgtagcagcagacccggacgttttcttttgtcatggaggaattcctgatgaaaaaaaacccttttttgtggaaaggaatgggttttttgaagattttaagg

SEQ ID NO: 58650 - DNA, 463 bp, Zea mays
  unsure (1)..(463): unsure at all n locations
  Clone ID: MRT4577_153483C.1
gcgttgttttcaaggcgtgttatctcaatggctgctggggctgttgttaccaatgtgctaggtgtggccagattgatcatgcctgaagaagaaattgcacaggtggcctcaatatctgcaaatggagaaagggaaatcggtgagcttactgccaaggctatggataaggatggctaagagggtgtcatcactattgcggacggtgacaccctttatactgagcttgatgatgcagagggtatgaaactagacagaatttacatttatccacacttgattacgaactcaaaaaccaacaaacgtgaattgtccgacccatttatcttaattcatgacaagaagggttcgaacatacatgctgaagttatagctttagaaatggcttttaataaacacaagcctctactgatttgtgcagaagatgaaggaagtgaagcattgngcactatgattattaacaagc

SEQ ID NO: 58651 - DNA, 144 bp, Zea mays
  Clone ID: MRT4577_153484C.1
accaaacaggccaggacgtttttcaaatccccagttcagtaactggcttactgtatggggaggatagagatggggatcggcgtacctttacgctgattttcattgactatgcgaacgagcattgtcctggaacacagtactgag

SEQ ID NO: 58652 - DNA, 367 bp, Zea mays
  Clone ID: MRT4577_153485C.1
cagacgcgtgtgctgactattggcagcgagtggtcttatacaccagccagcactacactgacatctctgagctccttgaccagcgtcggtagctgtagacactggaaagctgcctctctgattagttccgcatggccagacacttatcatgtagcctcttgcctagaatacgccgtgccgcctagcgcgcaaaggacaggaccatgaatgactagcacaggatggtcactatcagctggatcttctataggacagacgatgtgtaggcacttgttgctgactgtgatacgtactcagatcatgccgatagctgtcacagtttttgttacaaagtgtctatgagtgcgaaatgctggaagagcgctac

SEQ ID NO: 58653 - DNA, 159 bp, Zea mays
  Clone ID: MRT4577_153486C.1
tcccacgcgtgcgatgacatccccgtaggggggtggtttttgcttagatgcgcgactcataggacttggtatgggatcgacgccaccattgtgcttctaaaggaacggagcgtccccatgataaggatcttatagacacatatcctgtccggtcagtct

SEQ ID NO: 58654 - DNA, 710 bp, Zea mays
  Clone ID: MRT4577_153487C.1
attgggacctcgagccggcggggtactgttcccagtaaagacggctactccttccctcccccccttctccccctccgtcttcttcccccaggggcatccgtgttttcactttttgctcccccacgttgaaccttgatcctcgtgctccctttcttgattctttctccgtaggatctcttgctaggagtagcctgccccgtgtgcgcgctcgcacggacatgcttgtttccgcgtcttgaaaggcgagaaaaagtggagatgggcgcttgcgcttcggtacacaaggacccggggcaccccaagaagcagtttcttgactctcccaccaaggcgaaggccgccaacgggaagggtggcgggggcggcggtgttgctccggttggtgatggcttcggtgatctcaagtccaaggtcgacgctgaggctgagcagctgcgggcagagtttaaccccaagaacccggattctggatttgacagcgaagtgtggtgttatcatcgcattaatcgcttctggagatcagttagctttctaggggtgggtgatcttgaacggaaaacgatttacgggagctgactgattttgggctcttgtaatggaaaaggagtttttagttgttcctaagttttgtccttgaaaatggaacacttaatataaacgaggattctgttctacacaaagtggattgctctattgactgcagtccttcc

SEQ ID NO: 58655 - DNA, 812 bp, Zea mays
  unsure (1)..(812): unsure at all n locations
  Clone ID: MRT4577_153488C.1
cattgggtacctcgaggccggccggggtactgtttccagtaaagacggccactccttccctccctccttctcccctccgtcttcttcccccaggggcatccgtgttttcactttttgctcccccacgttgaaccttgatcctcgtgctccctttcttgattctttctccgtaggatctcttgctaggagtagcctgccccgtgtgcgcgctcgcacggacatgcttgtttccgcgtcttgaaaggcgagaaaaagtggagatgggtgcttgcgcttcggtacacaaggacccggggcaccccaagaagcagtttcttgactcgcccaccaaggcgaaggccgccaacgggaagggtggcgggggcggcggtgttgctccggttggtgatggcttcggtgatctcaagtccaaggtcgacgctgaggctgagcagctgcgggcagagtttaaccccaagaacccggattcgggtatgcgtgtttgtttctttggtctttttctgaagagatgttccgatctttatcttcctataatcagttactgtagttttttgaagttctttggaggtaaagagcagatgggcagtcagctctctatgtgaaaaggaaacttttgggtttatttattcatcttttgggcttttgatttcaggatttgacagcgaagtgtggtgttgtcatcgcattaatcgcttctggagatcagttagctttctaggggtgggtgatcttgaacggaaacgatntactggagctgactgattttgggcccctgtaatggaaaaggagtttttagttgttcctaagttttg

SEQ ID NO: 58656 - DNA, 343 bp, Zea mays
  Clone ID: MRT4577_153489C.1
cagccgcaaaagcaatattaccaagcgattttttgctgaggtgcactacgatccaaatcccatcgttgaagtgtgcatcgtcattgaagagcctcttgacaaatacaggaggagctgcgcattctgtcctgccaactgggacattttgcaccctgtgggttcccgtaagtttctttgtggaaatgacaaggacaggattgaacaacaactcaagcctcgtgtgctctctgaatatctcggaatgccattcacttgctgcccggcctcccccattcaagagaaaaaaggaaagaagaagttttgaacttgttatggccgtctgtagtttctgaccatgtcgatc

SEQ ID NO: 58657 - DNA, 830 bp, Zea mays
  unsure (1)..(830): unsure at all n locations
  Clone ID: MRT4577_15348C.1
gggtaccctccgaggtcttnccgggatctttgtcaccttgcaaaatgtgtgncacttcctaacataatatgctctatgacgcaattgtctgctgatacaaccttgtttattttatggtttagtgcacgtctatatttacttcggaatttactttggtagttaactaatagaagttcatgaatattggagttgtgtaagccgtgtttggtatgatgttcttcatcaggacattgtcccaggctcgcagcagtagtagatttgtctatatttggagtggcgttgattctgatttcttaatgcttatcttgtgggaagtccagtaaggtcaatttgtaaggagcctgtaactattgtaatggtgctttggtacaggccaagttactgtcctgtcttttgtgtccctcaaatcgaatgatgtcattttcttagcttccttgatttttttcccctgccactctagttttaatttgttattgcttcctttttgaacaatgtcttaggaaaaatgctatggaacttgagaaaaaagaacagaaggagaaggagctacgtgcccaaataattgctgaagcagaagaattcaagaaagctttttttgagaagaggatacagaactgtgcgtcgaatatggtcaacaacagagaaagggagaagatttttgtagccagccaggagaaattccacgccaacgcagacaagcagtactggaaatcgatctcggatctcatcccgcatgaaatagccaccattgagaagcggngaaagaaagacagggacaagaagccatccgtcacagttattcagggccccaagcctggcaagcccaccga

SEQ ID NO: 58658 - DNA, 839 bp, Zea mays
  Clone ID: MRT4577_153490C.1
gctacagacagcttgaacgtgttattgtgtgtcttgacagagacaagtgcgagacgttccaggattctattacctgggcccggcttaagtttgaggattacttctccaaccgtgtgaagcagctgacgttcactttcccagaagactcgatgaccagctctggtgctcctttctggtctgctccaaagcggttcccacgacctgtggagttctcgtcgagtgatccaagtcagcttagctttattttggctgctgcaatattgagggcagagacttttggaatacccatatctgagtgggccaaaaccccaaacaagctggctgctgaagctgttgacaaggtgattgtgccggatttccaaccaaagcagggggttaagatagttacagatgagaaggccactagtctatcctctgcatctgttgacgacgctgctgtcattgaagagcttattgccaagttagaagaagtttccaaaacactgccatcagggttccacatgaacccaatacagtttgagaaggatgatgacacaaacttccatatggatgtgatagctggttttgccaacatgagggcaaggaactacagcattcctgaagtggacaagctaaaggccaagtttatagccggcaggatcatcccagctatcgccacctccaccgcgatggccactggccttgtctgccttgagctttacaaagcccttgctggtggacacaaggtcgaagactaccgcaacacgtttgcaaaccttgcgatccctctcttctccattgctgaaccagttccacccaagaccatcaagcaccaggagctgtcgtggacggtctgggac

SEQ ID NO: 58659 - DNA, 129 bp, Zea mays
  Clone ID: MRT4577_153491C.1
ctggggttaggttttttaaaaaaaaagacttttctagagaaatttacatcttaaagggcataagcactagagaaaacctacaagatggcgaattttacatccacagctcagaacaggtcctctttaaaa

SEQ ID NO: 58660 - DNA, 919 bp, Zea mays
  Clone ID: MRT4577_153492C.1
actacgaagtgcgaactcaaagctgaagacaacaaaccatgggggagcacaagcacgagcgccacctcgtcttcctcctcctctgctgccagcggccccgggggcggcggcggcgcacacgtgctgctcctgccgtaccctggcgcgcagggccacacgaacccgctgctccagtttggccgccgcctcgcctaccacggcttccgccccacgctcgtcacctcccggtacgtactctccaccacgccgcccccaggggagcccttcagggtggcagccatttccgacggcttcgacggcggcggcgcggccgcgtgccccgacatcgctgagtactatcgccagctcgaggccgtgggttcggagacgctggcggagctgatccggacggaggccgccgagggccggcccgtgcgcgtggtggtttacgacccgcacctgccgtgggcgcgctgggtggcgcaggcggccggggtgccggcggtggcgttcctgtcgcagccgtgctccgttgacgtcatctacggggaggtgtgggcggggcggctgccgctgcccgtggtggacgggaaggagctgttcgcgcgcgggctgctgggtgtcgacctcgggcccgacgacgtgccgccgttcgcggccaggccagactggtgccccgtgttccttcgggcgacggtgcggcagttcgaggggctggaggacgccgacgacgtgctcgtcaactcattccgcgacatcgaacccacggaggcagattatatgtccctaacatggcgcgcgaagacaataggcccaacgttgccatcattttaccttgatgatgaccgctttccgttgaacaaggcctactgatttaacctctccaatagcagcggactatgtctggcttggttggacaagcagcattcgttttcttgta

SEQ ID NO: 58661 - DNA, 305 bp, Zea mays
  Clone ID: MRT4577_153493C.1
tcgtcagaaacacaccaagcgaagcacattagcaacaacctaacaacaatggctaccaagagattaggccttcttgcgcttcttgcgctttttgcgagcgcaacaaatgcgttcattattccacaatgctcacttgctacaagtttcattattacacagggacttccaccagtttctttaatgggctttgaacacccagttgtgcaagcctataagcttcaacaagcaattgcggcgagccgtttaaaacaaccaattttccagttgcaacaacaaaccttgggacatttaacaaatcaaaccat

SEQ ID NO: 58662 - DNA, 353 bp, Zea mays
  Clone ID: MRT4577_153494C.1
gcaacagcaagggagcaaggatactagtcagttgcgcaccttctgatggacaggctgaagcgacaagctttctgatgactactggtgctggcacgttcacttctacagcgacgattattacatatgtattgtagtggtagtctgttttctgacgacgctttggttttgaattgtttcatttttgtaattttttattttttttactagattggttgttggtatttgttattttttttttttttttatatttttttttttttattatatttttcttttttgttggattattttattttttttttttttatttttatttatcttatatttttttattttgtttattatctattttt

SEQ ID NO: 58663 - DNA, 318 bp, Zea mays
  unsure (1)..(318): unsure at all n locations
  Clone ID: MRT4577_153495C.1
ttttgngggccccccttttccctttttctggaaagaaaaccaagaccaaatagggaaccgggaactgactagtcacgagattagtcaatgaagcagggacagaaaggtgggacacaagggggtagcaaaagaaaagcaacagaacagctagcagcattcggctttttcttggctaaggcactaaactaacgacatggcgaaactaaaagagccccttcataaacaccggggggaaacaactaaacattaaaaggcagcaaaccaggaagcaaaggggggaccaaacacggaattggctaccccgggacctggaaaacg

SEQ ID NO: 58664 - DNA, 251 bp, Zea mays
  Clone ID: MRT4577_153496C.1
atttggctcgagccgttctgaccgggtattccttcgcacgcacgactgatacgccgctgagagagatttatgagtgcactcctgttaaggacctggatctcaactttatatttcggctgcagaagcatcggtaccaacagttccaaagacaggtcgtcagggactgcgagtttctggagcaggaggacatcatggactatagtcttccggttggtgtacattgtaaggacactagggatcggctattgacc

SEQ ID NO: 58665 - DNA, 748 bp, Zea mays
  Clone ID: MRT4577_153497C.1
tgttacgctccacactggtgtgggtttagccacattaacccaaacggtggaccgggtaggggatgaccatttgcgtctcatactcagtgggaccattgacggtttccatgaatggtactggggcgatggttgggtccaatcccgtttggaaggtatttccctgttgcccctaaatttaggccagacccttagtttactcaagctaaagcaatttgttaccaccgttaaaagcccagtcgtttaagccagggcttttccccttggttgactagccaaagtaagaggcataaaccagcgatacccatcactccggaaagaggattgcggtcaatgcccgtcacccaagccggcattttttccgtataggtcactaattgccccacattgacaatgtaataggcccagaccatgcccccgtggagaccaatgctatggcccaggcgatcgaggctctcgccactccctcagtctttggttccagcgtttggttgcagccttttttttaaccggccaagtttttttgcacattttgcaagggcgcattaatcggcgcaataccctggagcaaatgaatatggtcggccccgaatccatggcgatcgccttgattactgctggttttgtgggtatggtgttcaccattcaagtggcgagagaatttatttactatggggccaccacgaccattgggggagttttatccctatcgttaactagggaattggccccggtgctgacagcggtggtt

SEQ ID NO: 58666 - DNA, 449 bp, Zea mays
  Clone ID: MRT4577_153498C.1
cgtctcgaaaaaaaaaaaaaaaaaaaaaaaaaaaaaaaaaaaaaaaaaaaaaaaaaaaaaaaaaaaaaaaaaaaggaaaaaaaaatataaaagatcacaaacttaaaaacgcaaagcatacaaagtctataaactcttttttacgagaataccttaattctattcccgtggccctagttttacaacctccggtattgggggggaccctgtcttttacccaacttatctcggcttgcacccctttccccttttgcccgctggcgtaattgcgcagaggccctggcctttcccccttttcccccgttgcgcattctgtatgggaaatgggccttgccctggattggggcgttaatcccggggggtgttggcggtttcgccccggtttatctgtacacttgccaggccccctacccccgcccctttccccttcctccctttcttttttgccc

SEQ ID NO: 58667 - DNA, 238 bp, Zea mays
  Clone ID: MRT4577_153499C.1
ttgtcgtctgtgacaaggttgctagcacgggggagtgcttctcttctatgacatctagtgacatggaaacagcgcatgctagcgctttggactgagaaaaccttggctgtggcctcaccgagactgactgtaggtatgttgcaaaatgtggagctggggagctcatgaccaaaggtgacatcggaccattcgtgactatcgcactgagtgcttgatctagtgaggaaaattatgggca

SEQ ID NO: 58668 - DNA, 426 bp, Zea mays
  Clone ID: MRT4577_15349C.1
atgggcaagaacaacaaacgcaagcgcgagccgactcctccatcagaggactttggcgactcggaatactcagaggaggagttctcctctgagttcgaggggtctccagctcccgtccctcccccagcgtcgtccgatgactcggatgactctcaggggattgccgcggaggtctggacttacatccgggccgtcgagcgctccgggctcgcgggctcggatgagtcggagtactcctcggacgaggaggactcgtccgaggaggacggtggcggcgatggcgaaggcgacgacgacgacgacgacgacggaggcgatggcggcgacgacgacggtgacggcggcggcaggggcggcaacggcggcagcagcaggggtagcggcggcggcggcagcagcaagggcagcaacaaggccagtggctag

SEQ ID NO: 58669 - DNA, 691 bp, Zea mays
  Clone ID: MRT4577_1534C.1
ccggccggcgaaatcttcctccggccggggtgattgtctggcctcgtcgtcctctggacgacttttcccccgtcttccacaaccccgagtccccaacccaccacggcgttgcggaatccacctgcaactgcaagcccacgaaatcgagccgagccccgacgccaccaaatcgtgtggcctcggagatcgagcagggtctggaagaaccaggggagagaccgtcagaagaggaggaccagcagcaggcaggcggtggtggcgaagtcgtcggcgtcggcggccggggtatctacgatgataacccggtcgaagctggtggagcaactgcgcgactaccagatccgatcccagcacaatgttgcagatgttctcctgtgatgtgtgatgtatcagcagggtaatacgaaggcaattccacaatgatggtcgcacaaacgaatatcgccatggacctggtcatacgatcatatacggttaagtcagataaacaagaaattatggctttggctaatgtttgcaaggaaatatagtagtttcaaagtagcagcaatggaatgtttcatctgaaaattcatcttacgttagatgggatggttgattataagtctatcgcttaaactttgggggaaatgaccgaatgtgatagtgatatattattatctcgaaaaaaaaaaaaaaaaaatttgcggcc

SEQ ID NO: 58670 - DNA, 517 bp, Zea mays
  Clone ID: MRT4577_153500C.1
acatgaacactgcattggactactagctcatacgcttgacataaaacactggactaatcaggcatgcaaaacatggcatatcgctctgaactgggggaccactaaccaaaaaaagtgctcgtatgaggacacacattccggtgccagacattccatcacaatgctctaagctacagcgcttttgtcctgctttctctgtaactgatacattacgaactcaagctttttaccctcaacgagtgtccaatggacctatgccacactgcccagggcgggaaaaaaaggatgccaccaaccgtccactggcaaatggctcctcaatgaggagcccaagggtacgtccatccttggccttgttaagctctctatggacatggctgttgtttttagtttcctcaggtggtggctcaacctgttggccctcagcattatccttctttgcaggaagcggttcattcttcctaccaatgtcaactccataacgagtgaggcaccactggttaaatacgcaccatca

SEQ ID NO: 58671 - DNA, 643 bp, Zea mays
  unsure (1)..(643): unsure at all n locations
  Clone ID: MRT4577_153501C.1
gccggccgggtcggggccttccataatccattccattacacgcgaggacccctcccggttacttaaatcccacgcacctttggttgctcagcatgtcttgcgggccctgtcgtctcgtcgccactactgactgctgaggagaggagaggagcatggccctgactaacgtcttcgtcgtcctcctcggtaccgcattggctgtgctccccttctcccctgccgatgccggcgtggtgggcgtgagctacggccgattagggaacgacctgccggacacggcttcggtggttaagctgctgaagaagagcggcatcacctcggtgaggctctacgacgccaactcaaaggtgctcaaggccctggccaacaccgggatcacggcgatggtaatgctacccaacgacaagctcgccgcggcggccgcggacccatcgagcgcgcgacggtgggtgcggaggaacgtggcggcgtactaccccgccacgcagatccacgccgtcgccgtcgggaacgaggtgttcgaggaggncaagaacctgaccgggcagctcgtcccggccatgtccaacgtgcacgacgtgctggtgaagcttggcctggacggggccgtgaaggtctccacgccgatcgcgttcaccgcgct

SEQ ID NO: 58672 - DNA, 492 bp, Zea mays
  Clone ID: MRT4577_153502C.1
aaaaaaaaaaaatttttaaaaaaaaaaaaaaaaaaaaaaaacaaaaaaaaagggggaaagaaaaatgtggaggaaaaaagtaaaagatccgagactcatgcaaaaaaaaaagggtattgtcgttgggtcgtctttcagggttttcctcgctcgcgttggtctggccctgggggctttcttttttttcttccccggggttcccccctttttgggtcgggggggggccagtccttgcccccggggagcccgggttgacagccggggtctttccccccttggggcccttcccctcttttcccctttctgttttttggcctggggtgcccccgtggccccgccttttttatcggggcgtttgtggcggtgccccctgggggcccccctttctttggccgtttcgctctcccgggctgggggggtcttcccccctccttttcctttccccccgttccgcgtcttggccccccgcttttttgtttttggcgctttttt

SEQ ID NO: 58673 - DNA, 359 bp, Zea mays
  unsure (1)..(359): unsure at all n locations
  Clone ID: MRT4577_153503C.1
gctccagaccattatctttttttattccagaacacanaaaaacccgggcgacaccatgagggtggtgcgagtgccccacgctattgtgggtggggtgcgcactgcacctncacgcatacaagcggcggctgcggctgccagccaccgccggcgggtcatctaccggcgccggagcatatgccacctgcggttcacctgccacctccggtgcatattccaccgtcggaacacctgccgacgccggtccacctgccaacgccggtccatgtgccgccggcggttcatctgccggcgacaccatgccactaccatactcaaccgacccggcctcagcctgatacccagacacacccatgccc

SEQ ID NO: 58674 - DNA, 760 bp, Zea mays
  unsure (1)..(760): unsure at all n locations
  Clone ID: MRT4577_153504C.1
ccggccgggaaaaagcttcacagctacgcctcaattcacccatcgctccctgggtttctcgaccaccatttttgaccgacaatctttcacccgtacgaaagattaatcgcaatattttcaaaatggctggcgctgcacgagccctcggcttcatgtaccgcatggcggtccccgcctcagctgctgtcttcctaggcagccaggctctatacgacgttaagggaggaactcgtgctgttatctttgatagactgtctggcgtaaaggaggaggtcatcaacgagggaacccacttccttattccctggctgcagaagagcatcatctttgatgtgcgcaccaagcccaggaatatcgcaaccaccactggtagcaaggatttgcagatggtcagcttgacactgagagtgttgcaccgacctaatgtcaaggcccttcccaagatctaccagaacctcggtgccgactacgatgagcgagtcctcccctctattggtaacgaagttctaaaggccattgtcgcccagttcgatgccgcagagctcatcacccagcgagaggctgtctccgaccgcatccgcaacgacctcaccctccgtgccgccgagttcaacatcgcccctcgaggatgtctccattacccacatgacctttggncgtgaattcacaaaggccgttgagcagaagcagattgcccagcaggatgctgagcgagcacgattcatcgtcgagcgtgccgagcaggagcgtcaagccaacg

SEQ ID NO: 58675 - DNA, 1699 bp, Zea mays
  Clone ID: MRT4577_153505C.1
cattgggtacctcgaggccggccgggaccgagggccgctcgacgattttatccattcctcactcgtctctgaaactcaagcgaaagccatcaccccgaccccaatcccacgttcgccacgtgcgcgccacctcccccaccgcgtccgcgtcgccggccatactccatcgcgaacgagatcacgggctggtttcgcgggccgaccatggggacgctcatccggccggggcccgccgcgtcgcctctccccatcgcttccccctcctcctcatccgcccacgtggctgtcgttggcggtggcgcgaggagcttgcggcatcgggtgtcggtgtcggtggcggtgttccggtccccgagtacgcaggttctggcgacgagatggcgccgccggagaggtatggttgtgcggtcggatgtcgtcgccggtggcgcagccgccgcggcagctggggattcgacgcgggcgctcccaggtcagcaattggcttcaagagtcagaggggtttgcttctatttggtgactgcagttgcagcaatctttttgtttgtagctatggttgtggttcatccacttgtgttgctatttgaccggtaccgtaggagagcacagcactacatcgcaaagatttgggctacggtgacaatctccatgttctacaatcttgaggtcgaaggaatggagaatctgcctccaaatagctgtcctggtgtctatgttgctaaccatcagagcttcttggatatttatacccttctaactctagggaggtgcttcaaatttataagcaagaccagcatctttatgttccctattatagggtgggcaatgtatctcttgggtgtgattcctctgcggcgtatggacagcaggagccagttggattgtctcaaacggtgtgtggacttggtaggaaaaggagcttctgtatttttctttccggagggtactcgaagtagagatggcaagttaggtgtatttaagcgtggcgcattcagtgtcgccgcaaagacaggagctcctgtgatagctattactcttatcggaactgggaaattgatgccttctggaatggaaggaattctcaattcaggttcggtaaaggtgattattcaccgacctattcaaggcaatgatgcagaaacattatgttccgaagcaaggaatgtgatagcagacactcttcttctgcatggttatggagcccattaaagcaagtggggtgctttggtctgttttttcttctgaacgagtgctttggtctattctttagtggacttttcagagcacaagacttgagagttgagacaaagctcgttgcagatgtaatcctgtaaaggcaagagggaggaaaatggcgtgaattggcggttgtaacatgtggtcttcaatttgttgtaaaccctacttatttttgttggtttgatagtacaaagaaatgtaaaaggcagaggccatcttcattggatggaaaatgaagctcacgtgatattttgccattttggcctagtttgtgaaccctatttttccagaaaaaaaactaaattttcatagaaaaatggaaatcgtgtatgataagtatgaaaatgaggttttcaaactagtccttcaatggagtttgccctggattttcacatagtaggcactctgaaaagcaccttgtttcaaagcgatacgctggagcatcaaatccgtggataac

SEQ ID NO: 58676 - DNA, 391 bp, Zea mays
  Clone ID: MRT4577_153506C.1
ggaaccctgcacttttttgacggggggggccattggccaaagcggggggagagcagggacaaaaccatttccagggaaagccaaaccaaaaaaaagggggccggatcccaacccccccccccaaaaggggattgacgagcccacaatgctgaaaaggaaaaaagcccgccccacaaaagaaaaaaacccccccatggggccccccaccaacgagatgaaggccccaaaaaagggggtgaaggacccccccacagggaggaccccccccacaaggacccggtttgggggcaaacctaaccactccgggccgccattggggggggcgaacctccaaaacaactgggggaacaaaaccctggctcgacaaacccaaggaacgggggcctcaaaa

SEQ ID NO: 58677 - DNA, 196 bp, Zea mays
  Clone ID: MRT4577_153507C.1
gtatagtgatgcccaccaggcgtcagggtggtacaacatgctgcgctcagggttcatccagatcaacaaccagatcgccatggacgccagcatctttccgacctctagctactgcgactcacaagtttatatcaagatactgatctagattgaccacaaggaggtcaactggtggatgcattttatcaaggactac

SEQ ID NO: 58678 - DNA, 243 bp, Zea mays
  Clone ID: MRT4577_153508C.1
gataagtgaacttattaaaggaaagaagaaaaatcaacaatgttggatttaaagcaaaaccattaattcattgatgacatcataacaaaggcaggagaacccaacaggcaggataaaataaaaattatggcccggaaaatccaatttgaacagactattgggttcccacttgcccggggttttggtcaaataaaaaaaacctggcgccgttaaccaggaacatcgatatgccgccgttttggg

SEQ ID NO: 58679 - DNA, 637 bp, Zea mays
  unsure (1)..(637): unsure at all n locations
  Clone ID: MRT4577_153509C.1
aattcggcacgaggacaaagataaaattctgtttctgaagcgtcgagcactgccaccactatcagacattgcaaagcctgaggagaagcttgctggtctaaggattgatggaaattctaatactaggagccgaatgtctttctacactggaataagtatccataagctgttagacgatgggactttgggcccagagaaagaggtgcatggatatccagtaggtgcaaggattaattttgtcacctggtcacaagacggccgtcatatatccttcagtattcgagtcgatgaggaagacagcaaaagtggaaagctcagagtgtggattgctgatgtggagtctggagaagcaaggccactttttaaatcacctgaaatatacctaaatgctatttttgacagctttgtatgggttaatgattgtacactgctagtctgcactattcctgcgacacgtggagatccaccacataagccatcagttccatctggcccgaaaattcaatctaatgagtcaaagaatgtagtccaagcgagaactttccaagatcttctgaaagatgaatatgatgcanaactatttgattactatgcaacctcnacagccttgtgttggcctctttggatggaacagtga

SEQ ID NO: 58680 - DNA, 254 bp, Zea mays
  Clone ID: MRT4577_15350C.1
agagaatgtgtacgcacaggaaatacctactcaagccctgcgggtgatcctagccaaaactaaccagtgttttcaacaagactggatgtttagcgaggctaatcatgacccggaaacttggaaggcaccagcagatgaatgggggcttgactcggcgtaaggatattaccatgacaaatgtactggactttactacgatccaaactctggcttctatcattgtgacaattgaagcaagaaggttacccacgaag

SEQ ID NO: 58681 - DNA, 550 bp, Zea mays
  Clone ID: MRT4577_153510C.1
aaaggggaaggttgggggaaccttcctttttttccaaattggaaagggccttcgccagggggtccttttggacacaacaaaacccgttgtttaaaaaattttagtgggcccccccaatggaccaacccaggggggggaccatttttttttttccctcccagggccttcccgagttaaaaattggttgaaaaaacccgtttatttcctgggatagggggaggttgggccctacctgggcctgggccctttgggtttttgtttaaaaaccaacaaaatattgggggggggggaaataatgggggaaatcattggccttcttttttttgggaaacttcagttttccacccttgttggaagccataattaatttttttgaaaaaaaaggcagttttttggttgaaaaaaaagaattttttttccccacattggtttggaggggggactaaccctttggaccttgttttttctaaaacctttttttacccccttccacggggggcaaccccctttctttaaaccaggttgcacccttgtcacggggggggccctg

SEQ ID NO: 58682 - DNA, 672 bp, Zea mays
  Clone ID: MRT4577_153511C.1
tgtctgtgatctcttcccaataactatgactgaactgtgctgaatagtcatgtaagtcaggctctcctcgtgtctagatcttgtggtctggtttgtaaactatgcgataaaaagtcctgacttcgttgtggtcgataagatgtctagtgtggaataaatagtttgttggacacaaaaagtgattccatccaggggaaatcagtgtgcccatatttcatgcattgtggaaagtgcgaaaaatattgtgttgtattccttctaatgtgagtgcatttgtattgtttctgtttcttgcaactactacgcaaaatatccagggtctcggaaaggatgccagcggtatcaaggaaccagtccaggcaaaatccgtggacgtcagggctggactaggaagtcagcagcggaaggctgatccaatcctggaggccaaagccggagacagctacaaaaccatcatccagaagaaggccatggcaagattcaaggagatgtcctagctagaccttttttttttgtatattcggttgtcgtattttgtcgtccgtttttaacagcatgcatttttttgtttgctcgtgtgttttttcttcacaaacctagccactgaattgtgatttattatcctcaaaggggcaccgtgtttatcttattattactatgtagttcgagacc

SEQ ID NO: 58683 - DNA, 390 bp, Zea mays
  Clone ID: MRT4577_153512C.1
acgctcggaaaggatggcagcggtatcaaggaaccagtccaggcaaaatccgtggacgtcagggctggactaggaagtcagcagcggaaggctgatccaatcctggaggccaaagccggagacagctacaaaaccatcatccagaagaaggccatggcaagattcaaggagatgtcctagctagaccttttttttttgtatattcggttgtcgtattttgtcgtccgtatacttttttttttacaatctgtgcactgttttgcttgtgttttttttcttcacaaacctagccactgaattgtgatttattatcctcaaaggggcaccgtgtttatcttattattactatgtagttcgagaccaaaaaaaaataattaattttttatttat

SEQ ID NO: 58684 - DNA, 211 bp, Zea mays
  Clone ID: MRT4577_153513C.1
aaaaaaatacaataaaaagaaaaaaaaactaaaaaataaaaaaaaagaaacactctaggggagtgagctaccccatgggggtgttgaccaaaaagacatcggatcaaggagatttctgatgatgaagatgaggacgagaagaaagactctgtggagggaaaggtccctgatgttgactaggataaggaacagattgaacatatcacatttg

SEQ ID NO: 58685 - DNA, 208 bp, Zea mays
  unsure (1)..(208): unsure at all n locations
  Clone ID: MRT4577_153514C.1
gagagcgnaatgggngccgtcccaaagtcacgcttaccaccttcatcgacaggtacatcggtagctcatgagcatgccatgcatgcatgcatggccgactaaacacatatgtgtttctctagtacccttggcatacgggatatgatcaattaaagcagccagccgtctgctactgctgggttttttttaaaaaaaacaaccaattttg

SEQ ID NO: 58686 - DNA, 342 bp, Zea mays
  Clone ID: MRT4577_153515C.1
gagctcacttttcggtggccgcccttttttttttttttttatggcggatgtccttgacgcggcggtgagaaatacctgatattaagagtgacataaccgttccagttacagaccacaagaccccctatgtgtttcagcaccttcgggtcatctctaccggaatgcaccagtgtacaacacataattggacggcttacaacttgctgacagaaagcagacaactgctcaaacgctactcatatatacgagctgtgcagtcatctatccaagggttacaattacaacgcaaatgactgaacattcattcattcattcatgcaggccaattctacccccatttga

SEQ ID NO: 58687 - DNA, 481 bp, Zea mays
  Clone ID: MRT4577_153516C.1
acggcctcacaacacgatctactataccatactttaccaagaaaggacgccaccgccatggcaccccagatgctcgcatcgcccgctctcctagctctctgtgcaagcgccactagtgcgacccagattccaaggcacttgccaccagtcatgccattgagcaccatgaacccagtgcgtgacgcaccgcatgacgcaccacgggactgacaacttgacgacgtgtccgaccatgatgctgcggcaactgatggccataccgcttacgacgacgccagggatgacgccacacatgacgacgccgaaatgatgtcaccatcgatgaggccgagtttgtctttttccacccccccccccgagcatggtggctgaaaagacgatggcacacagcgactgcgacaccgacaaacacattacgccggcacagcagataccagtcgtgatcaacccagtgaccacgaccattcccaccaaggactta

SEQ ID NO: 58688 - DNA, 217 bp, Zea mays
  unsure (1)..(217): unsure at all n locations
  Clone ID: MRT4577_153517C.1
aacacnnnnnnnncaancaacgggaaaccaaaccagaattccttttttcttaaaacccccgccgcgaaaaaagtgttcaccaaaaaaagggtccaaaggggataccccggcacacccaccataaatagagcagcgccggggcacaaactgcctctggatcctacacacaagaccgggaccatccgtttataccacccccaaaaatttggggccaggg

SEQ ID NO: 58689 - DNA, 433 bp, Zea mays
  Clone ID: MRT4577_153518C.1
gaaggaaaatcacaattttaaactagaattaagcccccaaaatgggtttgcacacaaaagggccacacataacatttttttccataacagaccccaaccgttttacagacataataagcccgccggttgcatttataaagatgccggggatatagtaaaaacgtacataggcggggggggggtttaatttggggggtatccctcccatgaaggttcttgggttagggcaggttccactgaactgagcctgggaaaagtcaaacccagggtttttttcctgaaacctttggagcataagccgtttttgtttttgatctgcagaatatggacccaaaatcccttgccctttgtttggaaaagaccattgttcccccttttttttttttttggagggatatatgcatcccaccgctttgaaaatgtcaaaaggggg

SEQ ID NO: 58690 - DNA, 540 bp, Zea mays
  unsure (1)..(540): unsure at all n locations
  Clone ID: MRT4577_153519C.1
cggattcgtgggcggctcatcttcaccaacccgcgctgctccagcctttagctccctggtcgccgcgcagaggagctccctcagctcgttcctcctgtgtcgcgccccagcccctggttcggctctgctcctccctgtgcccatctcccatggcggctctctctgtccggccaccggcgcctttgattacctctctcctgattttgncgctggtgccttgngcagcgccggatgtcctcgcgctcggctccccccccccccagctttggtggtgttgacaccttttcggaggcgccaattactcaagagaactagcggcggtgctctctgcacaggggcggacggtccgcgcgctggggccggacggtccgcggtctgatgcgaggcggcggtgctttctggtcaggcgcggacggtccccggcacatggccggacggaccgcgacctggtgcaggagcccgcgtttcctgcctgacggtcgtactgttcccgcgtgcgcaggggcggcggtcgaccggcgtcggcgcctggatctcgct

SEQ ID NO: 58691 - DNA, 441 bp, Zea mays
  Clone ID: MRT4577_15351C.1
atgggcaagaacaacaagcgcaagcgcgagccgactcctccatcagaggactttggcgactcggaatactcggaggaggagttctcctctgagtccgaggggtctccagctcccgtctctcccccggcgtcgtccgatgactcggacgactctcaggggattgccgcggaggtctggacttacatccgggccatcgagcgctccgggctcgagggctcggatgagtcagagtactcctcggacgaggaggactcacccgaggaggacggcgatgacgacgacgacgacgaagacgacgacagaggcgatggcggcggtgacggtgacggcggcggcaggggcggcaacggcgacggcaggggcggcaacggcaacggcaagggtggcaacggcggcagcggtggcggcagcagcaagggcagcaacaaggccagtggctag

SEQ ID NO: 58692 - DNA, 290 bp, Zea mays
  unsure (1)..(290): unsure at all n locations
  Clone ID: MRT4577_153520C.1
gngtgacncagaattagggttcgattccngagagngagcctganaaatcgctaccacatcncaaggaaggnagnatgcgcgcanattacccaatcctgacacggggangtagtgacaataaataacaataccgggcgcgttagtgtntggtnattgtnatgagtacaatctaaatcccntaacanaggatccattggannngcaagttctgncgcnctcctcgngctcanaacaccagcgcnctctccggctaaggnncatccnatnnatgngcctcttgcggattccgt

SEQ ID NO: 58693 - DNA, 755 bp, Zea mays
  Clone ID: MRT4577_153521C.1
cattgggtacctcgaggccggccgggaaagatcacaatacccacctccatttagctactactactccctcgctgtcttccccaaccaacaaatcgacctagctaggcacaagagcgctagacgccgcagcgcagcacgcaccacccaccgagcggcggcggaggcagggcaatccgcagggagcagaggccgcgcgcgcagcgcaggcatgggcgcgccggtgcacggcgccctcgccttgttcctcctgctcctggtgggggcaggggcggcgcccgaggagacggcgccgcaggaacccacattgccagccaccggctccggcgctaccggcgcagcggcggtcggagtcaactccaactccgtgctggtggcgctgctggattcgcactacacggagctggcggaactggtggagaaggcgctgctcctgcagacgctggaggacgccgtcgggaagcacaacgtcaccatcttcgcgccgcggaacgaggcgctggagcgggacctggacccggagttcaagcgcttcctgctggagccgcgcaacctcaggtcgctgcaggcgctgctgctctaccacgtcctccccacgcgcctgccctccgactcctggcccgcggcgtcccaccccacgctgtccggcgaggaggtcgagctcgcccccgccggccggcgacggtgccgagatgcgcgtcggccacgccgacgtcacgcgcccggacgccgtgctcaagcccgacggagtcatccac

SEQ ID NO: 58694 - DNA, 623 bp, Zea mays
  Clone ID: MRT4577_153522C.1
attcctgtagagcccagctgacggacgattgaaccaccgacagatcacatggacgcctccgcctacaccgtatacgggctcgacggcgcctccctggccagtcgaccggagctctccagcagattcacacggaggatacgaccggcggggaggaaccccctgatgagcaggaacctgcacaggaatggtatgatcacctgcatgacatttccccgggactggctgcggagggatctgagcgtcatcggcttcgacctcatcggctgtatggggccgtccagcgtcccgcgcatcaacggcaacagcctcacggggctcttcttctccagaatcgcgcaggagactggccacttgcccacacccccggccgccacctcccagttctgattgcgcttagcgacgtgctacctgagtctgtgcatcatgctcaccttcgcacagagtggagtcaagggcatgacctatgactacttcgagaagtgaagcgcataatatcctatgacatcattcctggtgctgcgatgcgtgcgtgctgtgccacaatcaaacctttgctgtatagtactccgagttcgtcaaatgtaatgtatgatgctacttttgagcttcaatgcaaaatctat

SEQ ID NO: 58695 - DNA, 643 bp, Zea mays
  Clone ID: MRT4577_153523C.1
ctcgaggccggccgggccgggagcaccgtccgataacccacccatgcgcttcgagctgcccaggcctcggagctttctgccgtgcttccttctacttcggaggatcccttggcttcttccctcctgtccctgccattccccacgatcgagcccaacctgctcgaattgcaaggactcccatcccacgtatttctacagactactacagtctgtgctgctcacgagatggcgacagtgcggcggccgtactgctgactatgatctagtgcgatccacgggcaactgcctccctatctcaagctcctctctccgtgactgctgttgatcggaggtgagatgctctgttacttttgtatgacgatgaatcaagcggtgggtatgagcatcttcactcccgctcatgataccagtagaggaacctgacgccttagacgagatcactgctgcactcgatcgaagcctgctcgaagacctagtgctgttgctgagactgcctgcctgccagccagatgttctacagcgatgatatgctggaacgcactggtaccttccataacgacatatctcactcagggacagctcttggtctgtagaaagaacaattcttctctgatagctatacagactgcagcgactcatcaag

SEQ ID NO: 58696 - DNA, 333 bp, Zea mays
  Clone ID: MRT4577_153524C.1
tctggttgtgcacgcgcgcatgtcacaaccagatgctataatcatgggtgtcgtattcgctatcgtgctggtcaaagtcgagagcaacaatgacatacatagggtagatgattccggggtcgtaatcaaggattgtgagcatcacgcagatgcagaactctattctgtagcagccgaatcgtaggaagacgccaaagggcgggaggattatggccaagaggatctacaagaaggtgcaacagtaggcgtgcgccatgacgatctcgaagctggtcaggatcgggactgatatgttgctatgcgtagagcccggtgactagttctagatcggga

SEQ ID NO: 58697 - DNA, 1255 bp, Zea mays
  Clone ID: MRT4577_153525C.1
ggataaacacgacagacatttttttttgctgtccatcaaaccaaacactcccttagttctgcagctgtttcaatcacattttagatttcatcaatcataaccatgaacaatgttctgtacagcaatcctgtgaacgtcacctttttgacatataaccacattccatcagaacatacaacattcaacaacactacagcaccaacttgcaaatcttaccaatacctaaagtagcagaacactggagaaacttcttctcaagtccctgcgatacaaatgctacaacatttctgcctgcaccttcgtagttcaaaggaataattgtcctgctgtggctattgtacacccaagcaatgcaccagcaacaacctgggttggtgtatggcctaaaagttctcgcagtggtcttgtttcagacaagggatgttcagaaggaagttcacaaactatttgattcagtaccgctgcttgctttccagcatgcaatctgataccagaagcatcatacattaccacgcttgcaaatatagttgctgttgcaaagagggagcagttaaagccatcttgcaacccaattgctactgctagtgctgtaaccgtggcggaatgtgatgacggcatgccacccgagccgataagccgcttgggatcccatctgttctccttgtaccgtgtgacgaagaacttgatggactgggcgacggcgaagccgagcagggcggcgacgagggggtagttgcggaagacggcgaagtaggagaaggacccggatccggcggcggcggcgaggaggaggcgtcagcgccagcgtcccccatggccgaaagtccgtggctcgtggacgggcgggcgggcggtccggccggcgcggcgctgccctgcctaatcctgccctgcgctccctccctgcaggacgttagcggaccggagcgcgcgccctccggctatataaaccgcctccgcgatccgcgctcactggaaactcctccttcgctttgcttcgctcccgtgtcccgtctgtcccctcgcctcacctgcttcgcacggctcgggctcgcacacgcaccgcgccaatggcgacggcgacccgggctgatgaattctactctattctaatcgcagccgcaggacgcccacggatttgtttaccgctcaaccaggcgcccaggccaggtaggcactcctcgggtttatttgggtgcgccggcgcggcctctcggtctcgggcgtgggcgagaggagcagctcggccgctttt

SEQ ID NO: 58698 - DNA, 1401 bp, Zea mays
  Clone ID: MRT4577_153526C.1
ttgggtccctcgaggccggccggaaaaaaaataaaaaaccagcttccactccaagtctgcctggctgctcacctctctgctccttccttcggcctttccttccttccctccctccctccctccagagtccggagcagagcagtcaaccgggctgtcgtcgccattggtgcggtacgtgcgagcccgagcggtgcgacgcagggggggggaggggccagtgagagagacgacacgcgagagcgaagccaagcgaaggaggagcttcctggcgcgcgcggatcgcggaggctgtatatatatagtcggagggcgcgcgctccggtccggtaacgtgctgcaggtggggggtggcgcagggcaggattaggcagggcagcgccgcgccggccggaccgcccgtccaggagccagggactttcggccatgggggacggtggtgctgacgacgcctcctcgccgccgccgcatgacgggggcttctcctacctcgccgtcttccacaactaccccctcgtcgccgccctgctcggcttcgccgtcgcgcagtccatcaagttcttcctcacatggtacaaggagaacagatgggatcccaagcagcttatcggctcgggtggcatgccatcatcacattccgccacggttacagcactagcagtagcaattggattccaggatggctttagctgctccctctttgcaacagcaactatatttgcaagcgtggtaggctatcagttctccattccaacccatgttccttctgaagagcacaagaggttttacttcttcaatcttgattgaaaaaaaaactggtcatttatattgttgtcgcttggatgcaattttcagccttgttggacgttattctgttgcgtgtgggcatattgtgcacacgtttatgctgacttcctccaatttttgaggtctcacgaatttattttttgtgacttggcaggtaatgtatgatgcttctggtatcagactgcatgctggaaagcaagcagaggtattgaatcaaatagtttgtgaacttccttctgaacaccccttgtctgagacaagaccactgcgagaacttttaggccatacaccaactcaggtggttgctggtgcattgcttgggtgtacaatagccacagcaggacaattattcctttgaactacgaaggtgcggcagaaatgttgtagcatttgtatcgcagggacttgagaagaagtttctccagtgttctgctactttaggtattggtaagatttgcatgttggtgctgtagtgttgttgaatgttgtatgttctgatggaatgtggttatatgtcaaaaaggtgacgttcacaggattgctgtacagaacattgttcatggttatgattgatgaaatctaaaatgtgattgaaac

SEQ ID NO: 58699 - DNA, 642 bp, Zea mays
  Clone ID: MRT4577_153527C.1
ttttttttttttttttcgagggaataatgttgcattcaaaagaaagcatcatgtacatggtatgataattacatcttaaggtttccaagagaaatatctggtcccctaatacacagggcaaactactctatgaaaaggggcagatatgaaaaaaacaactctggtgagtgtgcagaggcacggtcacacacgtcttcattttggttggcgtccatggcctccatgtatcgtttgaatcaaaaaagaagaatggaccgggatgcaggcggcgcgcttgatcagcagcagtgcgtgcgcgggttggaccccgatttagcaccaagcaacaactgcgtgagcatcccgacgccgctctctagccagctgtcggtgccggcgtccccctccgccagaggcctggccgcagcggcgaggacactcaaaacttgcaccaagaagatgactagcaacaccaccttggcagtcttcatcgtcgtcgccattattgttgttgatgcagtgattagtgatggatgcgtctgaactctgaagtcgaacgcagcacgaaggcgtgttctgggtagagtcaaaaaacgagcaggcagctgggcgagcttgcttgggaggtgggagttccccggtttctctctccttgtgcttacc

SEQ ID NO: 58700 - DNA, 169 bp, Zea mays
  unsure (1)..(169): unsure at all n locations
  Clone ID: MRT4577_153528C.1
agcaatacagagaaccagtgccgcgtagcgctacnagctacggccctcagctaccgtacttacggcgcatgctagcacgcagcgcgctggacatgcagccgacgcggcgctgaggatgagcacctagcagcaggtgggcctagagctgggacagccctgcgttgtgtct

SEQ ID NO: 58701 - DNA, 509 bp, Zea mays
  Clone ID: MRT4577_153529C.1
ggggggttttttttttttttttttttttttttttttttttttttttttttttttttttttttttttttttttttttttttttttttttttggaaattcaccccaacccaacgggggcctgggtttgggtcccccggggccggggggggggtgcccaaaaaaggggggggccccattcatggggggggcttaccgccccggtcaacttggcgcccaaccccaaaaaaaaaaaaccccggggggcggggggatttgcaatgccccaaagggtatcggcgaccaggcctcccggaagtttcggatggccagtttcctgacatcaggcattccctcatttgggaaccccccccccttgagggggggctccattgcccaaaccccttcctttttaagttcaggcaccccacttttggcaatccccaattcaaggtctttctcgatcttaggaagaacccccttcccgaagcccacctttgggttaatcttggcaaaccccgccacaaggggggc

SEQ ID NO: 58702 - DNA, 432 bp, Zea mays
  Clone ID: MRT4577_15352C.1
atgggcaagaacaacaaacgcaagcgcgagccgactcctccatcggaggactttggcgactcggaatactcggaggaggagttctcctctgagtccgaggggtctccagctcccgtctctcccccagcgtcgtccgatgactcggacgactctcaggggattgccgcggaggtctggacttacatccgggccatcgagcgctccgggctcgagggctcggatgagttggagtactcctcggacgaggaggactcgcccgaggaggacggcgaaggtgacgacgacgacgacgacgacggaggcgacggcggcgatgacggtgacggcggcgacaggggcggcaatggcggcagcaggggcggcaacggcggcagcagcaggggcagcaacgacggcggcagcagcaaaggcagcaacaaggccagtggctag

SEQ ID NO: 58703 - DNA, 497 bp, Zea mays
  Clone ID: MRT4577_153530C.1
cctcgaggccggccgggattacactcaagaacccaccatcatcacaacaccttccacaacccaccacaacccccaacccccatatctattacaatgccccgcaacggaggagacagccagaacggtcccattgagggccagcccatcgtccacggcaacgccggcgatgcctccaaggtccccgagcacaccaagaacaacgtcgctcccgcccccgagctcgagaagggcggtgctattgagggcatgaacgccagcggcggtggcaacaaggccgaccaggccgagccttcggtcgccggccagaagaactaaattccttcctcacatctgatggtgaaagggatggataacctcctccccaacttgcatttagtctgggaagggaggaacgcaaggagcgatatcgacgatactcctgcgaaagcaagggatgaaacccgagctatgaagattaatgaataatttcaacgaaaaaaaaaaaaaaaaaagcggcc

SEQ ID NO: 58704 - DNA, 342 bp, Zea mays
  Clone ID: MRT4577_153531C.1
gaaaccattgggatcggggggggtagacttatttatatcgctctatatctatgataaacaatcacatattttgccgtactattgactcacgccgacggtgaagggccctaaggctattaaagggacacaatttgtattcccaggcaacccacggccgccttcctacttcagatgggcatttatttaataacattgccttgtacgggctcaaactaagtttaccggtcatgagccatggcctttagagcgtctgtaacataagggcttctataggagaagcctatatccttgtcctttcaccgaacaaccttttgtgctttcaacaccagagaagcgccttct

SEQ ID NO: 58705 - DNA, 497 bp, Zea mays
  Clone ID: MRT4577_153532C.1
attttctgtagtaattacctgatacatgcatgtttttactttctttgtatacctagtttgcaaataagcacactgtaatagaaaagagaagaatataattactaaggaacacaggaacaaccaaaaaattgatctggagcacttaaggcaacgcccggaccaagaaagccatcatcgtttggtggtttgttgtgaaaggggaggcaacatcaatttgatctggagcacttaaggcacgacctccctcaatccttgtatataactaagtacatatagctacactactttcagtttttctcatgattcctaaacttgcagttggagacgatgacgatccaccatgccaaaatcttcccctctctgaccacgcactgacgatgcaacaatagtggcctctccatcatttctagtcatagatctttgaccaacattcttcctcctcataggtgacatcgtaggggatggaagaacggatagcagaaggaagctcatccacg

SEQ ID NO: 58706 - DNA, 252 bp, Zea mays
  Clone ID: MRT4577_153533C.1
gcgcgttggttttttttttttttaaaaaaacatggtgtggggggcttatataggtaaggggcaagcataggttgtttaaattggtccgtgggccagtggtaacagcgggcaagggggctaggtgacatgagatagcactattttagctgattaaggggggggggggggactatccgaaaatggtggtgcggggggtcccattggagtagatgaagttgtttgtgtttgacgatcgtggtggtgggaaagggg

SEQ ID NO: 58707 - DNA, 362 bp, Zea mays
  Clone ID: MRT4577_153534C.1
gattacattgtttttggtgttggtttaaaatggtttaggttgggggaaaaataatgcctgatgcgggggggtaaaaacggaaaacaccaagcccaaaacgctaaaaatgaaccaagagcggggaatagggggaaatgggaggccgacggaccctcccagtgcgtccaggacacagggaaaactgcacatcacgctttccgatcctgaagagccaatagggagtatgcaggccgtcacgccggaaccaaagtaaggaaaatgggggggaccacggagattcctgagtgctgaaacttccgccgaaattcgtgggaaaggaggaaaaggctcggtggtaaaacctggaagaaaaaggggaacgg

SEQ ID NO: 58708 - DNA, 307 bp, Zea mays
  Clone ID: MRT4577_153535C.1
gccgagctgacgcaaacatgcagatctttgtgaagaccctcactggcaaaaccatcacccttgaggtcgagcccagtgacaccattgagaatgtcaaagccaaaattcaagacaaggagggtatcccacctgaccagcagcgtctgatatttgccggcaaacagctggaggatggccgcactctctcagactacaacatccagaaagagtccaccctgcacctggtgttgcgcctgcgaggtggcattattgagccttctctccgccagcttgcccagaaatacaactgcgacaagatgatctgccg

SEQ ID NO: 58709 - DNA, 486 bp, Zea mays
  Clone ID: MRT4577_153536C.1
gcatgcaggcgaaataaagctcggaattcggctcgagtgcggtattcagacctcaagaaagttgatcggggggtgaggcggcacttccacgacgatataactgtcattgtgagctaaacaactcctactgaaaccacgcggtatgtgaaggagccaggcaagaggataaaaaaaaagtaaaggaaaacggagaaggaaaaacagctgttgtgatcagttgtagtgtatttcaccgttcatgttcatttaaaacattttttagattctcaagtctcaacctggtgaccagtgcactgatagcaaggtataagattagattattcttagcttttttatcctctttttttttctcgtccttaccctttagattcactcatgggatatccgatatcaggtgcttgtacattctttggttcaacttgtgataatagttcatcgccccaaaaaaaaaaaaaaaaaagggcgccgccgactagtgagctgtcg

SEQ ID NO: 58710 - DNA, 2092 bp, Zea mays
  unsure (1)..(2092): unsure at all n locations
  Clone ID: MRT4577_153537C.1
gccnnggccggttcttcaaaaaaagggaaaaaaaaaaaaaaaaaaataaaaaaaaaaaaaaaaaaaaaaaaaaaaaaaaaaaaaaaaaaaaaaaaaaaaaaaaaaaaattgggggtaatttttgagagtccctccaaactttgcttgcttgcgctctccatatatcctgtggatcggagaggatgctctgatctacctgtctgttcttcgatcgagtctgagagatttgggaggaggagggaaacaaagcgaaagagcccatcttttttgtctttttggttcggtttcgtggttgcttcttttggaccccgcggaggagcccaccgtttctacaaaaacccaatctttgctgccttctcagcggtcgagatcgataggtttccagatctgaggctccgtgttctggctgtgagatcggaggcgcagcaatccgagcacgcagctagtagggaaagtatccgagaaaagttgcagattttgctgggggcaacggagcgagaacaagttactgcagaaggaaagggcaaaggtgggggaggcgccggagatgagggatgctatcagctctgatggattatttgaaatcttgctggggtccggcatcaccggctgggcgtccccgcaaaggatcggatgccaccggccgccaggacgggctcctgtggtacaaggacggcgggcaggtcgtcgatggtgagttctccatggccgtggtccaggccaataacctattggaggaccatagccaggttgaatccgggccgcttagcacatcggagcctggactgcaaggcaccttcgtcggggtctacgatgggcacggtggcccggagacagcgcgttacatcaatgaccatctcttcaaccacttgaggagattcgcatctgagcacaagtgcatgtcagcggatgtgattcggaaggcattccgagcgactgaggagggtttcatttctgtggttagtaaccaatggtcattgagacctcaattagcagctgtaggctcttgctgtctagttggtgtggtttgcagcggaactctatatgttgcaaaccttggggactcccgtgctgttctggggagacttgtcaagggaactggggaggttttggcaatgcagctctcagcagaacacaatgcatcctatgaggaggttagacgagagctgcaggcatcacatcctgatgatccccatattgtggtcctaaaacacaatgtttggcgtgtaaagggtattatccagataacaaggtcaattggagatgtgtatctgaagaaaccagaatttaatagagaacctttgcacagcaagtttcgtcttcaggaaacttttaggagaccacttcttagttctgatccagcaattactgtccaccaaatacagccaactgataagttcatcatttttgcatctgatggactctgggaacatcttagtaatcaggaagtggttgacatggtccaaagtagcccgcgtaatggaatcgcacgaaagttagtaaagtctgcagtgcaggaagcagcgaagaagagggagatgcggtattcagacctcaagaaagttgatcggggggtgaggcggcacttccacgacgatataactgtcattgtggtatttttcgattcaaacgccatgacaactgctgcctggagcagaccctcggtctctctccgagggggtgggtttccaatccattcaaacacccttgctccattctcggttcctacagagctaaacaactcctactgaaaccacgcggtatgtgaaggagccaggcaagaggataaaaaaaaagtaaaggaaaacggagaaggaaaaacagctgttgtgatcagttgtagtgtatttcaccgttcatgttcatttaaaacattttttagattctcaagtctcaacctggtgaccagtgcactgatagcaaggtataagattagattattcttagcttttttatcctcttttttttttctcgtccttaccctttagattcactcatgggatatccgatatcaggtgcttgtacattctttggttcaacttgtgataatagttcatcgcccccctcttttcgcccaaaaaaaaaaaaaaaa

SEQ ID NO: 58711 - DNA, 284 bp, Zea mays
  Clone ID: MRT4577_153538C.1
gtgtccacctactagcatcataagaagaacaatattgtaccaacaatggccgacaaaatatgctgcgttcttatgctccttggtattgcaggaagtgctgctgcagccaccattttaccgtgatgataagaagctattattgcttttcttacttcatcgctcctatcaccagcggcgtcttatgtatgagaaaaaccaattcttcaacactacatgatacaacaggcaatagcaggcagcatactaccattatcatccttgctgctacaacaatcatcagtact

SEQ ID NO: 58712 - DNA, 449 bp, Zea mays
  Clone ID: MRT4577_153539C.1
ccttgttggcttaccatttttctctatagggaggcgaaaaagagccggcccaaaaaagggggggggggggccccgggggaaacaagttaccccctaaaaaagccaaaaaaaaaacgagccgaaagaaaaaaaagaaaagcccggggggccaaaggagggagctaacaaaaaaaaaaagaaaagcgcccacggccccaaaaaaaaaaaggaaaccgggcgagccggggggaaaaaaaaaaaaaacaacgcgcggggaaaggcggcttgccaatggggaaaaaagggggggccccttttaaaaaaaaaaacggccaacagcggagggggcgggaccgcctggcccggaaaaagggggagtaagcgtcccacccggggaagccccaaaaggggaaaaccctgttcgaggggggcaaacggggggataaaacaagagctgactttggtttcgc

SEQ ID NO: 58713 - DNA, 306 bp, Zea mays
  Clone ID: MRT4577_15353C.1
ccggcaaataaacgacccggcggcgcgcaggccggggcgggggttcaaggacgagccgcggcggggaccacgacaacgcccaggaccacggggggaacaaccacacggcgcaagtaacgaccaccgagaagagccggagacagccgcaggccaacgggaagcagaccaacgcccaggcggcggaggaccagatcgagcggccggggcgcgacaagggcatggccaccaacagggcgctggagcacaagaaccacgacacgcagccaagcagggaccccaacgtcaaggaggccaaggcggagggca

SEQ ID NO: 58714 - DNA, 1024 bp, Zea mays
  unsure (1)..(1024): unsure at all n locations
  Clone ID: MRT4577_153540C.1
tcgggtgctcctcgtcggtcggaactcggaagggtacgccacgcgagagacgcggggagaagcaggcaggaagccaagaaagcaagcacagagccgagcctacagtccaacaagaggaggggagaactcgtcgcgccgcctccgcctccgcctccggtgaactctgccccgtgctttgccaccggggactgcagaagcagctagccatggcggcggcggcggcggcggcggccttgggggcctacaccgacgtcgacgccatcttccacagcctatgggccagatccgtgatggcctcgagtgcggctgggccgggcctatgtctcggcaacggatatctcggctctcgcatcgatgaagaacgtagcaaaatgcgatacctggtgtgaattgcagaatcccgcgaaccatcgagtttttgaacgcaagttgcgcccgaagccttctggcggagggcacgtctgcctgggcgtcacgccagagagccgagccgacagtccaacaagtggagggtagaactcgtcgcgccgcctccgcccccgcccccgcctccgcctccggtggttagttcctctctcctcgtcatctcaccgcccgccccacagaaatctgccccgtgctttgccaccggtgactgcagtctgcagaagcagctagccatggcggcggcggccttcgatgcctacaccgacaagaacgccatcttccgccgcctcaaggccaagcccgagaacaagatgtgcttcgactgcaacgccaagaaccccacctgggcctccgtcacctacggcatcttcctctgcctcgactgctcggncgtccaccgcagccttggggtccacatcaccttcgtcaggtcaacgaacctcgactcatggactccagatcagctgaaaatgatggcgttcggaggcaacaaccgggcacatgctttcttcaagcagcatggatggaccgatggtggcaaggttgaggcgaaatacacatcaagagctgctgaactgtacaggcagatgctcaacaa

SEQ ID NO: 58715 - DNA, 462 bp, Zea mays
  Clone ID: MRT4577_153541C.1
aaatggacccacccaagggggggggggggcctagcgattaattaatccattaaacccaaaaaaaatggggcccttttaacgggcactggggaaaataaacaaaaaaacaccccccgcccggggggaaatggggaacaaaacccaaaggggaaacaaaaacaggccgccgaaaagaaaaaaacgtggaaaaccccctttttttaaaaccccgcccctttttttttctccctggggccccaaaaaaacaaggggtgggaggcacgtaagccccaggttttcctccaatgttaacgaagccaaagccgtccaaacctgggaggctaaaagttcgcccttaaggggctgggggggggttgccttttcgaatcccgggggcccctggggggggggggggggggcggcccctggggcctccttgcttttttagaaaaaaacaaaaatgtcgcccgccgccctgccctt

SEQ ID NO: 58716 - DNA, 1720 bp, Zea mays
  unsure (1)..(1720): unsure at all n locations
  Clone ID: MRT4577_153542C.1
tcataagaggaaaggcttgcggtggatacctaggcacccagagacgaggaagggcgtagcaagcgacgaaatgcttcggggagttgaaaaacaagtggagggtagaactcgtcgcgccgcctccgcccccgcccccgcctccggtggttagttcctctctcctcgtcatctcaccgcccgccccacagaaatctgccccgtgctttgccaccggtgactgcagtctgcagaagcagctagccatggcggcggcggccttcgatgcctacaccgacaagaacgccatcttccgccgcctcaaggccaagcccgagaacaagatgtgcttcgactgcaacgccaagaaccccacctgggcctccgtcacctacggcatcttcctctgcctcgactgctcggccgtccaccgcagccttggggtccacatcaccttcgtcaggtcaacgaacctcgactcatggactccagatcagctgaaaatgatggcgttcggaggcaacaaccgggcacatgctttcttcaagcagcatggatggaccgatggtggcaaggttgaggcgaaatacacatcaagagctgctgaactgtacaggcagatgctcaacaaggaggtcgctaagagtgccattaccgataatgccctgccgtcctcacctgtcactgtgtctgaggcttccaagccatctgatgacttccctgaattcaagctctcagacgcaccagcaccgccggcggagaatctgaatgggaagcatgaacccaagtcccccaaatctgctccacgttcaccaaaagctgctactcatcccacctttgccacttccgtgaagaagcccattggcgcaaagaaggttggaggcaagactggagggcttggtgttcgtaaactcacaacaaagccaaatgaaagcctgtatgagcagaaaccagaagagccaaaacctgctatacctgccttgactgctccaactgcaaaaggtggtccatccttgcattcacgttttgaatatgtggataacgaacaatcatctgattcaagaactgggggatctgtatctcgtgtgagtggccatgtagcaccaccaaaatcatcagacttctttcaagagtatgggatgggtaatgggttccagaagaaatctaagcaacgcctcaaaagctcaggttgaggaaactgatgaagcaaggaagaaattctctaatgccaaggcaatctcgtcatctcagnnnnnnggtactcanaacagagaagagaaagaggctcagctatcccttcagaaatttgcgggctcttcatccatttcaagcgcggatcnnnnnggccgcaatgatgcggacaactctaacctggacctaagcgctgctgatctcatcaacagaatatctttccaggcttcacaggatctgtcttcgctcaaggacatagcaggggagactggaaagaagctgacatctctggcctccaatttcatcagcgacctggacaggatcctttgagcagggcaggcgaggccagcagcagttttgctatcctcctacctgcaccacagagtatatcccttctagcttggattgggtcacggactcgcgggtgcatcaccgacagttgaaagtagttcttgcacagctacagttttgtattctgacctttgcttgttgtgagacccagtccacatgaattgaaggtannnnnattcgtgaatactttcaagacggtgaa

SEQ ID NO: 58717 - DNA, 1971 bp, Zea mays
  Clone ID: MRT4577_153543C.1
gggcgattggggacggctgagccggccgggcaagaaagagctcccgagtcggccaagcggtaccgaacgcacgtgctcctcgtcggtcggaactcggaagggtacgccacgcgagagacgcggggagaagcaggcaggaagccaagaaagcaagcacagagccgagcctacagtccaacaagaggaggggagaactcgtcgcgccgcctccgcctccgcctccggtggttagttcctctctcctcgtcagctcaccgcccgccccacagaactctgccccgtgctttgccaccggtgactgcagaagcagctagccatggcggcggcggcggcggcggcggccttcgatgcctacaccgacaagaacgccatcttccgccgcctcaaggccaagcccgagaacaagatgtgcttcgactgcaacgccaagaaccccacctgggcctccgtcacctacggcatcttcctctgcctcgactgctcggccgtccaccgcagccttggggtccacatcaccttcgtcaggtcaacgaacctcgactcatggactccagatcagctgaaaatgatggcgttcggaggcaacaaccgggcacatgctttcttcaagcagcatggatggactgatggtggcaaggttgaggcgaaatacacatcaagagctgctgaactgtacaggcagatgctcaacaaggaggtcgctaagagtgccattaccgataatgccctgccgtcctcacctgtcactgcgtctgaggcttccaagccatctgatgactttcctgaattcaagctctcagacgcaccagcaccgccggcggagaatctgaatgggaagcatgaacccaagtcccccaaagctgctccacgttcaccaaaagctgctactcatcccacctttgccacttccgtgaagaagcccattggcgcaaagaaggttggaggcaagactggagggcttggtgttcgtaaactcacaacaaagccaaatgaaagcctgtatgagcagaaaccagaagagccaaaacctgctatacctgccttgactgctccaactgcaaaaggtggtccatccttgcattcacgttttgaatatgtggataacgaacaatcatctgtttcaagaaccgggggatctggatctcgtgtaaccggtcatgtagcaccaccaaaatcatctgacttcttccaagagtatgggatgggtaatggattccaaaagaaatcaagcaacgcctcaaaagctcagattgaggaaactgatgaagcaaggaaaaaaattctctaatgctaaggcaatttcgtcatctcagttttttggtactcaaaacagagaagagaaagaggctcagctatcccttcagaaattcgcgggttcttcatccatttcaagctctgatctttttggccgtaccaatgtggacgattctaacctggacctaagcgctgcagatctcatcaacagaatatctttccaggcgtcacaggatctgtcttcactcaaggacatagctggagagactggaaagaagctgacatctttcgcctccaatttcatcagcgacctggacagaatcctttgagcaggcgaggccatgccagcaaagcatttttcctaccttgcaccagaatttcccttctagcttggattgggtcacggactcgcgggtgcatcaccgacagttgaaagtagttcttgcacagctacagctttgtagaggattcctattacgcatttgtattttgatctttgttgtgagaattgaaggtatttttattcgtgaatacttcacaacggtgaagcatacactacagtttacatacgttgaggttgcttgtatcttggaaggaaggttcatactatgtcctgtgcgtgtggtaaatgaaagatactcttgtcaaggttgactgtcatgataatggaattcgtatctggtcgttttcgcgaaaaaaaaaaaaaaaaaagcggcc

SEQ ID NO: 58718 - DNA, 558 bp, Zea mays
  Clone ID: MRT4577_153544C.1
gagcgcgggtggacgccatctgcaagaagtacgagcggtacgacaccgacaagcacggcgaccccttctcgcgcctctacgctgccgtggacgccgggatcgacgccgccatcgagaaatcggcgagggccgcgaaggagaagaagaaccgggcggcctcggtgaccctggacgccgacgtgcggcggaccaaggcgcggctcctggaggaggtggtcgagctccagaaggtagccgccaggaaggtgaacgggctctcgccggaggagaaggtgtcgcgggctggtctggtggccgcgctgccccacaggatccacgccatccccgacagccacggcggcggcgccacagaccaggacgccggctggaatgctcggccggggatcgagctggacgattattcagctgaaagattagaagaggggtacttccagacaagtgaggagtcagagcagttcagacgagagtacgagatgcggcgaatgaagcaggatgaagggctggacttcgtctcgcaaggtctggacacgctcaagaatctggccgaggacatgaacc

SEQ ID NO: 58719 - DNA, 270 bp, Zea mays
  Clone ID: MRT4577_153545C.1
gttgaccagaccattgatgttgaagtggcaagaatgtcagtgtcaacagtaatcggataaatagatggtatttccctgaccctttgtttgtagaacttgaatgaacctggggacagaaacacatttgagggttcttgtataaatcaaggtcaagatcagaattgcctcgtaaaaaaaaaaaaaaaaaaaataagaaaaaaaataatataacaaaggaaaaaataatataaaaaaatcacaatggttatcgtttctcggaacctttttttt

SEQ ID NO: 58720 - DNA, 479 bp, Zea mays
  unsure (1)..(479): unsure at all n locations
  Clone ID: MRT4577_153546C.1
agcnccacagcaggcannacaaaacacnagcgggacaancgcgggcccccaaagcccccnncacaaanaccggngcaacggggggggcnggggganacnnacgncnacggnacacgcaggcaagcancaggcccncgcncacnggccggggacgaagnngggggcgnaagcccaggcgnngnnggngacggggncggcganggggncggcgagggncncgagggggcccnngccggngacganagccggcacgaagaagccgaacagggagaacagggcgaggcggccgnncnngaccnccnncacccngagcncggcgaacgccnccgggncgncggcgagcccgagcgggncgaagccgccgccaggggacagcgggncgaccaccnnnccgagcggcccgccggcgacgcgggaccccccgacggggccccagagcaccaccgggcacgcccagaaggccaggaagcccngggcgg

SEQ ID NO: 58721 - DNA, 438 bp, Zea mays
  Clone ID: MRT4577_153547C.1
atagaagtcggccgggacttcccagtcgtcccccttttcaccacaggtgagcactcttgtcccgcgttctcgctgctgccatgtacccctctgctcactctattggccttaattagatgtatagtaagacaccgaatgcctaattgtttaattcaataacgcgccgacttctgctctactgatacgaactgtaggcgtaaccttatttatactacactatctgcaagagtagctacaccaaatgcagtaccgttgttgagcccatcgaaaatccaacaaacggactgattcctatctgatttcaccttgggtgccgccactaccctgtaccaaattgaaggttcttgaatcgtacatgtataggggccaagctactgggattacttctgccacaaccatccggaaaggatattggatcgaagcaattcacaccttgga

SEQ ID NO: 58722 - DNA, 351 bp, Zea mays
  Clone ID: MRT4577_153548C.1
aagctattttttctttctccatcactgacacgggggatcatatagacaaggggggaggggactctacacatcttataagtgaattctctaattgtctcaactccatacatgccaaactagaccacactcacatccatgaccctcagattactctacaccaatttatctttcaaaaaacacattaaaaggaaccacatcttgttacaactaaaggaaaaagacttgaaaataattatgcaccatactcagctgttaatacaaccatgccatttcatccaatccctcacctgcttaactttgaaaatgcacatgctacaacaaccttgcacctaacctttcttcacttaacac

SEQ ID NO: 58723 - DNA, 1684 bp, Zea mays
  unsure (1)..(1684): unsure at all n locations
  Clone ID: MRT4577_153549C.1
cgactccctatcanagcgggaaaaagcnnacgngttgcgcacctcggatgaggcgaggacggtattattgtgtggctcaggctctcagctcaacaagctcgccgcaccgtcgccatggacgccgccaccggcaactgttcctcctctccgctgcgcatcgtgatctgcccgtggctcgcgttcggccacatgctcccgtgcctggagctcgcggagcgtctggcttcgcggggccaccgcgtgtccttcgtctccacgccgcgcaacctggcgcgcctcccgccgcggcgccacgacgtgcacctcgtgcccctgcccctcccacgcgtggagggcctccccgacggcgtcgagtccaccaacgacgtgccccccgacaagagagacctccactggaaggccttcgacggcctcgccgtccccttcgctgagttcctggccgccgcgtgcgccgacgaggctaccaggccggactgggtcctcgccgacacattctcccattgggcggccgccgtcgccctcgagcacaaggtgccaagcgcgatgcttctcccgagcgccgccatgatcgcctcgtgctggcaccggccgccgtcgcacgccgagcagccgagaagcgcagtgtttgaggagccggcggaacggcccggcgggtgtgctcccttacgagtgggataaaagagcgcacttctttgggccccaaagagcgtcgggcatgtccaccgcgcagcgctgcttcctgacactgcagaggtgcaggctgctggccatgcggagctgccccgagtgggagccggagaatttcacggtggcggcggcactcctcggcaagccgctcgtgccgctcggcctcctaccgccgtcgcccaacggtggacgacgacgagaggaggacggcggcagtacggcgcgctgctggctggacgcgcagccgccgagctcggtcgtgtacgtggcgttgggcagcgaagtcccgctgacggtggcgctggtgcacgagctcgcccttgggctggagctcgccggcgcacgcttcctttgggctctccggaagcccagcggcgtcgcggacgacgccgacgtgctcccgccgggattccgggagcgcacctgcggccgcgggctcgtcgccatgggctgggtccctcagatgagcatactggcgcacggcgccgtgggcgggttcctgacgcactgcggccggaactcgctcgtcgaagggctcctgcccacgcgtccgctcgtcatgctgcccgtcgtcggggaccagggccccaacgcgcgcgccatggagcggaccaaggttgggctgcaggtggcgaggaacggtaaggacgggtcgttcgaccgccacggcgtcgccgccgccgtccgggaagtcatgctggtggaagaagccaggaaggtcttcgtggcgaatgccctggaaatgcagcgtgttgtggccgacaaggaacgccatgagagatacatcgacgagttcatacgccagctgagatcttactccactccgccggcagcgagttaaaaaggcgtacttggtggcttggtgcctcgcactgtatgtctgtatggggtctaggatgtcaacggttacgtacccgtccagtaatattattccatacttacctatcaaaaacaattttattcgtcgggccaaaaaaaaaaaaaaaaaaggccccta

SEQ ID NO: 58724 - DNA, 532 bp, Zea mays
  Clone ID: MRT4577_15354C.1
ccccctcgagtttttctttttttttttttttttttttttttttttttttttttttttttaaacaaaactttgcattctttgttaaacttgcaacagtccacggactaccccatttcttgaataactgtacctttaagggaaaaaaggggggaaggccacattcctacaggggcaaggaacccgttgttggcccaacaaaccagcaaagccagccctgaaagtgtttaacacaatgcccgtaggcatggcggtttttgcccacggaaaatctttggaaaaatgacctaccatattgccatggcctgaacttgactgaagggacatttgtctcgtcgggaacatcggagcggtctatggcaccccggggctctgggtttttgccgttgtattcataaatttccaggcccccccacggggtaggggaaaccacatttgtcaggttaaaccatttaggagaaaattgctcccccttggcctctcaagttcgtttctcagctttttgttgttcctcgagcctgcttttttttgcccc

SEQ ID NO: 58725 - DNA, 178 bp, Zea mays
  Clone ID: MRT4577_153550C.1
atggaaacgagcttcgcagatgagtgaatgaagcgggagatcttacaggacaggaccggatccgatccatgcaggtttctgctgtctttctgtgatctgtggaagaagatggtgtgcactgtacgttctagactagctagctaggactatatataaacgagaatctgtggaatcataa

SEQ ID NO: 58726 - DNA, 255 bp, Zea mays
  Clone ID: MRT4577_153551C.1
cccacgcgtccggcttatagcttgtcagccatggccaccgccgccgcgtctaggctcctcaagtcctgcttcgcaggctcccggctcccggccgccacgcggaccacaccggcgtccctcgtggtggccaccggcccacgcggcgccggcgacggggccatctgcacgtccatgtccatgtcgtcctccaagccgccctacggcctgacgtccttccggttcagccccatcaaggagtccgtcgtatcccgcgag

SEQ ID NO: 58727 - DNA, 550 bp, Zea mays
  unsure (1)..(550): unsure at all n locations
  Clone ID: MRT4577_153552C.1
gccacaccacccgngtcaagaatggccagaggctggcagaagcggcagggaaaacgcggccccgtggttgaccttcgtgcgcgcgcccccaatcattttactactagtatctcctggtcctggtaagaaaaaaaaagttttacgactgctatgctattcagtacaagtccatatggtcgaggaagaaccgagccccgggacgaagctatccggatcctctcggggttgctggcagagagagtgctgcagtgcagagagaccagggcggcagggcctcccctccagctccagtgatcgatcagacgatcacccgctgcccgtgagttggcgtcgtgtcgtatcggctgggcctgcgcaatggacaggcatggcgcgcccggccggcacatgttttgcactgcgcacatgcgcatgtccggcaggcggcaggctccgcggctgcctgcttgtgcggtggtgcctgcctttttttttttttttttttntnngggtgctggattctggaaaggagaactttgtgcgagacaggcagggcagcggtggccaagat

SEQ ID NO: 58728 - DNA, 653 bp, Zea mays
  Clone ID: MRT4577_153553C.1
aagataagaatgggaattgaagataacaacctgtaatggtcatcactgtcgtctgggcgacctactccgtcgcgccagccagctctcaaagcctaaatgccaattgtgtctacaactatcatattacctcccaccctcactaaaaggcaactcctcgccgcggtcgccagcggctccaccctccccaagttcgccacctcagctgcggccccacatgctcgacgacatttcgctattcggcgtcgagatacgccttgcgaactccgggacagactacctataccacgctcttcgatggctgaccagaaggccggccactattatgtcacaatagaacggaagaacggatgctccattgattctacgtatgatgcacaaagacgacaccgacgatgccatgacatttatatacacccttcgatgccgcaatgtgatatgtgaggatagataatggcgcagaattgcatagaaacggccccgatgttgtgccagtgaacattggaacgtcccaagaagaccatgacacatcacgagacacggcaaggactagtatctctgagccaaggcacctagacacagatgatataaagccaactcgcactcggagaagacgaaggcatgactctgatagagataagcactatcgtcgacgt

SEQ ID NO: 58729 - DNA, 740 bp, Zea mays
  Clone ID: MRT4577_153554C.1
cggacgcgtgggcggacgcgtgggcggacgcgtgggcaggcatacagcatgggttccctaggctcaagcaccattagcagcatgaacatggcgaagcaggcagccagcgtcgttggtggtaagaccggcgttgttgctgtcgccgaccagcagaaagaagtcccccccaggacgatgaactgcagtagctacaccttccacatgccgctgcactacccgcggtacaagaaggcggactacgagagcatgccggagtggcgcgtcgactgcctgctccgcgagtacggcctccccgccgacggcgacctcgacagcaagagaaagttcgccatgggcgccttcctctggcccgaccagtactgaaggaactcgtgggcgtggccgcgctgaattaccgagctgaactcacaagagacgaagcaactgcagtatatagccggagctgttatgcgcactacagctgcctccgccggccggccggcgacgacctggattatatccctggcggcgtaggcaaatgtgagcacagccatatcggaaaagagtcgtactcatatgcttgttagtgctgatacatgtatgattctaagtactagcatcgatctagccctcttttgcttctgtttttctacaataattatgcaacctgcaggatcatatatgcatcctgttgtaccaatatatgaactaataatcggttcgcatagaacaaatatatgggtggtgccagttcttgtttg

SEQ ID NO: 58730 - DNA, 765 bp, Zea mays
  Clone ID: MRT4577_153555C.1
gaccctccgccggccggggctacaccacaagaaacatagaaacgacatatattattaagcatgggttccctaggctcaagcaccattagcagcatgaacatggcgaagcaggcagccaccaccgttggtgctaagaacggcgctgttgctgtcgccgatcagcagaaagtagagggccccaggacgatgaactgcagtagctacaccttccacatgccgctgcactacccgcggtacaagaaggctgactacgagagcatgccggagtggcgcgtcgactgcctgctccgcgagtacggcctccccgtcgacggcgaactcgacagcaagcgaaagttcgccatgggcgccttcctctggcccgaccagtactgaaggaacccgtggcccgagctagctgaggctgctgagcctgagctaacaagagatgaagcaactgcagtcgtagccggagctaacaagagatgatgcgccactgctgctgcctccggcgaccagggttacatccctgacgtaggcaagtgtgaggagtgtggagaagaatcatatatttatgtgtagtgctgatacattatgattctacgtactcgcctcgatcttgcttctgcttttctctacaataatatataatccattcatgcaaaaaggatcgaataattgcatgctggtgtaccaatatatgaactaataataatatcggttcgcaatgaataaatatatgagtggtgccggttcttgtttaaaaaaaaaaaaaaaaaagcggcc

SEQ ID NO: 58731 - DNA, 376 bp, Zea mays
  unsure (1)..(376): unsure at all n locations
  Clone ID: MRT4577_153556C.1
tacctcgaggccggccgggnnnaatctcctcatcttctctccttttgctcggaacgcacacaccgctccggtctccgatctccgatccccgatcccctcgacgatacaagatgcagatctatcgcaagactctcactggaaagactatcaccctcgagggggagccctctgaaagccttgcaaacgtaaccggatcgatctagggaaccgaaggcattcgcaccggaacagtcctcggtcaaccaccgctgccaaggagtcctagggatccccccgcaaatgactcccctcgctggctgacaaggaccgcccaaagtcccggtaactgtcctcggctccccaactatcgtggacgaacttcctgcccggaggatct

SEQ ID NO: 58732 - DNA, 452 bp, Zea mays
  Clone ID: MRT4577_153557C.1
gggcagtcacacttgacgctgccccagttcaccatcggttttttttcatgacttctacgacatctcattcatgaacggttacaacctccccatggccttctcctgcagaaccagcctgcggctggtagtcactgaccctgtatgcccccacccataccacaacccccctcacatgaagacccatgcctgtggcgccaacaacagctaccaagtgaccttctgcccagtcatctgttcaaataaactctgcatccatagcctagtgatttggatatcgcaggaataattctgatctccatgagcacaatattatatatataacacgtgcattacacgcgcacgcacatgtatttacgcccctatacaacatacctacctagctagatctttgtgcctgcctgttctgtccccatattaatacaaattaacaaacatcacttcgtgtcatacat

SEQ ID NO: 58733 - DNA, 500 bp, Zea mays
  Clone ID: MRT4577_153558C.1
tcctgtacaaccctcgcattctgtctcccttcatttaacgaccaccctggaaaatgcttgagtactgttgacgaaggaataccctgagtcttagacatacacgcttcctccttcttcccttacttgctagcctgccccttgctgtcttctgtcacccagccactctgtggagcctacaacatgctgaagactcgaactcctgctcgacctgcctacatgaggctccatctcagccaagagtgacacccttgacacttatctgaccctagatcccgttgccatgaaggacgctgctgacgtctgctatccggagccgtattactacatgtccacaccgcccacgaggcaccggccggccatgtccactatcctcctgctcacttggctcaggcctcgcgctggccaccagtccgttctacccgtaggatcaccatgaccgaattactgcccgctaggatcaccatgagtgatgaccctgagaagcacttacttccgctgct

SEQ ID NO: 58734 - DNA, 380 bp, Zea mays
  Clone ID: MRT4577_153559C.1
tctcgccggttgatgggagttttctgcgtagccgattggacgtggtagcaaataagaactggttttttttagttttttttgtatgatttacgcaccaactgaccggtcttgtagctcagattctgttccccctggttggctggttgcaatctcttgagagaatgagcaaaatgtagttgaaccaaaaaaaaaaaaaaaaaaaaaaaaaaaaaaaaaaaaaaaaaaaaagaaaaaacaaaaaaaaaaaaaaaaaaaaaaaaaaaaaaaaaaaaaaaaaaaaaaaaaaaaaaaaaaaaaaaaaaaaaaaaaaaaaaagaaaaaaaaaaaaaaagcgggccccgaaacccaaggttttgtccccttaagggggggaaaaatgc

SEQ ID NO: 58735 - DNA, 429 bp, Zea mays
  Clone ID: MRT4577_15355C.1
ccttctcaaggaatttgtggacactttagagaaggagtttgggagtaccctcgatagcactcgcgtgtaatgagcttatgatagttgtatgctgtaatgaactgatgtaatgaataaagtaattggttgaaaaaaaattggcatgtgcatggtagtaactcttttcccctggcagatggcttcggataaaaccacgcctacctgatagtcgcctagagggggggtgaatagggcgaaactgaaatttacaaatataaacacaactacaagccgggttagtgttagaaatataaatgagtccgagagagagagggcgcaaaacaaatcccaagcgaataagcaagtgagacacggagatttgttttaccgaggttcggttcttgcaaacctactccccgttgaggaggccacaaaggccgggtctctttc

SEQ ID NO: 58736 - DNA, 132 bp, Zea mays
  Clone ID: MRT4577_153560C.1
agctgctcccatcaaattcgtgcctgcctgccctgcctttgggccacctccttagtcctccccttcttacgcggcccttcttgggccccacgcgctcgcgcggggcacaagagggaaaaaccgagctccttt

SEQ ID NO: 58737 - DNA, 193 bp, Zea mays
  Clone ID: MRT4577_153562C.1
ccgcgcgcgcgccccgtcctcgtcgtcggggcgagagacccgtcaccggccacagccaccatatcctcggagaacgaacgcctggtgtagtttttccgctgctgtctcccgtctgacccctccgagatcggtagcgctgcccatgccgatcccgttcgcggtcgtcatgttccccatcggcctcctccccctc

SEQ ID NO: 58738 - DNA, 342 bp, Zea mays
  Clone ID: MRT4577_153563C.1
gcacgagatggagtgaatgcatcatcatggacctgtgtggtccccgccggccgtgtgaggccagggcccaggccgactggccgtggtggttattgaggacgtgcaaattgaggcctgattgcacgccatgatgtgtcacacccgggttccgtgggtagtaacgcgaaaataaatcatcaagtatgttgcgatcaagtctcacacatatattgactcattatatagaaacgaatgtcatatcatttatatataacagagtgttgtataaaatagttaactaattacatcatatgaagacaacgatccagcaaccacagttgactgggagacgatagcctagac

SEQ ID NO: 58739 - DNA, 954 bp, Zea mays
  Clone ID: MRT4577_153564C.1
ccccgcgtcccttcagggccccgcaagggaaatccccatcacgtacatggagtacaacgtgtctctgcctcatctttcggcgcttcctcttcagcctcctcatgcgcttcttcttccacttggccctcatagtcgcctccttgcgggctctccttggcgcgtctcgagcggccgcccgggcaggtacaagcttttttttttttttttttttttttttttttgttcatttacagtgtgtgtttgtgtagattaaccttggacacgacaataccttgtttttgttcctatccttcctcaacaacaacaaaaaaacaaaacaatgaaagaaatgaatcttgccgccacaagagtggagagggagagactagagagagaggggaaaggagaagaggaaacaagtatatgtatagaacaacaacagaaaaaaaaagagagacacggcgtgaagtgaggtgagcagctgatctgaagtgaatgaaacctgcagcagagcagaggaaagagggggggtcatcatcagtcatggcgtcggcaagagatctcgcgcctgctccagcgtcctggtgaacctagtgaggttgagcctgacgttctgcttgtccaggtacaccgtcttgatggcgtcccaccccttcttgtgcacgtcgtaggggtgcttcaggtagaagtggtcctccgggtagaggtccctgagcgagctctcctccagcgacacgttgtactccatgtacgtgacgtccatgtcccttgcggggtccttgaaggtgacgcgggtgagccactccagcccgccgaacggcaccacctgcaccagcacggcgcggctgggcaggaacaccatgttggtgagcccggcgccgtgcacgcccatcatcacgtccgccgagttcaccagcctcgcgaagttgggcatggccgtgtggttgtcgggctcggcgatccgcacgtcgaacc

SEQ ID NO: 58740 - DNA, 492 bp, Zea mays
  Clone ID: MRT4577_153565C.1
tccgggctctctcttttctcatcatacaagttgttgagttcctgtccctgttcttggacggacacatatccaatccacccgagatttgctcaatttactccagacacactggcaacgaccggaccgtcgaacctcgcgtctctggcgacatgtcgacggcggtggcggaggcgcggccgccgcaccgcggcaagaacgtccgggacgcgcgggcactgccaccccttagactcggcggtgctgggatgcggcggaggaacgggccgaatggcggcctcgggagcttcagatccccgaggtccttctcgctgtccgatctccacagcagcgctgagggggagtagtgattagcagccgcagatctgcttccaccagtagagatgtagtagtagccacttactatatggttccggtgtataagatccaagtctgttgtgttcatcctcctggcttccgtttctttgacatcagaagtgcatcgactgacctaat

SEQ ID NO: 58741 - DNA, 1711 bp, Zea mays
  Clone ID: MRT4577_153566C.1
ggtgccactgctgctcctgcggcaagggcccccgatgccgttcccggtccgtagctcccgcccgtcgccgctcgcggcgcgagcgacatctcctccgccgtggaagtggtgcggccacccgaggcgtcccatgcctcctcggtcgggggcgccggcggcgtcgggctcgtcgcgcggtgagaacgcggcggcgggggccggaggtggcgctggcgaagagggggacgcgagcaagcagaaggcgggcgacccgcccgatcgggtggaggcgctccggctccccctggctgggcacggcgtcctaccttccttcgcttctggctcccccgctccctgatgctgcaggtccaagtctgttggaggagggacacacggatccagtgcactaaagatttactcaactcctcgcagaggaggtaagcactcgcaaggaccggaccctcgaatcccctgactccggcgacatgtggagggcggtggcaggggtgcggcctcgctacgggttccccggatccgcgaaggggggcggcggcgggcatgggaaggaggcgcacttggccgcggccgggaagaggaggagcgacggcttcttcatagaggaggaggaggttgaagaagacgtgctgactgacaactcgtcgatcggggcgccgtctccctcgggatcgtcgatcggtgagaactcgtcgtcggaggccggcggggacgacggggaggaggaggtcgagagcaagctcaaggagggtgatgtgctcggctgcttggacgcgctcgaggactccttgccgatcaagaagggcctctcgagcttctactccggcaagtctaagtcgttcaccagcctcgccgaggccacagcggcggcggcggcggtcaaggaggtgctggccaagccggagaagcccttcaacaagcgccgccgcatcctggccaactggtccaggagagcctcctgcagctcgctggccacggccacctacctgcctcagctcttgggccccgaccacgccgtggccgaaggggacgagggcgaggaggacgactccgacgacgacgtggagtacagccaggtgccgcaccacggcaagaacgtcagggacgcgccgacatcgccactgccgctccctagactcggcggtgttggcagcatgcagaggaggaacggccttgggagcttcagatctcctaggtccttctcgctgtctgatctccgtaatagcagtgctgatggtagtgattagcggccacagatttgcttgcagctctggcctctcctggccagtaagtagagatgtagtagccacttgctatatggttccggtgtataagatccaaatttgttgtgttcaaaaaaaaaaaaaaaaaaaaaaaaataaaaaaaaaaaaaaaaaaaaaaaaaaaaaaaaaaaaaaaaaaaaaaaaaaaaaaaaaaaaaaaaaaaaaaaaaaaaaaaaaaagggggggccttttaaaagaaacaaaattaacgatcccgggcttgaaaaaaaaaaattttctaaaagggacacaaaaataaaattattgggccgctttttaaaaaagggggagggggaaaaaacctggcttaaccaaaataaaatgtcttgaaaaaaatcccctcttttaaagttggggaaaaataaaaaaggccccaaacaaacgcctttcataaaatttgcacacctaaaaggaaaaggaaccccccccttat

SEQ ID NO: 58742 - DNA, 392 bp, Zea mays
  Clone ID: MRT4577_153567C.1
ctcaccatggtgctcgtcgacaagcgcgagggctcccagctcgacccgatcactgacagccagaccatgctatggcgtgatctaggacacatggaacacaacaacgcctgtctctgcatggttaacggtggtaccaccgtaacccagagcttgaaacagctcgtgcttgaccgcataggagggatggctgtcgttgacgagtccaacctataagcatctgacctggaaaacactgtattggttgacgaacgctgcttggggcggccaatggctgaagcgatcagtcttgttgcacaatagcaggatcacgctgtcaatgctcatccagttggggcgtgtccagcgaataccataaatgcctaaacctagattggttcacagattactggtgt

SEQ ID NO: 58743 - DNA, 1219 bp, Zea mays
  unsure (1)..(1219): unsure at all n locations
  Clone ID: MRT4577_153568C.1
gggtacctcgaggccggccgggccgggatccaccatatccaatccacccgagatttgctcaatttactccagacacactggcaacgaccggaccgtcgaacctcgcgtctctggcgacatgtcgacggcggtggcggaggcgcggccgcgctacgggttccccggatccgggaaggggggcagcggcggcggcggcggcgggcatgggaaggaggcggacatggcggcggtcgggaagaggaggagcgacggcttcttcatagaggaggtggcggaggaagaggtgctgaccgatacctcctcggtcggggcgccgtcgccgtcgggctcgtcgatcggtgagaactcgtcgtcggaggccggcggtgacgacgtggacgaggaggtcgagagcaagctcaaggaagatgacgcgctggattgcttggacgcgctcgaggactccttgcccgtgaagtgagttcgtaaaagctttcttttttttttggtttccgtcttggatcgctcatgctatttcgcttgcttttgcaaaatgggatccgtattttttttattcaaaaggatgattttttgggggcctattaactcgaaacgctntaaatttggttggtcaggaagggcctctcgagcttctactccggcaagtctaagtcgttcaccagcctcgccgaggcgtcgacggtggcggcggcggccaaggagctggcgaagccggagaacccgttcaacaagcggcgccgcatcctggccaactggtccaggcgagcctcctgcagctcgctggccacggccgcctacctgcccccgctcctgggccccgaccacgccgtcgccgagggggacgagggcgaggaggacgactccgactccgacgacgtggagtgcagccagctgccgccgccgcaccgcggaaagaacgtccgggacgcgcgggcactgccaccccttagactcggcggtgctgggatgcggcggaggaacgggccgaatggcggcctcgggagcttcagatccccgaggtccttctcgctgtccgatctccacagcagcgctgagggggagtagtgattagcagccgcagatctgcttccagctctggcctcctctcttagccaccagtagagatgtagtagtagccacttactatatggttccggtgtataagatccaagtctgttgtgttcatcctcctggcttccgtttctttgacctcacaagt

SEQ ID NO: 58744 - DNA, 1577 bp, Zea mays
  Clone ID: MRT4577_153569C.1
ctcgaggccggccgggatcgactctctcctgagtcctgactcctgacatctccgatcgtccgtccccgtccccggcgccgtccctctcgctcttgtcctcggtgccgcacctcctacatctctgtctcaccgctttagcacggccaccacgcccgcctgcgctagatcccatctgaagccggcggccatcatacccgtgagcgctagctgggctgcatctctcacctccacagccagcaagcgagcgtggttagcgccgcagtggtttcaccgaccttagatcgggccatatcgagctgttgacatctgcgggtgcatctgcggacagccttgacgaggctgccgacgatgtcgtctctcaactcgctcttcaaccgctccaccttcggcacaaaatgcaaaacatgtttaaatcttgtcatttcaagaatcaagctgctgcgcaacaggagggagttacaactaataaatatgcgcaaagaaatggttcaatatcttcagactggccaggaatcaatcgcgaggattcgagtggagcacattattcgggagcaaaatatattggctgcctatgagatcgttgagcttttctgtgaatttgttctggcaagagtccctattgttgaggtccaaaaggaatgccccttagaactgcgtgaagccattgctagtataatctttgcatcaggaaggtgttcagacttgcctgagctaatgcatctccgtaatttgtttaccaccaagtatggaaaggagtttgttgctggtgctatggaattgcgccccgacagcagtgtcaaccgcacaataattgaaaagctctcggtgaaggctccatcaggtgattcaaagctaaaagtcttgaaagctattgcccaagagtaaatattgaatgggattcatctaatactgaagcagaattcaacaagaaatatgaagatctactggacggctcgggatcttcggtccaccagatccagacacctatcattgagggctcagtgagctcaccagttgtttctgctccaagagataagacgccagcattgaattcacctgtcattgatgccgaaaaacaccaagttcgcgaatctccgacttcaccagctggaggtgcaagagctggtgttgtcactaagggcaatgtggtaaccatgggccatcactcccccgctgaggagatgccctccaccagcccaagttcatcagacgcgctggagaaagcccgagctgctattgcagctgccacccgcgcatctgctgctgctcgcgccgcagctgaacttgcaaaagttaaaattacaaatcaatgacacctccagttcgggcaaggcgtgtcaggaagtttaatctggcaactgatcaccaggacagactgaaatgtatttcattgaataaattgttactgtatattccctttgtgagcacttggcacatcatataaggagcgtggctcctcgcctttcttcgaatgtactcaaagagaactacctggaatgcataatgttgcatttactgttcaccaaaaaaaaaaaaaaaaaaaaaaaaaaaagaaaaaaaaaaaaaaaaaagcggcc

SEQ ID NO: 58745 - DNA, 716 bp, Zea mays
  Clone ID: MRT4577_15356C.1
cgtagcgtagccgacgaatacgcgcagcgcacctatcccccactaccaccggcaaccgacggaacccgcacccactccaccccctccccctcctctccggcagcccgaccgacgccgcagccggcgcatcgccgcgatgggccgcaagctcgcgctcctggtgggcatcaactaccccggcaccaaggccgagctcaagggctgccacaacgacgttgaccgcatgcacaagtgcctcgtcgaccggttcggcttcgacgaggacaacatcaccgtcctcctcgaccgcggctcctccgggccgcagcccaccggcgccaacatccgccacgcgttggccaagctcgtcggggacgcgcgccgtggggacttcctcttcttccactacagcggccacggcacgcggctgccggccgagaccgggcaggacgacgacaccgggtacgacgagtgcatcgtgcccagcgacatgaatctcataacagatcaagatttcagagatctggtgcagagggtcccggatggttgcatatttaccatcgtctcagactcatgccacagtggtggcctactggacaaggcaaaggaacagataggcaatagtaccaggcagaatcagacccagtctcgtgaacccgaagaagagcgatctcattctggcagcgggttccggtccttcctcaaagagaccgttcgtgacgcgtttgagtctcata

SEQ ID NO: 58746 - DNA, 345 bp, Zea mays
  unsure (1)..(345): unsure at all n locations
  Clone ID: MRT4577_153570C.1
agcagtggtaacaacgcagagtacgcggggaagtacatgaatcatttgatcattgtccatggatgctactatatagctgattgtaaatatatctaaacctagaagcattgcagtggattacaatatatttattctttcatgggtaaaaaaaaaaaaaaaaaaaaaaaaaaagaggggggaaaaaaaaatattttttaaaaaaaaaaaaaaaaaaaanttttttaaaaaaaaaaaaaaaaaaaaaaaaaaaaagaacttggggtggttcccacggttaagggggaaattcaacaaaatgggggggcgttattaggggatccggcctgggccccaacttgggggaaa

SEQ ID NO: 58747 - DNA, 435 bp, Zea mays
  Clone ID: MRT4577_153571C.1
aaaaccaaaaagtttgggaaacaaagggcattcacccgggggggggttttaaaaaaaacccgaatagaagctaagggaaaaaacaggggcagtaaaagaaacaaaaacccgggttttttagggggggtaagggtttaaaaaaagcccggatcatttattaccgatatacggggccccccctgaaggaaaaaagggacaaaaccgccccacgggggccattgacccttgaaaaaaaaaaccaaaagcttgtttaaaaaaaaacaggggggggctaaaaaacaacttaaaaaaaggctggaaaaggggggcccaaaaaacgggaaaaaaggggaaaaaaaagggaaagttcccccacacaaacaaaacgggggaaaaacatccaaggggtttgttaaaaaaagggcccccccggggaaaggggggggacccctaaaa

SEQ ID NO: 58748 - DNA, 477 bp, Zea mays
  Clone ID: MRT4577_153572C.1
cggacgcgtgggaaaaatctcatcgactctctcctgagtcctgacatctccgatcgtccccgtccccggcgccgtccctctcgctcttgtcctcggtgccgcacctcctacatctctgtctcaccgctttagcacggccaccacgcccgcctgcgctagatcccatctgaagccggcggccatcatacccgtgagcgctagctgggctgcatctctcacctccacagccagcaagcgagcgtgatatcgagctgttgacatctgcgggtgcatctgcggacagccttgacgaggctgccgacgatgtcgtctctcaactcgctcttcaaccgctccaccttcggcacaaaatgcaaaacatgtttaaatcttgtcatttcaagaatcaagctgctgcgcaacaggagggagttacaactaataaatatgcgcacagaaatggttcaatatcttcagactggccaggaatcaatcgcg

SEQ ID NO: 58749 - DNA, 409 bp, Zea mays
  Clone ID: MRT4577_153573C.1
atcaatatttggatatagattaaatatctcaaacgaaaaagtcaagaattcaaaatctgttgtggtgagcagagaaatgcacaaccgggggaccactaacatatttacatttgctgctgatcgtaattacgagtaccaaacaaaactgagaacaccaggaacacagaacaacagactgaaaccagcaaatcagcgcggcaagcgaccgcaccgcaccgcacgcacgttcgatcgatcagccaacaacaacaacgccacctaaatcgaggaacgcacgttcgatcgatcagactcaccccgcgatcggcttcacctcacgctgtcccgccaatcgccgccggggcggggcttccggctccgcagcgccttgatctttcctgcgatgagcctcccccatcgaggccggcgc

SEQ ID NO: 58750 - DNA, 1753 bp, Zea mays
  Clone ID: MRT4577_153574C.1
ccgaccggggacatcaaaggcgactgggaaaaaaaaatctcatcgactctctcctgagtcctgactcctgacatctccgatcgtcaccgtccccgtccccggcgccgtccctctcgctcttgtcctcggtgccgcacctcctacatctctgtctcaccgctttagcacggccaccacgcccgcctgcgctagatcccatctgaagccggcggccatcatacccgtgagcgctagctgggctgcatctctcacctccacagccagcaagcgagcgtggttagcgccgcagtggtttcaccgaccttagatcgggccgtaagctcgaggactgaccttaatttcttgagcttaaggtctcagtgggtttaatcccgtagtgtatgaggttgacctttaaaggccttacggcccccttgtttcgcacgctacagatatcgagctgttgacatctgcgggtgcatctgcggacagccttgacgaggctgccgacgatgtcgtctctcaactcgctcttcaaccgctccaccttcggcacaaaatgcaaaacatgtttaaatcttgtcatttcaagaatcaagctgctgcgcaacaggagggagttacaactaataaatatgcgcaaagaaatggttcaatatcttcagactggccaggaatcaatcgcgaggattcgagtggagcacattattcgggagcaaaatatattggctgcctatgagatcgttgagcttttctgtgaatttgttctggcaagagtccctattgttgaggtccaaaaggaatgccccttagaactgcgtgaagccattgctagtataatctttgcatcaggaaggtgttcagacttgcctgagctaatgcatctccgtaatttgtttaccaccaagtatggaaaggagtttgttgctggtgctatggaattgcgccccgacagcagtgtcaaccgcacaataattgaaaagctctcggtgaaggctccatcaggtgattcaaagctaaaagtcttgaaagctattgcccaagagtacaatattgaatgggattcatctaatactgaagcagaattcaacaagaaatatgaagatctactggacggctcgggatcttcggtccaccagatccagacacctatcattgagggctcagtgagctcaccagttgtttctgctccaagagataagacgccagcattgaattcacctgtcattgatgccgaaaaacaccaagttcgcgaatctccgacttcaccagctggaggtgcaagagctggtgttgtcactaagggcaatgtggtaaccatgggccatcactcccccgctgaggagatgccctccaccagcccaagttcatcagacgcgctggagaaagcccgagctgctattgcagctgccacccgcgcatctgctgctgctcgcgccgcagctgaacttgcaaaagttaaaattacaaatcaatgacacctccagttcgggcaaggcgtgtcaggaagtttaatctggcaactgatcaccaggacagactgaaatgtatttcattgaataaattgttactgtatattccctttgtgagcacttggcacatcatataaggagcgtggctcctcgcctttcttcgaatgtactcaaagagaactatctggaatgcataatgttgcatttactgttcactagttagttattgtatcattacggtttttttacaatacaaaccaatctaaattgcagtggttagagaaaaaaaaaaaaaagcggcc

SEQ ID NO: 58751 - DNA, 403 bp, Zea mays
  Clone ID: MRT4577_153575C.1
acacaaaccgcaagagccaagaacccgatccgccggctcgccggtcaccatggagcactacgagcggcttggcaagatcggagaaggcacgtcggggatcgtctacaaggcccgcgaccggcgcaccggcgagaccgtcgccatcaagcgcctccgcgccggcgccggcaacggcgagggcgacgcgttcgaaaagacgttccgccgcgaggtgcggtgcctcgaggcgtgccgcggccacccctgcatcgtggagctccgcgccgcgcaccgcgaccccgcgggcgcgttcctcgtgatggagtacgcggggcagagcctgcccgaggtcatgcgcgcgcgcgccgagcgggcgctccctgagcccgacgcgcggcgcgtgatgcggcggctcctggagggc

SEQ ID NO: 58752 - DNA, 469 bp, Zea mays
  Clone ID: MRT4577_153576C.1
accggtggagggaactgagaagagcctccgagtgacgagagtgcgagaggggcggcgatcggcgcagggagcacagctgtccctgcgcctgctggttccgccgacggagagatgaacgtcgccaatgcatgctaacaggatgcagcaccatggtgcgaagcctccgacgcgagtggcgctggaggggactggagatctcacggactgcgacgaggaggcttcatgcagtgtaccgtggcgggtagctgaacctgacaatcagaagctaacaccggagagtcttgagcgacgaagacaggtgaggagaagggctgatgatgatgaaaagctctctgcagccgaacgtgtctcggatccaaagaacaccagctcaggatgagctatgtcacacaacgatggcgatgccatgatggcactggtacgtgctatcaccatcaccatgaagacaatgacgttgtgaacgagctaa

SEQ ID NO: 58753 - DNA, 863 bp, Zea mays
  unsure (1)..(863): unsure at all n locations
  Clone ID: MRT4577_153577C.1
aaaccgttagcatggcgaccacagacgccgccgccgccgccgccccagcacccgcggtttccctcgacgagaccaaggcaaagaatgtcctccgccaggtggagttctacttcagcgacagcaacctcccccgcgacggtttcctgcggaagaccgtcgaggagagcgaggatggattggcgagcttggctctcatctgctccttcgcgaagatgaggtcgcaccttggcctagatgccaccgtgaaggaggacggcgtgccagagacgacagtgcttgcggtcgccaaggtgctgcggtgttctgcagccctccgtgtctccgaggacgggaagagagttgggagagcaaacaagttgttgaagccagatgagattatagtgcaaattgactcaaggtcgattgctgtgtcaccacttcctcacaacgtaaagctggaagatgttcaatctttctttgctcagtatggcaaggttaacagcgtaaggctaccaaaacatgtttctgacaagaggcagttctgcggcacagctttggtcgaattttcggaagaagatgaagcgaacaatatcatgaataacaaacttagttttgctggagcggatctggaaataaaaacaaagaaggaatttgatgctgaaatggaggctaagaaagaagcttatgagaagtcgcaccctaatacacacgccaataagaacggtcatgacgaaggatacccanaaggtctgattctgtctttcaagctgaagagaattctagctgatggtgacacagaancaaatggtggnngacaaagttgataatagcgatgatgccaangaaggaaggngcttccgactcttcggaggaatcggggaagc

SEQ ID NO: 58754 - DNA, 355 bp, Zea mays
  Clone ID: MRT4577_153578C.1
gggtcgggcaggcgacgccgggggttaagtgcctcggcctaggtcctcgccgggcgcatctcggccagtccccggctcgccgcccgctcgctacccgtccctgcgcgtcccgtggcgggggccgcgcggtggggtcgtctctgccgtctgactctctcgtccgccctcgctcgcacccacccagtcctaccggctccacccgctggcgcagctcgcgcttctgtcgcgggacccgccgcaggcccgccccccgcctggccacacccacgcgctattgggagcgtcggtcgcgacagccggtcgggcgacgggcatgcggcgggtcgagatgggagccctgacaccttctggcacc

SEQ ID NO: 58755 - DNA, 548 bp, Zea mays
  Clone ID: MRT4577_153579C.1
agcagtggtaacaacgcagagtactcttttttttttttttttttttttttttttgctttttttttttttttttttttttttttttttttttttttttttttttttttttggaaaaaagggttccaaaaaatgccctaaataaatcgggccaaaaaaaatacaaagaaatgcactactaaaaaataattttaatcgactcgaacccgtaatttgctccatggtacaaaaaacggagttaaaggggctaaaaagtaacacatgtggcaaaatttaacaatgaaacaaatttaccaaatcctttcaaaaaggcaaaaagcctgcatggggggggttccaaagtagcaaagcataaaaatgggggtgctaaacggtagcggcggaggaaaagggtctggttgcccttccagggggccctcctggaaggcctgtttttggggggagtgttgcccttgccaagcaaacaacggaactttttgcctgcaaaggggagaccacggagctaacggggcttgtgcacaggattgcataaccaggtgattcttgggtcg

SEQ ID NO: 58756 - DNA, 664 bp, Zea mays
  Clone ID: MRT4577_15357C.1
cccacgcgtccgcccacgcgtccgcccacgcgtccgcccggcgcccgcgtacgggaaccccgccgccgccgccgcccgtgacccgtactacgcggcgccgccggtgtacggcgggcagccgccgtacgccgcgccgccggtggggtacccggccgacgctcctcctccctacggcggtggttatggctatggagctgctgctccgacggcgtacggcgctgaggctgctccactacctgcccagcagcagaagagcagcaagatggggatggggacggggctggccgtgggcgccgcggcggggctgctgggcggcctcgcgctggcggaaggggcgagctacgtggaggacaagttcgaggatcgcgtcgccgagagggtggaggaggagacgttcggcgacggagactacgacgacgattactagaatgaagcaggtgggagaggagatcatgatcatgcatacggaaccgaaatccaggcaacaagtcgaagtcgagtagctcaaatgtattcaaattcaaataagtgagatcaccccagtcgagaaaaaaaaaatcaaaacttgaaccatggcaatatatgttaatcgccaaccatttgatcgagtacttggtttgattgtccaaaacgaaccgtatcttgctttcaaaaaaaaaaaaaa

SEQ ID NO: 58757 - DNA, 463 bp, Zea mays
  Clone ID: MRT4577_153580C.1
attcggctcgaggatgactcgtatggaagcaagaaccagtcaagctacggctcatcgaaccgtgacaacgacgactcgtacagctcctctaaccgcaaaaccaacgacgatgacttcggctcaagcaacaagacttatggctcaggaaacacttcttctgggtatggtggctcttcgggtcgtgacgacaatgattcgtacggaagttctgaacgccggaacgaggacagctatggctccaatgaccgcgagagttctgggtatgggggttcgaacaggaggagcgatgactactaaaggtcgatgggataggatgaggttggttggttgtgaatgtcacgtcatggatccaagctctcttccgacatcacaatgcagcgaacattgcattgatactatatttgtagcagcagacatgaatcgcaccctgacgacgctgaaaaaagactgaaacagattgggg

SEQ ID NO: 58758 - DNA, 339 bp, Zea mays
  Clone ID: MRT4577_153581C.1
agacttttcaacgagaggaactatgggttagccacaaggatttgggggcaaatggtgtcacaggggtgtagtcctgatgttgtcacttatactacttctgtgcgggcatactgcaatgaaggcaggcttgatgaagcagaaaatgttgtgacggagatgaaaaaatgtaggaccattgtagatgcaatggcatataacactttgattgatggccatacaagtattggacagacagatcgtgcagttacaatcttgaagcacatgacgggtgttgcttctatgccaaatcatttaaccttttttatcttgctaagacatcttttacagaggaggctagca

SEQ ID NO: 58759 - DNA, 526 bp, Zea mays
  Clone ID: MRT4577_153582C.1
ccgaggaccggccggaattttgtttgacccacgcgccttccacgcgaccgacgagacaagccacttttccgcttggcgttgcctccatgctcattgccgcgaagttcgaggagatcagcccgccgcacccggaggacttttgctacatcacagacaacacctacaccaaagaggagctcctcaagatggagagcgatatactcaagcttctcaagttcgagttgggcaatcctaccattaagaccttcctgaggcggttcacaagatctgcccatgaagacaagaagcgctccatcttgttaatggaattcttggggagctacctggctgagttgagtctactggattatggctgtctccgattcttgccatcagtagttgctgcttcagttatgttcgttgctaggctgaccattgatccaaatgccaatccttggaacatgaagctgcagaagatgacaggctacaaagtttctgaactcaaggattgcatcgtagccatacgtgacttgcagctcaacaggaa

SEQ ID NO: 58760 - DNA, 398 bp, Zea mays
  Clone ID: MRT4577_153583C.1
tcctccccctccaatacagaagcgactatacgaggtacggatccgattagcctgacgcaccatcctgctgggccatggatctgcccttcttcccgagccgctgcgctttcagctttagcctgcgcacattctgcatcacgggaccgcatctgcttagcacagtacagccggttcccacctatcaccgcgtcctcgacctccacacagcacaccagcttcattccatctagctctcgctgtcttggtgagcataccggcgggcaacaccagcggtatcccccggctgcatgataaagacgacccgctcgcgctacagtcagttctaaacatcactcatggcaaacaacgcacgccggctccgtaagcctcagagatggatgactcccacagcctacttc

SEQ ID NO: 58761 - DNA, 356 bp, Zea mays
  Clone ID: MRT4577_153584C.1
ctggattatggctgtctccgattcttgccatcagtagttgctgcttcagttatgttcgttgctaggcgtgaccattgatccaaatgccaatccttgggtaaggaaccgaaggatcttattgatgcatgcaaaggactgccctgtttctcaaagttcatttatcctgcatttttatatataattattatagaacatgaagctgcagaagacgacaggctacaaagtttctgaactcaaggattgcatcgtaaccatacgtgacttgcagctcaacaggaaatttccatcattaatggcaattcgagacaagtacaagcaacacaagttcaaatgtgtgtcaacgcttcttccccctg

SEQ ID NO: 58762 - DNA, 205 bp, Zea mays
  Clone ID: MRT4577_153585C.1
cggacgcttggggtgcgtgtgtttatcaaactaaggaggtatgttattacctattatgccatttaccagcagtaccacaatgaattcagccccaatgtgagcaccaaacacgcctaagtgctgtatgtgcatgatcacatcaatgttattaatttcttattttccctttgagtgcgataaatccatgtattatggctgaccttac

SEQ ID NO: 58763 - DNA, 398 bp, Zea mays
  unsure (1)..(398): unsure at all n locations
  Clone ID: MRT4577_153586C.1
cccacgcgtccgacaaactcaaagctgctaagaatcagctcagacgcatccccgaagactaatcacaactactgattaactaagggtgtgtttggaacctttaacaggtttgtccagccttaccttaatgtgaattaaggcacgaggtgcttgccagcccaggcaagctaatttggttcttcctcctggtcagcaaggaaaacttttcctgcactggtagtgaggcaggagaagtccaggatccaaacagctaactaagtctaatttcttgcttggctaggcaaaagattgtttgccgaatcttccaaacatgctctaaggcagtaatgcttatctctggcaagaacttcctttntttttgaaacgaaccaggcaggagagctgccgattatattaat

SEQ ID NO: 58764 - DNA, 478 bp, Zea mays
  Clone ID: MRT4577_153587C.1
gcgcctcgctgtttaacaccacatgtccacgttagatgacccgggtatgtggggattcaagggttttgcaacttcggatgcaaagcttggaaggtgggtgctgacagcagaagatatatgcttcaagaatgtagtcatgtcctacatgtttcgacttggtaacatttcatttgaagatatggattgttgccttttgatagaggactacaaggcattttaaggtgtatccagtgaagcatgcaaaataggaaaacgtctagcacaatcctattaaatccagcaaacacctgtctgttccgtacttatgaaatccagtttcatttcaactgccagcaacctttttagaaattcagtttcatggcactcaattcacccaccaagactagcgaattgcagagggttggcatagcttgtcttcttgccataatatcttcagtccctcatttgcagtattgtgtatcaaataagattagctgat

SEQ ID NO: 58765 - DNA, 322 bp, Zea mays
  Clone ID: MRT4577_153588C.1
cccaaacccaaaccgggccaattttaattcccccccaaacgttttgaaacgggtcccttgggggggggcttgtttttggttttaaacgggaaaggggcccctcagttcctttggtgaccatgaaacttaaaggctgcccaaacacaatggcccggccccccgggggcggccctgaaatgttcaacatatgacattttaatcccgttcactaattgccgtcggggggtgaaccacctcctttggggggggggcttttaaaacccggtctttttttttaccacccccacttctatctcaggggccttgaaatttttcggggaaa

SEQ ID NO: 58766 - DNA, 349 bp, Zea mays
  Clone ID: MRT4577_153589C.1
aagcaacggcgtagagagcaaagctatactggggcttgcaagcacatgtgagcgggcgttctagtgacatgctataagattccacatgctgacacaaacggtgtacccaagggtacttgtcgttgctggtggccacacaaggattactggtgtatgcgtatgcagtggaaagggcaatgcttgtactgatgactatacttggatgggatttttagagaaagctgtggctagtgcataaaagccgagcatcatacatgacttggtgaaggagcatgtgggttatctaagagcacaagcatcacactggggcatggggaatggggattgaattggaagctgtgcaaattgt

SEQ ID NO: 58767 - DNA, 809 bp, Zea mays
  Clone ID: MRT4577_15358C.1
ttttcgccggattatatttcaaaaatcccccccctccgcttccttcgctgctaagtatatcccctgagctccgaatctcctaccgggttgggtctcgtagtcgttggatgagagcttgggacagtggaggagcatgacggtgatggagctcaaggcgctaccgctcggtttcaggttccaccccaccgacgaggagctcgtcaggcactacctcaaggggaagatcacggggcagatcaagaacgaggtcgaggtgatcccggagatcgacgtctgcaagtgcgagccgtgggacctcccagataaagctttgatccgctcggaggatccagagtggttcttctttgcacccaaggaccgcaagtaccccaatggaagcaggtcaaacagggcgacggaggctgggtactggaaggcgacagggaaggacagggtcatcaagtccaagggcgagaagaagaagcagcatatgattggcatgaagaagacccttgtgttccaccgaggacgtgccccgaaaggggagcgcactggttggattatgcacgagtaccgcaccaccgagccagagtttgagtctggcgagcagggtggttatgttctctaccgcctatttcaaaagcaattggagaaaactgagcgctccattccagaggaaatggatagaagtggctactctcccactccatctcgttcaactcctgacaacatggaagcaaacgaggaagctatcacactcataaataaggaatctcctgaatctggtctgcatggatgtccaattgagttgccaggtacaattgatactc

SEQ ID NO: 58768 - DNA, 373 bp, Zea mays
  unsure (1)..(373): unsure at all n locations
  Clone ID: MRT4577_153590C.1
agctttttaccacaaaatgggcaatggagaagtgtgtgatggcattgtgttgcaaacactanatccggaacaggaaacaaccgatgcgatcaatctagcggtcgacaagccgtgtgagcagaccctgcatgcttaacccccacttagatgtaccgtccgaacatgaaccggtgcgcaaagattctcttgaacatacggactgatttcagggtgttggctaaacccacctctggcatggactgaagcacgtcgtccggagcagtcaagtgaacaaaaagatgcatcattccagtttgcctctaccgacacgcttcaaagattggtgggagaaatcatccgagtggtgggattctttcagttaccggaaggggtc

SEQ ID NO: 58769 - DNA, 471 bp, Zea mays
  Clone ID: MRT4577_153591C.1
cgggacaagacctacctgctcagaccactcctgcgattcttcaatcctggccttctgccctcccacccgtcggtgcggcgtccagcgcgctccgtcgagcgaaagtctacagcttctgaataagaacgacgactccccagagtgatccgctcggggccactccgacctcctcaaccgatcctcatggatgatctccactgacagcttccatctggctatgaccggtatgctgaggagatgccgcacttactcatgctgattggcacgacatcaaggatgattcgattgcgaggatcatctacctaaaggaaagaatcagtgtgactacagttctcagaatatgtacaaagagcgcacactatgaaatggatccctcccgcactctcttcatagcgaatatctgctgcgatggtagtgcacaatcatcgatcgccagagctaggccattatgattcatcatccgatgtcgat

SEQ ID NO: 58770 - DNA, 368 bp, Zea mays
  Clone ID: MRT4577_153592C.1
ctccttcatgacgagctttctccagctctgagcgcgcggagggatcggagaggcgcggaggaacgggggagaaggagaaggaggaagagcgggaagcggggcggcagccggcggggccggggccgggacaccgcgggtgccgacgtggagggagcgcgagaacaaccggcggcgggagcgccggcgccgcgcgatcgcgtccaagatcttcaccggcctgcgcgcccacggcaactacgctctccgcaggcactgcgacaacaacgacgtgctcaaagcgctgtgcgaggagggccgttggacccgggagcccgacggcaccacctaccgcaagggatgcaagcctccgggcagcagagatccatata

SEQ ID NO: 58771 - DNA, 244 bp, Zea mays
  Clone ID: MRT4577_153593C.1
tggatcctgagcctcgataacagattcctcaaccggcccacccgccagccagccagcgccttcatcctggggctgcgatggacattcggaaattctttggagtaataccaagtggaaagaaacttgtaagtgaaacagtaaagaagaatgagaaaacaaagtctgatgaagaaactttaaaagcaaagaaaggaataaaggaaatcaaggtaaatagctcccgtaaagaggatgacttcaaaca

SEQ ID NO: 58772 - DNA, 732 bp, Zea mays
  Clone ID: MRT4577_153594C.1
cattgggtacctcgaggccggccgggagtgcgatgtcttcagcttgcttagatagccgccatggactcgctcgccgccgtgtccatgcgggccgtgctcatccgggggatccgcgttagatccctctccggaaggaaggtcgacatatctcttcactgtacaagccgatacagtccgaaggtccgcgattactatgcgtgtggcacaagctcgcgccacgagaacgtgtacgttgagctcgatctgcatcggtgacaccactactaccatgggcaccatctacgaattctgaacgcgaacgaacatccctacaaacggctactcaataaggtgttctacaggatcatgactactactcaccaggacaggtacgctgctcaggttcctgctgatgggagccctgtcacttctggcctacaccatggggacatcgtgcaccgaagctcctgccgatgaacagggaacgtcgagagtctgctcacacgccgacgctggggaagactgaacgtcagtttctccatttggatgccctagcacgttgctttgcactggtggcgcctgctgatgcgccacactcggcatgaaacctctctctatcatggtgtaacgctgaacaaaacatggtatatttgtcattccgatattgagtgctcatatgcactcatacatacattaaaatggagtacgcctctctctcattgtagaagaagaaacataggacctccagctacg

SEQ ID NO: 58773 - DNA, 289 bp, Zea mays
  Clone ID: MRT4577_153595C.1
cccacgcgtacgcatacactacatccacaaaatattcctgctcaaaagcattcttgctactatccaattcggactatgtgtggagtttactgggtcacaatttagatcttcgacgaaatagaattcctcaccatctatagcaactatcgaccacctatagaacaaataccacaagaaccttactttcccaaaaatccataaggcaagtacaaagaccaggcggatctagaagctccaagactacaataggctgcttgcgatccaataccttttctatatgagtcaacta

SEQ ID NO: 58774 - DNA, 415 bp, Zea mays
  Clone ID: MRT4577_153596C.1
atatccagaacccgccgccgactcatcagctcgagacacgccttggagatgctgtcaggactgcgactatgcgggccaatgaggaagaaaaagcgaatgaggaggctgaagcacgcaccgaccacacgatcactgacacatccgagcacgctgatggtgattgtgcctgccgctgactacatgtcatgtgttacgattcttctacgcgtgagatgtcctcggagacatgtcccatcctacttcatcgtcaccgtttgccatgtgctgaatgagctcctcctgcaaacctggacttcagtacgccatctatcgtggtttctagctatatccagacttttgtggtcccacgatctagacagtgttgtgggaacctactctgatggagctatgtttgctgctaatatcgagctaccca

SEQ ID NO: 58775 - DNA, 155 bp, Zea mays
  Clone ID: MRT4577_153597C.1
tcggaggctggtttggctttaaggccttttttaaagcctaagtcaaaccaaccggtttattagggggttaccggtttttaagggcggaagttggttgtcctgaaaaggtttggtaccctgattaaaaaataacctatttgctaagttcattcccc

SEQ ID NO: 58776 - DNA, 438 bp, Zea mays
  unsure (1)..(438): unsure at all n locations
  Clone ID: MRT4577_153598C.1
aacaactaagcatgggaggaaatcaaagttgcatacattttttcgggcctcgggccacgatcatacacaagcacatgcgtacacacacgtgttcatacttttttttacntanccaccccaattcgtgggttagcaaggggtttttttttacgcncgcacaacacggggggcgctcgagatcactctcacacacgcacgcgtagcacacggggagggacgaccatacnggaggatcaatcagccgaagaagtggtgcttcttttcgccggcgggctcctcggcgtccttgtgggccttcttcttctcgtggtgctcggggaaggcgaagcctgcggagccgacgggcgccgtcgccgcgacctcctcctggatcttgtgggggggcgcgtgctccggggccttctgtgcctggtgcttttctcagagtgcgaaggcgcc

SEQ ID NO: 58777 - DNA, 385 bp, Zea mays
  Clone ID: MRT4577_153599C.1
gagagacaaataaataaatacacttgaaattttgaacaggccgtttgaacgagtcgtcgtccccggcgtgtttccatccatgggccatggcacccggatattcccagcttatgccatgaacgaggtatgtatgactcggattacgccatggcaacacgccaacacctgagatgtttctgcacgcgccgctggtccggcggccactgagaaaacgaacaagagagccggcagcatttgcctgccgcagcgcgcaaccgtccgagacccgccgtctgagagccgcggagctgccaagccgaggtggcacctcctgtccccagattctggagaatgaacccattgggttcgggttccttcatcagccaaaacctcaaaccccgtcgaa

SEQ ID NO: 58778 - DNA, 298 bp, Zea mays
  unsure (1)..(298): unsure at all n locations
  Clone ID: MRT4577_15359C.1
aacaaggaggagaacccgccgaccaggccccagaacacaaanccnngccnccaccgcgaggnggagcagcaggngaacggggccggncccaaccncnncnggggcaaagcaccgcnnnacncnggagaaccaaggcgcaagaggagccnggaggacggacggagaggacgacggnggaggacanggacanagcccggcgagcgcaccncaaagggnggaaggnnccccnnccaaaccaagncgagnggcagngngaaccgccagaancggacgaagcggacagaaagcagcagcaccg

SEQ ID NO: 58779 - DNA, 683 bp, Zea mays
  Clone ID: MRT4577_1535C.1
aattcggcacgaggacttcccaccaccgcctatccgcgttccccccgggcgatcgatcgatcgcggctaacctcgccgccgccccatcgaggcagccatggcggagatggccgaacggtccgtcgcgggcgagctgccggaggagccgcggccgccgcacggggaggaggacgacgaggaggaagaggagggggacgtgtgccggatctgccgcaaccgcggcgacgaggaccacccgctgcgctacccgtgcgcctgcagcggaagcatcaaattcgtgcaccaggactgcctcctccagtggctcgaccatagcaactcgcgccagtgcgaggtctgtaaacatgcattctccttctcacccgtgtacgctgataatgctccgacaagactccctttccaggaactgattgttggtgttggaatgaaagcatgccatgtgtttcaattcatccttcggcttgcctttgttctctcagtttggctcatgattatcccattcattacctattggatatggcggttaacattggtgagaagtattggtgaagcggaaaggctgttcctcagtcacatcagtgctcagttgattcttagcgatgccttcatgggttccttctctcagcgatcattgtccttatatttcttggagccacctcattacgggactacataaggcattt

SEQ ID NO: 58780 - DNA, 1149 bp, Zea mays
  Clone ID: MRT4577_153601C.1
cctatgggccattggtgtccacccgcccggccggccacgcggccggccacatcgagaacacgatcgagcacacaagcacgaagactcgtttaggagaaaccacaaaccaccaagccgtgcaagcatcatggagtacggtcagcaggggcagcgcggccacggcgccacgggccatgtcgaccagtacggcaacccagtcggcggcgtcgagcacggcaccggcggcatgaggcacggcacgggaaccaccggcggcatgggccagctgggtgagcacggcggcgctggcatgggtggcgggcagttccagcctgcgagggaggagcacaagaccggcggcatcctgcatcgctccggcagctccagctccagctcggtaattacgactctggatacttctttcttttgtgtgcgcgctgcttcgtcctatatataataatacatgagttaggcttagtaataatcaattaatttaatccgtgggtttcgtgtttaagtcggaggacgacggcatgggcggaaggaggaagaagggaatcaaggagaagatcaaagagaagctgcccggaggccacaaggacgaccagcacgccacggcgacgaccggcggcgcctatgggcagcagggacacaccggcagcgcctacgggcagcagggacacaccggcggcgcctacgccaccggcaccgagggcaccggcgagaagaaaggcattatggacaagatcaaggagaagctgcccggacagcactgagcggcgcctatacgtggctgtgctgtgctgtgctggcgcgtcaaagccgtactcttcagcgttccatagataataagataaacccatgaataagtgtccctaccctttgatcatgtgacagggacagggacagtttcctgtacttgtggggtgaatttgtacgtgtgatacggtaacttggtccgtgtactgtttatgctgctacgttttccttcctaaaagtacgtatatatatacagcacttgcgagtggctttacttgtgtgcactgcctaaaagtgtcgatattacctccagcggtaaataaatgacccttgtaagaaacttacacagcatgtcttactaattaacagccgttattaacaaaaaaaaaaaaaaaaaaaaaaaaaaaaaaa

SEQ ID NO: 58781 - DNA, 302 bp, Zea mays
  Clone ID: MRT4577_153602C.1
cccacgcgttcgcggacgcgtgggcggactcgtgggccgacgcgtggtcaagcacatcgggaagaagctcgttggcctacgacgattcatccacgcactctagctgtcgttctggatgaccgaccgtaggcacctacacctattggtcggtgacctcgggtaccggctggacctaatcagcaaggtgcacgggcttgataaagccgccgagtacttcgggatggtacccaagcagctgacgaagccgcagtgctacggctacctactgaaatgctatgtggaggcgaaagccgttgacaagg

SEQ ID NO: 58782 - DNA, 452 bp, Zea mays
  unsure (1)..(452): unsure at all n locations
  Clone ID: MRT4577_153603C.1
ctcgccgcctcgttcgttttctcgggcgaggacgccgacgcgtgggcggggagcgccatctcgcggaggcgggcggcgaggtcggcgtgggcgggcggcggcggtagcggctcggcggcggtggctgccgtcctgagcccggcgagcaggcgcttccgcggcggcaggtgggtgttcagatccggcggcggctccatttctccaccagatcgcggggctcagatcatctcgcggagctgatggggcggggcgccgcgagatcgggcgcgagcagcgacgggatcagctaaatccgtgcgcccatcctggaccggcgggcgggcgaggcgaggccctagcacgggcacgcggataaaaacgggtcctttagcatccggaacatggaaacatgactctgaatttcgcgcggagcccgagacngagcaagagtgagggggaaagcggactccttg

SEQ ID NO: 58783 - DNA, 846 bp, Zea mays
  unsure (1)..(846): unsure at all n locations
  Clone ID: MRT4577_153604C.1
ttgggtacctcgaggccggccgggtgcgattctctcccgacaagccggcactagcaacacacacatgactgcggtgctcttgccatcactagttgtccacactgtagccttcttgctacagcttccaatgggtacttcccaaacaacagagcctgaacaacaaggctgctcgcccaaggcatgcgggagcctgaacatctcgtacccgttctggctggaggagccagggcagccgccgtgcgggtcgccgcccttccagctcaagtgcaacagcagcggcgcgttcctgacccactccatgttccaggcgtaccgggtggtcaacatcttcaacgagaacaagtccgtgcacgtggtggacgagaacctgccgctcgccgccggctgcccggcgccgtgcttcaacatctcgatcgccatggagttcatgggggcgttcgccgtcagcagagccaacagcgagctccggttcctctcccggtgcgacgagccggtgccggaggctctgcctgggttccagcgcatgccctgcgacaactcctcgttcgtcgggtttagacggcggttcgggagctacagctacagagagcacggnggcgggggcggcggcaacaccgccgggctgccttgtcgccgtcatgcctaccgtcccgccgccagaccgggacagcaggcacaactacgtcgcgggcctgaggaacggatttctcctcgagtggacggcggtctcgggggtcgggggattgctccaagtgcactgcaagcggcggggaatgcatgtaccctgccaacggcctggctttctcctgcaattgcccagacggcatacattacccagtgagctgc

SEQ ID NO: 58784 - DNA, 238 bp, Zea mays
  Clone ID: MRT4577_153605C.1
atgcgcctcggcccgttgctccgttcgtggttggccccgatcctgcccacctacatctcgggggtgacctcccgattccagacgaccgctttgagccttaaattgctgcttatgttaggatctatggtactattcttattgtgcactatgattatcaaaaggggccgaggatcaaaccagggggggggggatttcttcaatacattacacactcttacattacaattattattttatt

SEQ ID NO: 58785 - DNA, 466 bp, Zea mays
  Clone ID: MRT4577_153606C.1
atcggggataaatcccaatcaattttttggttttttttaggaaacaccatgcccctttgggggcccccttttcgggtccctctcatttggaatctaaaagaggggcccccccacgatggggtgctgcccccacaaggggggggtcatcaaaaagaaccgggtggttggcaacaattgttgctgctgttggaagggcgccccccatggggtagccccccctggggggttaagtaaccggtggccctgttggagggcccccccaaagttcgacccaatcagttggttgaatggaaatagttgttgcaagtaggccgcagggtttgccccaacttgctgagtaagagctgggacaatttggtgcagcaactggtggtgcaaccaccgttgttgcaggtttttaggggcattgcccatagcgagcgggctaaataaaaaaaattgttgctgttgtagggaggccataggg

SEQ ID NO: 58786 - DNA, 288 bp, Zea mays
  Clone ID: MRT4577_153607C.1
cttaaacatgccatgagctgcatctattttcttcgtcccaatatcagacaggctgggtcatattgactcacggcgggtcttatctaatcaggcgttgtattgtatgggatagaatggctatgttgcaccccttgcagaagaaatcatgggcagagcctcttaagagctgaccaagtcatggactagatgcttcttaatatgctttcatattgtttcttgttgatggacacctcttgtatttccaaggccctcaaagaccatcctgtatgtatagaagctcgaacgcac

SEQ ID NO: 58787 - DNA, 550 bp, Zea mays
  Clone ID: MRT4577_153608C.1
tggtcaccctgtgcgagtggttccggcacggcagcacacaccaccggaaccaaccaatcgcggccccacctgcgacccgtaccccttccccgctatagcgatggacactgagctgacacgcttgctcaagtgcccacgcactacggcgccaacctcggccaagcccatttacatgtgccttcggggcaaggagctacgacgtgacctccaaccgaagtttctactgccctgtgccggcctacagccttcttcgctggccagaaggacctggcaagccctccgatagatgcacacagactaaggctaacattctggtgacctatacgctctcaccaaccttgagctataattcctttaccactggtagaccaacaactatgccaaatgccccgtcttgcgacaacaagccgccgacatcttatctcgctaatatgtgcgaagatactactctccactgactctaggaacattcagtgttgggctggctagcttggcgatagcagatgagcgtccacatattattaataggaatgacatatgtgaggaccct

SEQ ID NO: 58788 - DNA, 612 bp, Zea mays
  unsure (1)..(612): unsure at all n locations
  Clone ID: MRT4577_153609C.1
atttccgaccggcgcagccgcctgcgctgcagagtccactagccaccgctggagactgaaatggcgtaccttgactacatgcagctcagcgagtgatactgtcaccggcacacacgcgctgctccatagaaggacttatcttcctacacattagacgagcatcctaaaggtgattcgccacgacctcagccagcacaatacacccaaatacagagttttcgggtcccttcttcaccacgagatcagatgacaatcattctctgctaccatctcatgggatatgagacttagcttctgcattactcgaacgggatgccacgatatggcgttgaagtcggcttgtcctcctatgcagctgcctgctgacctggccttcgtgcgcgtcgagcgtgcgctcaagacccgcggtttacataagagaatatatgcgagtgtcgagggccctggatgaggctttcacatgctgccctactgatcataggacgtctttccgtggtctcacggatggtactgttattaggactacaaatgcctaacgacncacttggtgccctccaagaaggtgtggatgttgcgctgtgtattcctcgcagagatgcgagtcgtgctgga

SEQ ID NO: 58789 - DNA, 230 bp, Zea mays
  Clone ID: MRT4577_15360C.1
ggggaaatctaatattatgaggggaaaagacaagcacaccaggcgacgaaggcgaaactgctatacattgcacaaaaaagggggacacaattacatccatggggaaggagggcgaaaaaaacacgatctgggaaatcataaacaggcaaggggtagcagatgaaaaagaattacatacacgggacggcaggtccagtggggggcacccctccaaacacacaggggaaaag

SEQ ID NO: 58790 - DNA, 344 bp, Zea mays
  Clone ID: MRT4577_153610C.1
gcccggtaaagattgacctcattgagacctatggaaatatagcatttaatcttcactactacactgacgtccaacaggctgagttatatgcaatatccattttgagcacgatcccaccttattcaagttcaacaaactgactaaagacctctgcgacagcattgactacaataacctactgaacggttcaactcttgacatctacgacaaggaaatggtgaccaatatcgccaagacgattgacatcagcaacgcatatatcttcgactctattgacagctttgctcactatgtgcacaacatggccagggtggccaatagattgggactacaacggaacacag

SEQ ID NO: 58791 - DNA, 518 bp, Zea mays
  Clone ID: MRT4577_153611C.1
ctcgaggcgggcggggactataatccttcgctgatctgcctccaccgagcacgggcgaatgaaatcgaagcggggtgagcacgcacgcgcagcgactggcggcgatggggagcctcagcctggcgacggcgccccccaacccacgccgggacgccatcgacctccgcaaggccttcaaagggcttggatgggacagtacaacagggataaacatacttactcctcgcgattcagtgcagcgcggactcattcaacaggaatacaggtgtatggatcatgaggaactctcccaccgcatctcatctgaactcagcggaaaccaccacaaagctatgcccatgtggattcttgagcctgctggacacgatgcaactgcttcgagagaagttttaaatgccgcacctatggatccgagatcacccactgacatcatatgttccaggacaccatcacagtcgccaataatgaaatggatttatcatgcccagatccgcgcaccttctcttgataatgaattg

SEQ ID NO: 58792 - DNA, 179 bp, Zea mays
  Clone ID: MRT4577_153612C.1
aaagacataatcccagcgaactgaagaccgcgtgccgtctacacttgcaacgtacaattctactagactcagaatcgtcttcgattcatccggagcagagggctatagacctagcacagcaagctaacgaagctgttttttatatagggaatgtataatggaagccctgggcttggatt

SEQ ID NO: 58793 - DNA, 318 bp, Zea mays
  unsure (1)..(318): unsure at all n locations
  Clone ID: MRT4577_153613C.1
cttcggaacaaaacacaagccagttcagaaaagggggaaaaaaaaaaaaagataaagatgtcggggttcggccacaacaacaaaacaagcggttcccgggtcggcccaccagtgtcaagactttgcggcaacgaactactgctggcgtcggacgcccgcggctgcccgtcaaccaaggcacaacacactggtcaagacatgcgcttancacccggtcaggacgagaaagcatgccggcgttcgcgctcgtcaacaaagccacggngctcgccatcaaacactccctcggccagtcccacccggtcaagctcgcgcctt

SEQ ID NO: 58794 - DNA, 481 bp, Zea mays
  unsure (1)..(481): unsure at all n locations
  Clone ID: MRT4577_153614C.1
ttgacgtcgatgcacgcgggcgaagctcggaattcggctcgagctctgcctgatgctcgcttctgtcactacacctatcacctggcggttgcggatcccagtgcccaaattgaaagtaccccggggagcgcccagacgcccacattggctgtctcggggcggcctttttttctgcgacgagtgcttggaccaggagagttctactccttttctttgtgagggattgaaccttcacagcgcgttattttttcaccctcggcaaacttgccatgcagtttcgtgaccaaatcgccctgcgcacgttgcctagctaacttgtcgcgcgctggtatcctcgcttcatctagcttgcgcctgccacgaacgcaaccgcgcgctgcttctccgacctggcatggcagcctgttgctccggcccggccgacgagttcccccgggccacaggccgctcgacctgctgctccggcctncctatacatgct

SEQ ID NO: 58795 - DNA, 412 bp, Zea mays
  Clone ID: MRT4577_153615C.1
gttagatgaggcactttacaatatccagtttgaacagcactggctagaggcccaaactgaccgtcaagcaatatgtaagtatcccccatttaccttctccttaaagtactatcttgagtgtttttcaccttacgccccctgtcttgtttgatcttgtaactcaatatctgcacaatagttcttggtggtttatgggcaggtgtggtgaacaaatgacatcgatatcatgaaagagtagcttaacaggacttgtaagttagaaaatgtcttagatcgatttttatgtaggaattaaggtaaaagctgttccgaaattctgttgtggtgagctaaacaagccccatgcttttgtgggacctggtaacgacattacagtttctccctttctagtttgcttgcttttattttttgt

SEQ ID NO: 58796 - DNA, 373 bp, Zea mays
  Clone ID: MRT4577_153616C.1
gcgtgacgagcgtgaggaggcgggtgtcgtactgaatcgaaaaggcgtaaactcagtctctcgagtttcctcggaccggaagccatggctgccaatgaagcgaaaggcttgctcgccgcgaaaactacagcagccaaatccgaccacaaggacaaggtgaataaggtcccaatctcacgctcctacggcgcccgactacagttacctgttcggcgtatccaccgtcagctgaaacaacagactcatgcaaatgctcgcgttcgagctacctgaaccgtctactgagctcccattctctaatacttgactgccgacgttctggaacttgctgcgaacgctagtaaggatctgaaagtgaagcgtatcactcctc

SEQ ID NO: 58797 - DNA, 217 bp, Zea mays
  unsure (1)..(217): unsure at all n locations
  Clone ID: MRT4577_153617C.1
ggctgcattgttccggccaaatgatcataggaatctacagtgtngtaggaggccgaacgaggttgcgtagatcctgctgtttgccttgttcgtttggccgccaataaggagccaaatgtgcgtgcatgtcaggagaagaaagaattgcccgacagttctacactgaggggtttttttcgtacacagcatgatacaatataacccttgtttctggatt

SEQ ID NO: 58798 - DNA, 654 bp, Zea mays
  Clone ID: MRT4577_153618C.1
gggtacccgggccccctcctcgagttttttttttttttttttttttttttttttttttttttttttttttttttttttttttttttttttttttttttttttttttttttttgggaaaaaaaaaggggcaaaacaagaagggcattgttttgtttccttttccaggccccggccttgggccattaaaaaacccccaaacccatggggtttttactaactaccccccaaagcaaagccggaggggcccccccggtttttcccccaaagggggcccgaaaaaaacccccaaaaaaatgttttgaaaggggaaaaaaaaaaaaataaaggggagcccccctcaaaatccgggcccccccccttttaaggaccaaaaagccccccccccaaactgaaactgggaggggggggctggaaaaaacccaattccaatgccaaaaccggttttggcccctttgggaaccccggaggaaaaacccccctccccgaaaaagtttgggaaagccctttcaacccaacgggggaactttttggggggggcgaaaagccccccgcccaagggaactacgggcctggggtttttccccccaccggtggggactttggcccggcctatttttttaaggatggtgaacacccctgggggggcaaagcggg

SEQ ID NO: 58799 - DNA, 494 bp, Zea mays
  unsure (1)..(494): unsure at all n locations
  Clone ID: MRT4577_153619C.1
gacgcctgcaggatccggtccggaattcccgggtcgacccacgcgtccgggctatggcacccagaagagctccctgaagataggggagcagcggacaggctctgaggttatcggccggggtggtcctcgcaaggcggatggaccacggccgtcactggactacgtggagctctctccattagcgccaagctccccacagcgcatgcgcactctctcccgctccactcccgagcgccccaccaagcaggaggatctggagcgggacttggcccaacgctctgaggaaagacgcaagtggttcgagtccacggacggcaggaccccagagacgcccagtggcgatgggtctcgaaggcgcctgggtgcccccctgactgacgaccagcagagcaggctcagtgaggagactgagaanaagntgcaggagtcggaaaagctgcccgtgcgggagaacaagcgagtgccactcaccgccctgcggaaccgggcccaca

SEQ ID NO: 58800 - DNA, 266 bp, Zea mays
  Clone ID: MRT4577_15361C.1
aaaaaggggaaccggggaaaactgacatttgcggcttttttgtcacctttgcaggttcacaaaaaataatttcgggggcgcgctttcgcattaccgcttgtccccataattagttgatagaaaggaatcttggcttccattattttttaaccctcaaaaattaatagctgtccctaagaaaaccgactcctcttgtatactaaaggcatacgtaaccgatgtacccaagccacccaagcctttgaattttacaatcaatcatagcc

SEQ ID NO: 58801 - DNA, 348 bp, Zea mays
  unsure (1)..(348): unsure at all n locations
  Clone ID: MRT4577_153620C.1
gtcggtttgattggtttccttaactacttgtactgggcaaaaaagtacgtctaccgccaggatacacgcatcgtcgatgagccatcatcagtcgatcaagattcacattgaacctcgacaatcgaaccgttctttacttgagaaattaaaggtgaaactggttctggttcacagtgccacttattatagtcaacctgcaaagcatgtacactgatgtctgataattgtatttggattgttagtttaatttcatccatgatatggtcacnnnnnnnnnnnnnnnnnnnnnnnnnnnnnnnnnnnnnnnnnnnnnnnnnnnnnnnnnnnnnnnnnnnnnnnnnnnnnnnn

SEQ ID NO: 58802 - DNA, 1039 bp, Zea mays
  unsure (1)..(1039): unsure at all n locations
  Clone ID: MRT4577_153621C.1
accgnacgtcgtgtactcacttcagctactcgccatcacctgccgttcgtttgaattctctgctcttctcgtgcactcacctctaccacagcttcctttactttttcaccttcagttgtcttctgctttatctatcaccatctgtctgtcttttcttttgtattattactatacttcttttcttttttacttcgctctttacatcttccagttgctgtattcgcttatgtttatgccactgtttttctgtccaactatttctttgttgtcgccgtctactacttgctttctgtctttttttcctttgttatatgtactttttttttttatttttttttcattttgttatttgtttatcatttatcttttttttttctttctcttcctgttctatatatggtattttttttgtattatttttttttttttgnttttttatttatttattggtgtgtttttttttttatttatttattttctttttatttttatttttttacattttatttttttttttctattttgatttgtttcttttcctattatttttattttttttttttattttttttttttttttttttatttttttcttttttttttttttatttttgttttttttattattttttttttttttttttttttttttntttttttttttatttttttcttttttgatttatttttttttgtttgtttttttttttttttaatttttatttttattttttattttttttctttttttatttttctagtttttttttttttttttttttttttttttttttttctctttttttttttttttttttttttgtttttttttttttttttattttttttttttttttttattttttcttttctttcttttgtttttctttattttttattttttttttttttttgtttttcttttttttattttatgtttattttttttttttatttttttttttttgttttattttgcctgtttttttctttttgttttttatttttgttttttcctgattttctttttatttttttt

SEQ ID NO: 58803 - DNA, 1213 bp, Zea mays
  Clone ID: MRT4577_153622C.1
gcggcgtggatctgagcgccgtcaagcagtactactgccggcacaaggtgtgcaacatgcactccaaggagccgcgcgtcttcgtcgccggcatcgagcagcgcttctgccaacagtgcagcaggttccaccagctacatgaatttgaccaagggaaacgtagctgccgccgccgcctcatcggtcacaacgagcgccggaggaagccaccacctggacctctcacttcacgatatggccggctcgctgcatcacttcaagagcctggcaggttcagaagcttcctgctcgacttctcgtacccaagggttccaagcagcgtgagggatgcgtggccaggaatccagcacggtggcgacaggatgctgggcaccgtccagtggcatgggcaccaagaacctcctcacccacaccgcagtgcagctgctggctatggcaaccatgctgcatacaactgccatggcggcttggtagcaggcggggccccaatgctctcctctgccgcctttgagctcccgcctggcggatgtgtcgcgggagttgccgcgactccagcttgtgctctctctcttctgtcaactcagccatgggacacgaccttcccacgaccaccggtccccagcaatgcccgcggccggcgccttcgacggcaccccggtggcgccgtccgtcatggcgagcagctacgcggcgtcgagcgcctggacgggctcgcgggaccccgctgccgacggcgccaggaacgcgcagcgtctcgacgatgctctgcacctggtccacccaggctccgcggcggtccacttctccggcgagctcgagctcgccctgcagggaagcggcgggccgccacacctgccgcgcgtcgaccatggcggctccggcggcggcaccttcaaccattccaccaccagcgcgatgaactggtccctgtagcagcactgcctgccttcatccggtcgccacgccacgagatgtggagggagcacttttgcattggacaccaccctggttttgtgcgccttaccttgccgttctcgttttttcagggtggagaaactgggattcctaaccatagtagatctaccgtgaattcccttcccgtgtagtagcgcattgcgtccatgaactcatttgatcgatcgtcgtgtcaccgtgtgcgtaactgcgtatctgtttggcgtaaaaaaaaaaaaaaaaaaaaaaaaaatccgaa

SEQ ID NO: 58804 - DNA, 399 bp, Zea mays
  Clone ID: MRT4577_153623C.1
attgggggttttttttttttttttttttttttttttttttggtttgtttttttttttttctcttgttttctctttgtcccattttttgttttttcgatgttgtgcccgggcgccccgcggattgtcccctatgccccaggggaccggagcccaaaaccggggggggggagagggcacccaccaaaaaaaggggcccacgcaccacaggcgggtgatgggacccgcctggggagccgctcctctttttccggaggcgggagagggaccccgcgaccaatttgcggggggctttgagccgggcacttctgagttctggcgccccacccctcctaggtttcaaaaagcctgacgctgggccggccccccaaaccttgggcagggcccctgggaaaaggttct

SEQ ID NO: 58805 - DNA, 306 bp, Zea mays
  Clone ID: MRT4577_153624C.1
gacataatttctctcgcttaaaataattattagctaaaatgctcaaacagttcaagtttgtgacagaatgcatggctgaagtaacgcaaagaacttaacactgcaatggaagtggctaagtcgacctattgttcacaaagggcggcgatcctacaggatcaaatcttgcttccacgtgctatgcaatcttaaagatctcttctatgagtgtcagtcaacataagttcatgggcagtcgttttaaaacgtcgtaaggggaaaaaccctggtctatcccaacgtaaacgctttacattaaagccccct

SEQ ID NO: 58806 - DNA, 466 bp, Zea mays
  Clone ID: MRT4577_153625C.1
catgctcccggccgccatggccggggattcgagcggtcgccggcaggtacaagtcactgagttagacgaccttgatcatacaagataaaacagacaattctactggaaatgagggtgattacgattacaaacttaagaatgcttcttctatagtggaacagttgctggacagttgtaggatccaatgccaaggttccctcacaaacatcatgatgaagtggaagactagtattcctgaataacctatattcaaattcattacggcatctgtcatgttcctctgtcaaagctgctaccaacctgcatatggagccactcggattgtgctccttgagcatattctctcggtgcttgtgcgccaaaaatcattccagtggcatcaaatgctgacggtgcaagatcttttgaaggaaaggtttctacagggtggctcatccttgaattgactgcttcaagcttcatggac

SEQ ID NO: 58807 - DNA, 264 bp, Zea mays
  Clone ID: MRT4577_153626C.1
cgggcccaaaacttcatttttgtaatttcacccaacaaccaatgttaaagagggcccagcccatggtgggttaccgggaaaaggtcttacgggctttgacaaaagcaggtggtcaaagggccttgatttgtgaaacccaaaaaaggtttacgggctacccaccaacggcggggccaaccgaaacaatggttattaggtcaaaaaagaaaaggggactttccgggccggccgttaaaccctataaggaggcctattaaaagggcc

SEQ ID NO: 58808 - DNA, 285 bp, Zea mays
  Clone ID: MRT4577_153627C.1
tacgaacttatcactggctccgtgccttacagccacattggctgccgtgaccagattatcttcatggtgggccgtggctatctgtccccggacctcagcaaaatctccagcaactgccccaaggccatgcggcgcctgctgtctgactgcctcaagttccagcgggaggagcggcccctcttcccccagatcctggccacaattggagctgctgcaacggtcactccccaagattgagcggagtgcctcggaaccctgcttgcagcgaaggcaggccgattagtt

SEQ ID NO: 58809 - DNA, 212 bp, Zea mays
  Clone ID: MRT4577_153628C.1
tcgggtgaacggtaatggtggcccgtggtgcgcgattcagtgaaacctcgaagtgaagacgcttgacaaggacatcaaagcatcacgcacgaaaggcagggattggttactatcggacttggcacacgccggaacgattgcggacgacaattacctatatggcaagtacgctcacacgatgaaggacaaatttgattagacggagcaagata

SEQ ID NO: 58810 - DNA, 240 bp, Zea mays
  Clone ID: MRT4577_153629C.1
tgtgacgcgtgcgcacatgcggtcccccacgagtgatttcacgagtgaggggagcactctcaacgagtacctcgaggaagcacagggacgcccttatggttctacaccagggacgccatggcaaatggagctctggggaatttaatggcagcgacaatggggatgaactctgggactacgtctggatatacgatgcgttcgaatgtggagtacataaacatgctccaaacgtgggatgca

SEQ ID NO: 58811 - DNA, 324 bp, Zea mays
  Clone ID: MRT4577_15362C.1
gattgttagatatgaacgtgtatatcgctaatgaaacatagctggagggcactgttcttccctttgtacatgcaaaaaagaactttgatcaatgcccacaatacaaatgtgggttgaccacactgatggagcatatacaaagagcgtaaagggggaatatccaggattttataacatgcacgatcatcttataaccagataacactcgaagaaagagttacacacgaatgtattcattcaccgaaggattaaacatgacggttggggatccaacggactgacagggctaaacacctctgccgctaaaactcaagtgctgcatgc

SEQ ID NO: 58812 - DNA, 355 bp, Zea mays
  Clone ID: MRT4577_153630C.1
ggcaaacagacatcatatctatggttacactgactttgtttaacggtacaacgctaaccgactcccagctgtcttattatcatgcgcactctgtgtgccctcgtcagatcgaggggcagtggggattcaggcggtgtcatttgaacactacgtcctgtcgcaatatatggtggctgacgctagttctgtttgggactccaacttcattggtcgaatgccccggatgcagtaccacctggcatactgtttcaggccaatccacgacaccatcccgatctgacatgatagggtacccaacatcattgcgtctctgtactatgaaccctgtcatatgccagatcatatcgacattgtc

SEQ ID NO: 58813 - DNA, 455 bp, Zea mays
  Clone ID: MRT4577_153631C.1
aattccacgagggcgcccacgtgtgccgaggtcaaccgtcaccaaggctgcctcgagcatctgccagcgcatctctcgcactctccgtcgtgcaaggaagcctcgagcagcagcctgtatggtgtatgcccacaaccgccgacgtctggagccgtgcggacaacgccagctgctgctgctcatgttgcactgttgcgttgatttgcagcagcccctgctgaaccatccggagcgaggcttgcatctttgcgagatcagcccttatgttggtccacaagtctcccatcgatggagctggtgattgttgagccgtggatgcccctagtggcgtcgcccatggggacggagatgccgccaacgaagatgacgtgacgaaatttggcgtttgtccctggagatgggcacgctggcgtccaggatgtggtgaaaaaaaaaaaaaaaaactcgaggagggg

SEQ ID NO: 58814 - DNA, 888 bp, Zea mays
  Clone ID: MRT4577_153632C.1
cggggttgcttctcccgttccgtctctccccggtccccgcgtcgcctgcttctgcttcttgcaccccccaccccaccacaaccgaaaccccactaataatccgccatggcgctcgcctccggcacgtgccgccccctcctgggtggccccgccagcaccgcgcggctccacctcgctgtctcctcgtcctccaccgcctgctcgatccgcttcccccgcggcgccggcggtggcagggcggccgtctccctccgcgcccccgcgcctccagcggcggcggcggcaacatctggtagcattgctccagcgatttcattgaccgaaaaggccttgaaacatctgaacaaaatgagggctgaacggaacgaagatttgtgcttgagaattggagtgaaacagggtggatgctcaggcatgtcttacaccatggagtttgaaaatcgagcagatgccagccctgatgattctgttgtagagtatgatggttttgccatagtctgtgaccccaaaagccttctcttcatgtttggaatggagctggactacagcaacgcactcattggtggaggcttctcttttcagaatccaaacgcaacaaaaacctgtgggtgcggcaaatctttcgcgactgggaaggaatccgaggctgcagcaaaagcttgcaacaactagagtagtgaaatattgatagcaaatcgtgatgtaacttgttatatagcttgctcctgatcaaatcacgtggctccaccacttatacttgtttcgtttcaaaatagttggctttgtttgtttttttcaggataactttgatcagatatatacaagaaaacattaatacttatggtatataattaatattaattgatagagctttgaatctattttatt

SEQ ID NO: 58815 - DNA, 907 bp, Zea mays
  Clone ID: MRT4577_153633C.1
gccagtgccaccgtcttcgaagcttctcttctcctcctcctccctaccggctacccttctctccttccctcgccggtcgccaccccctcaccacgagacgcacagccggcagcgaatctcctcaccagcccagacgccgcagcgcagcgccgagccctagtccgccggtccagcgaggcagaaagttgataccgctttggcgtctcccctatggaacatcttccctcaacactagcatggatctgcagtgcgtagcatgagtttgcatgcacgtttggcttttgttcgtcattgacgctggtgcacttctataatgggttcacgatcaaagaacgaagatgacaaggctcttgtcttgtgccaggaaagaaaacgatttgttagagaagctcttgacgggagatgtgcttttgcagctactcatttcgcttatattcagtcactgaggcacactggatttgctctgagaaaattcgtagagcctgaagtgccgacagattcgtcactgttcacatcaacatctgccactccagagcctcctacaatcatgcagaaaccgatgaccatatctccatccctttcacatcatgctagtgactctttctccccagttccctcaccattatcttcaggacgtttccatgtcaatcatatgaaagctgggggtaattcagtgacaactgttaaggagaaggtgattgaacctgtgaccgcactctcgaaacatcatcccctgtgcgtggacaagctatccatgacctggatgacagttcaacgtttgaagctccccctggaacaccaccatgggactactttgggcctttttcaacctgttgagagccagatgtcatttccctgatgacaaaggaaacttgggtcactgacttttgagaatgatgatgatatc

SEQ ID NO: 58816 - DNA, 344 bp, Zea mays
  unsure (1)..(344): unsure at all n locations
  Clone ID: MRT4577_153634C.1
aatccaaacgaaatantaaggggggggcattaacagaggagtaacaatctcncaggaaatactgggctaccgaggggaacttcactcggttaacctagctacaaaaccacgagcgaggcacaaaacttggccggacgaggtggacagggacaggagctgaaggagaggagcacctggaagggcctacgaggaaattccaggccgggggcggagctccatagaagagcgctgggagcaacgctaacagataactaataaggacacgcattcgggacggcggatttctcgggcgtaggaggagctccctcgggcaccgggcgggggggcggggggttcacggccac

SEQ ID NO: 58817 - DNA, 461 bp, Zea mays
  unsure (1)..(461): unsure at all n locations
  Clone ID: MRT4577_153635C.1
taatttacccgaagccgcatgaagagagaggagagcatcgccgccgcgtcgagcatgtggcaaccggtgtctgggtcgcagggcagaggggcgttggtgtccgctggtgccaagggtcatccgcgtgcaagcagctggtcgcacgcgtcctcgaatttccggaggttcttcgccgaagcaccctgcgcgcctgcttcgcggtccgacgtggtcggcctatttgggcacccaattgaccggagaagaacaggtagcccaggaggagccgcacaacgaggagttcgacttgatctaggtggcgtctcctagtcgactttgtggcgccaaggatggactttagttcgctttatatttatcttttattttgcaagacttaagctatgtaataaatacttttatgatattatgacatttatctctatacactctgntatttatgtgttgtcttctttggcgcatat

SEQ ID NO: 58818 - DNA, 263 bp, Zea mays
  unsure (1)..(263): unsure at all n locations
  Clone ID: MRT4577_153636C.1
gggcaaaactgcccgggtcgacttagcgnccggncagtttttcaattagctcatcggtgcaagtgggagaactcaacacctnaangttctgatcgttgcccttgctctcctggcgctcgcttcgagcgccgccttcaatacaagcggcggctttggcttccaaacaccaccgtttcatctaccgcctcccttctatattccgcctggttgttgtctnccnccncaacancanccccaaccatancaataccccactcaaccac

SEQ ID NO: 58819 - DNA, 374 bp, Zea mays
  Clone ID: MRT4577_153637C.1
gagataaatgtcataatatcataaaagtatttattacaaagcttaagtcttgcaaaataaaagataaatataaagcgaactaaagtccatccttggcgccacaaagtcgactaggagacgccacctagatcaagtcgaactcctcgttgtgcggctcctcctgggctacctgttcttctccttcaatgagctcctgctcagcaacttctacatgctgaacaccgtgatcctcaaccacaggctcggtcaattgggtgcccaaataggccgaccacgtcggaccgcgaagcaggcgcgcagggtgcttcggcgaagaacctccggaaattcgaggacgcgtgcgaccagctgcttgcacgcggatgacccttggc

SEQ ID NO: 58820 - DNA, 305 bp, Zea mays
  Clone ID: MRT4577_153638C.1
gaaaaaaaagcaaaaagctttatttgacaccccttttttgtccttcagaccccatgcccattcaacctaaaagaccctgtgaggggatatgaactaaataaaacctttatctggcataataatttggaccgagaacccctcctggtggtgaaagcacactaaagtgggggccggttaacacccatcgcaaggaaaagcctggtcgtggcccgtccattaaaatccacaattctgctgccaatgggggcggggatacaaaaacctggtcccgtttttgtgccccatggcccccaagctttgggggg

SEQ ID NO: 58821 - DNA, 358 bp, Zea mays
  Clone ID: MRT4577_153639C.1
ctaatgttatacgttacttttctactcacgctctgaactttgcatttaagggctagttcaatacgttcttcagctccaagaaggacttggatggctatagcaagcggtctgctggcaacctggcctatggtcggagctgctcggtgctctctctctgcttgttgcatactccctggactacccaagagcacagttggctaatgacgcaaaggctgctcatggatgaacgtgaaaggcaagccaatggacttgtcgatgtctaccgcacgacactcaagtctgatagtcttgctgggctctaccacggatttaacatcttctgcgttggcatcattggctatcgtggtctgtactttgg

SEQ ID NO: 58822 - DNA, 2596 bp, Zea mays
  unsure (1)..(2596): unsure at all n locations
  Clone ID: MRT4577_15363C.1
atcagattctgttactagcactatttatacgaagagttggatggaacttttatatgcagtagatgtagcaaactagaatttcctttggtgtatccctggctacacataactgaagctttctttgaaaggcaagtggctaccttaatacggctaggaatgcgatgtanaagtgttcattcaccaaaaagattattcagttcatcatgagaatacattgttaataaatggacaacataaataggcttggtttgttaggtgatctatgcatcttctttatttcttcagatctgaaagctttccaggactatacatgggaaaaatccaaataaggcaaatatagtttgttagttccattctcttccagacggtggtgctatctttaccattactagtgaacatctatgatctatgtcttagtcaaattgtgaaagacatcgtggtaggaactcttcctccctcaaagcgtgaactttcatagtttcaattatgcttacatgtactgcttgcactggtaaattgagatgtcatggcttctaattaacttctgaacctgtgaacttccatagctccatttgtcctcgcatgttatcctacttcttgcgctcgaggccggccgggcaccacgacctccgcgacgctcgcggccgtgtttctctcgcctcgctccctcggatcgcccgttcgcccccgcccatcgctcgctcatcagaaggagggcctagccttccgcagcagcgctcgtcagactccgccgcccgcaattccccccttgccccggcttttaatgggctttccctcccaccgaaatggccggcgatccctgcacccgcgccgccggtgaccgccccacctcctccgtcgccttcttctccgccgggggcgggctcggcctcggcccctccagcctgctgctccacctgctcctcctccactccctcttatagcctccagcctcccctcgcctcccgccaccccctatggccgccgttttcttccaccacgtcgtcggcgacctcaccgtcggcaagcccgaggtcgccgagctgcacgacaccgacacgctcgacgacgccgcgcgcgccatcgccgccagccccgagggcgccgtgcccgtctggcgccccagggccgcgccggacgacccgccctcgggggccaggttcatcggcatgatctccgcgctcgacatcgctgccttcgtcgcctccgcgggggtcggggatcgctccatgcgcgccgtcgtcggcgaggtcgtgcagcccaatcctgcgctgctcagggagatcgatccgggtaccaggttgatcgatgctctggaactgatgaggcatggagtgaagcgctttcttgttcgcaagagtgggagctggaaaggcattaccaagagattttcagtgctttataatggtaagtggctgaagaacatggaatcaacatctccaagtgcagccagcagcagcagcacgcagctatccccacgttctggttctgcagaaaagttctgctgcctatcaagggaagatgttctccggtttctcattggatgccttggtgctcttgctcccatcccgctgactcagatatcttcccttggagccatcaatccgcagtacagttacgtggaagcatctgcgcctgcgatggaagcaattcagaagatccctcaagacccatgcgccgttgctgtagtggagacgatgccagatggaactcgtaacatactaggagacatctctacttacaagctgtggaaatgtgactatgtttcagctgcatgggcactggcaaacctgtcagctgggcagtttgtcatcggtgccgacgagaatgggtcaacacccatctcagtcttcccagagcctcccatcagcccatcgtcaccggtggaggagatcagtcctgggcgctcgccaagggcgaagaagttcagcagcaggagcatcgggtttctgaacaacacccagatgtcagcgtggcggacacggagcatgtaccaccggggcaggagcaccccactgatgtgcaagaccacaagcaccctcgcggccgtcatggcgcagatgttgtcccatcgggccacacacgtctgggtgacggacgcagagtcggaggaggacggcgtcgtcgtcggcgtggtgggctacaccgagatcttcaatgccgccaccaggagcacctgcccaagtccgacagcatcttgatgcaccacatcgtgctgtacagtatactgctgttggttgatccgttggtgccccggtgcacgctgttgcactgaactgtacaatgtactttgctcatttgttggtttgtctggagagtttttagtcttttagatattcttggtctgcatggagcaggacttggtggtatattgttgcattcgttgtggacggtacgaataagaattcgggcttgcctcggagtctagtccattttgcatgctcgcctgcagcagtgcagctgtcgatgtactctatgactgtatatggaaatggaatgttctctgtttcctttcacatggaaaaaaaatggaaaaaaaaaaaaaaaaacatgtgattgaggtgtttggttgggccccaagcagcttgcctggtgc

SEQ ID NO: 58823 - DNA, 329 bp, Zea mays
  Clone ID: MRT4577_153640C.1
gtcagacatagaagactagaaccgaacctgaccattgagctgatacgtcgcagcatcgagtgctataccttcttcatgtacctgtggaacccctttgaaggataccacttgggctccggcagcaggatcagtgtgttacactacatgacatagaccatctcggataccaatgacttagctggagcgcggatggtctgacaagagactacagaggcgcacagtgtgcaatgcagacggaccatgagtagaaaaggaggaggtcaaggtggacgcccaggacacgggacgtgctttaaatgaggggcgagctcatcatggtgctcgatgtg

SEQ ID NO: 58824 - DNA, 477 bp, Zea mays
  Clone ID: MRT4577_153641C.1
cgatatggagcagaaggggtgtctctgccggatcaagctgcgctgtcgagctcttctcggcgatggaggaggacctggacacggacgacgagggctcgtgggaccttgttgggagggacatccggctaaaggccgccttcctgtgcattgacctcggccgtgtgatcgccttgtgcgggggcgaagagcgcaagaaggcgctcactgctcttgccaacaagctcttctactccatggatgagctgggcgacgcagtggagagcaagagcctccctctgacgcaggcgcgctacagcgacaccgctgacgcgctccgagaggtcgtcgccgtcctcgcgctgtccctggacctggagttcggcccggatgatcccgtgtgccgtgtgcgagatcaccttcacgcggcttcacatgctgtgtggccgtgtgggtgtggctgtgtatacattattggctcatatttgggttggcgtcttc

SEQ ID NO: 58825 - DNA, 1068 bp, Zea mays
  Clone ID: MRT4577_153642C.1
cggccgctcaggcggcgggcggaagtctcccccccccaggaactaccatctcatttataaactcccacagctttgaggcggcgagaagcagagccggaggaggaggccacagctttgaggcggcgagaagcagagccggaggaggaggaggggaatcggagaagatggttattctcgtggtagcgacggcgtcggacccggcgtccatcggccccgccgccgcgttcctggccatgcctggctggtcccccggcccgcccatccccgaggggatggagagctttacaaatgggaatgttaggttattgaagcatgaacgcagcattgttgcagaggatgatcttgaccgtcggtggcaggaagccactggagaggctgtttccgaggtcatattcctcagtaaacacactgcagtctccaaccgccctgcactcactgtccatccaatcggtgtgccacatctgagggaggatgagaccccccctcaaggtgggaggcctggatgggcagcggtgccaaaccctcgaattggcccatggttccggttgatgcaaaagatagctgtagaacaaggccttgttccagagtttgaggttacgcttgaggctactcaccatggaccagttaccagcacacccaccatgtttgttgagataggaagtacagaagaccactggggtcgacaagatgctgcacaggcaattgctctagatcatatagcacgtggagattcaaaacaaatatcttatacaagaaaatttgctgcattgccaaatgccaatagtcaaatgagctgcgtatgagttggaaagtagaaacttctgtcttgtgccatcagatatgtaatgtgggccaggatcacatttgaacctttccgaacataggcacatccttttacaatcttgtttattgtattatctctgattcccctaagttctgcaaccacatcacctctgccccactgctcgttgatatgtgtgaggctgtgagcaaccctgtttaccgtcgccatttatcagctcattgtcctgctgtgattgttggcgcaaagctagcctctgatgcccc

SEQ ID NO: 58826 - DNA, 272 bp, Zea mays
  unsure (1)..(272): unsure at all n locations
  Clone ID: MRT4577_153643C.1
ccgggtcacacgcggnatcgttattagnngctctccgnagtctccggtctccctttcctctcggcggcggcttcagggtccccctctccatctccgnngcgtggcgccttggggcgtctgacccctcaacaagcaagnnaaagcaaatgnngcaggcgnngcagggttgcgcccatgccnnaccctcaagggggcccgannntgtggtgaaggggagatcttcatnntggactgaccctggnngtctgatcgcgggnagggcatnngtggaa

SEQ ID NO: 58827 - DNA, 275 bp, Zea mays
  unsure (1)..(275): unsure at all n locations
  Clone ID: MRT4577_153644C.1
tttttgctgttaaaaaatctttcttttcttttccctgtttttaacaccctcaacccaattatttctacgcaaactttacacatcacatccttttttctctacaaattacatatccacccttctttaaacaaaataagtacaccctactagcgttggcaatcttaccaaactcactttaatctcccatacttaaccttaattnactcnaattnacctacnactcacttnaccaccatacttttcctttatnaactcactttaacctccaactcatt

SEQ ID NO: 58828 - DNA, 359 bp, Zea mays
  Clone ID: MRT4577_153645C.1
gagctcatttgtcggcggccgccctttcttttttttttgggttttttttttgaggaacatcggctcacgcatgctctggattagggaaaagatgcgtttacctaggcgtggacatcccacgaaaaagtgtacggaaagacaatctcacataaaacccagatgccgggcttacccaaactgcaaagaacacgccgcaccgacaaaagagaaacgcagggcgcccctcacaccaggaatttacacctacaagggcctagagaaactaggcgggcacgaaacggtctctggctgaccacagctgcaaaaagcatcccggggaacgaccagcgttagaaccgacccagcctggtgcattaccc

SEQ ID NO: 58829 - DNA, 403 bp, Zea mays
  unsure (1)..(403): unsure at all n locations
  Clone ID: MRT4577_153646C.1
ggacgggccgggactatcggtagtctcaccactgtcgattccggacagcaggacgcgtctgattctcacagctccgcggagtttacccagtatctccaagacggctactgtaaaatatcagaactcgatgactgccgcgagttagctgaagctgttaatgatgctgacagtcgcagcagccactgcgagagagagaagcctgatgaatatggggataacgatgacttgcttggacgagtctttgccttcagtgaagaacgncgaaattactatagtgncttgagattgagatactagagaagaaaagcgctcaatacatccagagtgccatagtatgcagacgatggagaaattcgactaggctttcatggaataatgctgtgcggaatcgaccatctgccat

SEQ ID NO: 58830 - DNA, 410 bp, Zea mays
  Clone ID: MRT4577_153647C.1
gggccccaacaactttttatggaatcataagcctgaaacgacaaaaacaggggggggttctaccccactggatgaaaaccccttacaaccccaggggtacatttaaaagtttgctccaaggggcgaatctcaagctaagggggaataccttttaatttttcaaatgagcgctcccaacagcactcgagttttccgaaaatttttatgccctgcaaataaaactcctaaatcagaaagggggataataaacccccgttcagcattttccattattataaatcaatctggaaacagccaactgaatgataccgcagctttcatatagcaaattttggagcgccccctaaagatccacctactccagtttcatgtttcccattaggggctggtacaggagggcacacattatt

SEQ ID NO: 58831 - DNA, 558 bp, Zea mays
  Clone ID: MRT4577_153648C.1
agaatagagaccgccctcactcctccactcctcgtcctctatctctctctctcgtaccgtcccgacaactggacaaagtgcgtcgttgcacatttcgatccgcgtcacaatgtctcccatgctcgacgacgccccgtgtctacctctctctcccgtctccgcttcctccacctgccgcgccagcgccagcgccaggaccacgccgcctgtatccgtcgagcgcgtggccggaagcctcagataccaaacgaaagccagacttcccgaggtgacggacttctctctaactccaaatggggtggcgaatgacattcctcctcctcctcttctcgatcgagggtccaaggcgatcccggacagctctgcggtgacgtaacacccgtgacagcgtaaagacttactgatgacatggaattggggtgacgacccgtcaaggttttgcgcaagatgcggaatcagctcctcaacaagctgccccggaagtcaccgcactgcgaagattccagacagtggaacaatggtaccgggatacagcgcactagcagctgcgggagcatc

SEQ ID NO: 58832 - DNA, 174 bp, Zea mays
  Clone ID: MRT4577_153649C.1
ggtgtgaaagcgagaggggggcaatacggggccggacgtcttactcataatgtttacagtactggtctctgacctgctaatggtcacaggatttataatggatgtggcctccaaatttgtacgatacttaattaaactagaatggcctaaggctttggattgcagtaacacaaa

SEQ ID NO: 58833 - DNA, 183 bp, Zea mays
  Clone ID: MRT4577_15364C.1
ctttattgaaatgacctggggatatatatagtcttggtcttgttccatgtgatggaattattaagtaaagcagcattgttcttgttagttttctttgtttctagaaatgtacgagagtatttggtttttactcatttctacttctcaatgcaagtattaagtaaagcagcattggtcttgttc

SEQ ID NO: 58834 - DNA, 216 bp, Zea mays
  unsure (1)..(216): unsure at all n locations
  Clone ID: MRT4577_153650C.1
ctttttctgcaacccattccatnccnncggaaagattgtttataataggggtcgaccccanccancattattatntgcttatcttttatctttactagttttgtcttcctatatctttctttctttctcccccccctccctcctttcgactctttactgaaacttcttatagattctcaatatttttttatcttattcctatgctactttttaaaa

SEQ ID NO: 58835 - DNA, 395 bp, Zea mays
  unsure (1)..(395): unsure at all n locations
  Clone ID: MRT4577_153651C.1
gacccgacactgccatcgccgcgagagaagagccaacatcatagccgcttgcctacatagtcgcccggagcgcacggacaagcccgagagcttagctcttatggcgtggtcatcatcgctccaaagaaaacaacagagggggtcgaccaagctactctgcggcgcggggttatggtcgcgactcgcacctcaccgtgggtgagagactttgtgccaccataacccgccagaattgctcaccggagctaactcggcgtgctggagaagcaccaagcaatgctcggacccgaaggcccttatgcacaccgatgagcaagtgaacgaggaacacgaagctcgcaggttgaagattctgagtaggagctcgttgaaggtgangagcaggtaccgccgga

SEQ ID NO: 58836 - DNA, 294 bp, Zea mays
  Clone ID: MRT4577_153652C.1
aaaaaaaaaatttaaaaaaacttgtatctttccaaaccctaaaaccccttgatacccgcgcctttcccgaacccccccacccccctacaaaccttttgggctttaaactcctgcccgcgttcaccccctaaaaaataaacacccttatgaaagacccttacccaaaaacccatcctctaaccatctcgaaacctaggcccccatatatcccctccacttcaaaacccctccaaaacacagggggcgcgcccctaaaaatccccctacgtggcccaaccctatattgccctccac

SEQ ID NO: 58837 - DNA, 316 bp, Zea mays
  Clone ID: MRT4577_153653C.1
ggatggaaagatatcaactggctttcaagagctcctgtgccaccgatgggagatgccagaacatgcggagcgtgatgctggtgattagggagacgactttttttatagttacaattgcatgattggcagaccgaatagccgagggcacctcataatcaattaactgtgttgtgatcttttaaaattagtcgcgtcacaatgcgggggacaaaccctagggatgtgataacctccactggggtgcttgatttgagatgctattcccttgaacttatataggcgctaagacttcccaggctttgggccgactaccaag

SEQ ID NO: 58838 - DNA, 1788 bp, Zea mays
  Clone ID: MRT4577_153654C.1
ggcgggggcgccgccgggcgcgcgcagctccggggccacgtacgacgccgcgccaccgcctcggagcgcgcatgccgcgctgccgagcttcttggagtgcccgccgccggcggccttgtgcgcgccggcgaccaggcgggcgagcccgaacccggacacgtgcgcgcggagctcgtcgtccagcaggatcttggacgacttgatgcagccgtgcacgtaccgccgcgggctgcactcgtgcagatacgccagcccgcgcgccgcgccctgcacgatggacagacgcacggaccacggcaatggcgtcggcgacgccgtcgggccaccgtggagagcggagtggagggagccgctggggaggtagtcgtagatgagcagcttctcgtcgggggcgtagtagtaggcgcggaggcgggcgacgttagggtggcgcgcgcggccgatggcggcagcctcggcctcgaacgcgcggcggcggcgccagccggagccagaaccggagccatcgctgtcgccgtcgtcgggctcgctgaggcggcggacggcgacggcggggccgcggccggggacgacccggtacacgatgccgccgcggctcttgccgacgacgtaggcggaggcccggagcagctcctccagctccatcccgaagccgtcgtcgacggccacgaacacctccccctcctccccgccgctgcggcggtcctcgctgccggcgagcgtcaccgcgccgccgcccttctccttgccggactccttcccctcgtccccggcggcggcggcgcaccgccgccggcactgccactgcagaaccacaccggcgacgagggcgacgacgatgacggccgcgaggaccgggaccgccggcgacgagcgccgccgccgcggctgcctcgggcctcccctcctcccgacctccgccgcagcgccagggtcggtggcgccgttggagttcgggatcctcgggtcgtcgtccgccccggcggcccccgcgcactggaccttgagcgggaagccgcacaggcgcgggttgccgtcgaacgcggtggggccctggttgacgagcgagccgacctgcgggatctccccctccaggtcgttcccgcggaggtcgaggctgacggcgacggggatggcgccgagctcgggcgggacggcgcccgtgaagtggttgtagctgaggttgagcacgccggccaggcgcgggagcgcggccagcgcggcggggatcgtgccgttgagctggttggaggagaggtcgaggcgctgcagcgagacgaggcgcgccaccccgggcgggaccgggcccgacagcaggttgtgcgcgaggtcgagcgtggccagccgctgcagcgcggccacggccgccgggatctgccccgagagccggttgtagggcagcgacagcgcctgcagctccgacagcagcgagagctccgacgggaggtacccggccagcgaggcgttggcgagctcgacggcggagacgcggccggcggcggtggagcatgtgacgccgaaccaggcgcaggggtcggcgtccgcgtcccgccacgtggacagcgcgccgcccgggtcgtctgagacggcgaacttgagcgccagcagcgcgagaccgtccgtgttgagcgccgcggccgtgatggacgtggcggccaccgccgacaccaggaccgccagaaccgccgccattgcccggagcgagcgggggtgcaggtggtggtggttgttgagtgactagaatgacagtgctgccattccctgggtcgcagacaaggggaggatgag

SEQ ID NO: 58839 - DNA, 391 bp, Zea mays
  Clone ID: MRT4577_153655C.1
agaactccggagtgcatccttaagcggcgcctttttttttttttttttttttttggggaaggacaaggggccatttgtctaaacatattagggcaaacataattaaagcgaggcatcataaacaaaacggtcctgggttaaaatccagatcagagcatacaggacaggccagggcgtataaccaaatggatcggcctcctctttgcttgctttggggccctttgatctgtcctccaagcggcctcctctcggcttgtccgctccttctttcataccatgcctgtccgtttcgtcctttcctccccttcgtacgttcacgtggccttttccttgggtgctggaggggtcacctgctaggctcctttgggagggtaaggctaaagaattgacc

SEQ ID NO: 58840 - DNA, 262 bp, Zea mays
  Clone ID: MRT4577_153656C.1
ccttggatttagagtgtataataattgtataatcaacattgtataaattctcacagacgaagcgggaaccacacacgtgaaattttccgatgggagttgtgggttcttgtagaattttagttggcacaatttttttaacaacataaatttattattcatgggagcggataattataccatatctatgtccaatggataatttgttatccacatgtatgagtatgaacataataaggtattcattgataaatttttttttctg

SEQ ID NO: 58841 - DNA, 754 bp, Zea mays
  Clone ID: MRT4577_153657C.1
ctcccttctccccgtccctctctagctactactactattctgtagattgatacagatagcggcgctcttctcgcttcgcctcgctgccaatctcgtcgccgatccccgggtccggcgccgccacgagcttccagatccgccgcccgggcaatgctgtagcgcctcgcgccgagatgggcggcgtcggcgccgcctcgctcgccctgctgccgctccccctcctcctcctcctcctgctcttccgcgcggaggcctccgctctccacggaactatattgcctaacccagcaccgagtccatctagcccccctgaagcgagatcgtttggacctcgaatttccccttcatatcctccaagggcactgtctccaggatctgacattgatgtgcgccctcattcgcacaagcccccacaccatagagagtcaaatcagggcccttcaccatcctcaacagaaggttgttctacttatatatgcactgaaccactgactgcaacaccaattggttccccttgtggctgtgtcgagcctattagtgttatcgttgatctggacttagctccttacctactgttcatgagcatagctgagttagaagttgaagttgcagctgggacatttcttaaacaaagccaagtgaagatcatggctgcagttgcaagtatccaggatgaccagaagacacgggtgaccatttatttgggccactaagagagagtttgatacttatacggcatccctaatatctgata

SEQ ID NO: 58842 - DNA, 333 bp, Zea mays
  Clone ID: MRT4577_153658C.1
aggcgtggagttcttcctagaagggcgaagtgagaggaatgctcacaactctatagcagtagccgggaatagcttgtctcggaaaagtgagaggacaaattttgccgtgtatggactaaccgagatacacagtcttcacatagcacattaatgccagccgattcacatagtgtgggatgcaccagcaatcccaaccttcaagagatggcaaaaacctcccgcaatgatgagcagccacattattctgtgagtagcgctgacctctagccgactaacaaaatatttcgggaagcgtgcctaccccactagtgaggcggtctgggttcagcctgt

SEQ ID NO: 58843 - DNA, 221 bp, Zea mays
  Clone ID: MRT4577_153659C.1
ctcgtagtaactcggaatcggctcgaagacgactggcttaaaggaacagatgatgcctctctccgagttttaagactagctttaaatttgtttcatgtattattttactttgaacttagtcgaagttattgtctcttgtgaacaatgctacttcagatttaatatctgttagttttatatatggatttgcgcgtgaatgttgtaatgctgtaatttggtcc

SEQ ID NO: 58844 - DNA, 391 bp, Zea mays
  Clone ID: MRT4577_15365C.1
cggacgcgtggggttctagatcgcgagcgccgcccttttttttttttttttttttttttttttttttttagagaagaacatcgtactaatatatcccactttattggaggcgcgagagcattctgatggggaatatacacatttccgaaacttcatcccataagtcactataggatcattgatgaagagggtgaagcaatcaaacggcagaaacgatgtcctccttctttgcgtgatcttaagatgaaattctactattatcaggtgatggctccttggagcccaaagaaaaagattcctaatgatgtgccggagggagcagtgctgatccgggcacatacgacgacgaccgatctcttcagcctcctctggccaaaccaggtgaatcttt

SEQ ID NO: 58845 - DNA, 362 bp, Zea mays
  Clone ID: MRT4577_153660C.1
cggccgcatcgagccaggcgggccgggataaacttcccaaaaccgggtcatcaggctcatctttcctcctcttggcgcgagtgcatgtgtcttgcgttgaggtagcgactgcgtgtgccactagtgcgctgagcgcaagtactaccgtcagatagccaggaccctctggtcctcgtagatccgggctaacaacgcgccggagtccaggcgccttgcatccatctacagccaggtgcagaggagccgcatcgcgcccacgctgcccctcccctacgacctccgctcccacttcacgctcgccgacgagtcggccagcaccgccgctagaagccccgacgagatacccaagctgctccccagcc

SEQ ID NO: 58846 - DNA, 457 bp, Zea mays
  Clone ID: MRT4577_153661C.1
atttgtgggcaagcgcccctcatcacacaaaagactttattattgagctatcccttatattaaacctaaggaggcaccacgcaatgatgggttgcagtgtgacctgctatcagccttggtcataccacgttggttgaacggatgacatcggtgcccttgggagaaggtgctcgcgcaaagcacaacgggccagcagctccgacacctctgtgcgttgaatcacgaggggactacggttaacaccagctagctgtttgattggaccaagtatgtgcatggtgcaatgatcatgataggccacagctgccacttccatgaatgcaagaaattgctggctgcacgcagcaagtacctggctgaaagctacttgcagctgtggactactcctacttatatacagtgacacctactgctaccatggaaccaactagtggtggtgagacctggctaccatgtt

SEQ ID NO: 58847 - DNA, 237 bp, Zea mays
  unsure (1)..(237): unsure at all n locations
  Clone ID: MRT4577_153662C.1
atagcgtcggaggcgtgaggtgaagctgcgngaatgtcgggctgcgagtgcgagaagcgaggaggcaagctggacgatgttggaacgaatgccctgcatgatgttgtcaagggaagttaagagcccgtggagtagatggtggtacctgtgcattagtcgaggtggctcgggagaacggaattagcccagctcgaggcctaccgagaggtacagcagatggtttgcaaaaccagccag

SEQ ID NO: 58848 - DNA, 223 bp, Zea mays
  Clone ID: MRT4577_153663C.1
tctatctctcccttccctcttctctctcccctcacctctctcctcgagccatggacgtcgtcgagccggccgtgaccgcgcgtccgccgcgcaacgaacaccagccgtgaccccgcgccgccggcacagggtgcgcgcgacagcgacccggggcgtacgagggccaccctctgaggcgcgacgctcgtcggcggtttcgtcccgagacgcggggccccggggc

SEQ ID NO: 58849 - DNA, 611 bp, Zea mays
  Clone ID: MRT4577_153664C.1
ggccgcccctttttttttttttttttacgagtgactgacatgcatctggtcttgcccatagacgtagcgtatctcaatatccgtatgacatcatacacatgagttcctagacatgcggctatggaacagcgagcatccccttgctgctatggtacacaaaccaggcagagtccgcctgggtgatataccgtacagaagcacccagccccagtattgccagggggaccactacttgtaggacttcgctgacgaactgcggactccgatccgggtggaagggcggttgcacgaggcgagtgtcctgaaccttactgggaataggagtccgcatgaatccgaccgactaggacctgatgcatcattgcaccgaccgggtggctgcgccccacatcttgcacatggtcgggagcatccttggcgccggaagatagtgcgacattatgacctgcaccgaggttctcccgaaccttggcacatgcgccacgcggtcggcgaagcgagccttgaatggtccttgcggtcgggcttggacacaccctcaacgggggacaccttcgacccggacatgatgctcccacttctgtggacacggacggggagtagctgccgcc

SEQ ID NO: 58850 - DNA, 564 bp, Zea mays
  Clone ID: MRT4577_153665C.1
ggaaggcattccctgtgatatgctcttggacagcgtctacacactgcaagctgaagtgctctttgagctttgttctccatgtggccacatttgaaacaccaatgtatggggcacggaaatgacattcccgccataatccttctttccaactcaccatcagtggcattaggatccaataattgtgcaatgcacttagggtggtaaaaatatccacaagatgcttgattgcattgaaagaccttagcatttggcccatgggatggttcaagctctccacatctaaaacattggtgttgcttatttttgcagtttgcacatagataagtaccaattctctttacttctgctgaagtgtaatgaagactttcacatttagattctctgccatctttctttgtggggtggaaagacctcttgcatggaccgtcacagctaagcaaatgtcctccatcatcacatagcgcacatatttgatcggtaacgtcatcatcactgctgccatcaccatcatcactgctaccatcacaatcatcaccactgtcatctttgttaccataattgtta

SEQ ID NO: 58851 - DNA, 116 bp, Zea mays
  Clone ID: MRT4577_153666C.1
actgcatgaagcaacagggggttgtcaacttgctagcgtgtacgaccctgatgctgcaggaactgatgatcttaccgatggagatcgccccaaatgcccatgatgataacagaaat

SEQ ID NO: 58852 - DNA, 392 bp, Zea mays
  Clone ID: MRT4577_153668C.1
gttgagaaacaatacaatctatctgatgtttttggcgagttaattgatgaggtcctccgtgctgagtcgggggacaatgaagatggttatgatgtgcataaaacaactacaaaatcagatgatattcttgcctaatcgacagaaggatgtacgtgtccggccccccaaattgtacccgatatgtctactccagcatcccagcaggatacacagttgacagactcataggtacatgaattactgttaaggcaacaacatattcgtgtactattagaaagttgccccgatgaagctgacatcgatccactggttcatacaaataaaacgaaacagaccaaaacacctacaaccccagtgggtaaacatggtgacgttggcaagaacatgccgat

SEQ ID NO: 58853 - DNA, 327 bp, Zea mays
  Clone ID: MRT4577_153669C.1
cctagttatcacccatgcacgttcaggaagcatatttgagactctgcgactcgggataccgctaatccttgttgtggatgaagacgtgatggacaatcaccacagcgaattaccagaagaattggctgccaggaagcatgtcttctgtgcacgcgcacggccattagcagagacaattcgggccatggacctatagacactgcttccttatcagccacgggatgccaacccagtcgtctccctgatcaacagagttcttggctatccagatgatcgacgaatctattcggatgctcttcaatccatgtggattagatagtcttgcgt

SEQ ID NO: 58854 - DNA, 373 bp, Zea mays
  Clone ID: MRT4577_15366C.1
gtgcggcacgttcgaactggcattaggctcgcatactgggaccattactgacgaggctgttgagactgtaggacccgtatgttcgcattaagtgcttcgacacacacaggatcatatctgtcgaggaccatgcctatatccagatcaacattgacccattggatacgaatggcctgtatgaaggttggttcacaacatctgctttctctagatgttaaactgctcaaggcgaatcatacagctgctctgacagattgtcacggaataataatgctgatatcatgcattataaattacatctagtgtaccaagagatgcacactgacttaactatattttgaattcatgctactatatgccatgttgggaattc

SEQ ID NO: 58855 - DNA, 362 bp, Zea mays
  Clone ID: MRT4577_153670C.1
aacacacaaacaaaacaagcaacataacataaaaaaaacaaaaaacaacaacagggtttcgggccaaactcaagctaccagccctagcttacgctaccagctaactctgcagctctccctctctcatccctaactcctttatactggccctctcatactcaatgaccttcctgcgacatcccctccattactgacctctaccgtctgccacaacctaccccttctgccatccaggctacttccctcacttccatcacgcatcgaacttccatattccctggccttccatctgtcgactgcaccacaccctgcactgccataccaacagtccatcaacgtgcagcatctggcgctcctccctc

SEQ ID NO: 58856 - DNA, 683 bp, Zea mays
  Clone ID: MRT4577_153671C.1
tggcttctcgaggctggtcgggccgggaactcagtggagtaaagccgagtgaaacctgcagctgggagaactttgcactcccaacctcccttgcactcgcacgatcgagtggagtgcaccatgaattgttcgatgcctggccttgtggcctatgcgctcttcttcacgctcttgttcaccgcgccggcaacctcgaccgctggcctcaccatgcgtgccgacctgacccacgttgacaaaggtcggggcttcaccagatgggagcttgtcagccggatggccgctcgttcgagagcccgtgcggccagcctttaccatcgtggcggccactacggcgacccagtgacggcgactgtggtacgcatgcccgccgagtacctcatccacttgaacatcggcacgccgcggccgcagcgagtggcgctgacgatggacaccggcagcgaccttgtctggacacagtgcacgccctgccatgtctgcttcgaccagccgtccccgatgttccactagtacacagaagttcaccattattgtcgaagtacttatccatctttcgcatgcggtacctgtgtccttccaataaaaagcgtctgtgcctcatgtaaagtatcttcctagatgcagcaagggatacgtaagcagttccatcaaaaaaaaaaaaaaaaaaggcccctagggcc

SEQ ID NO: 58857 - DNA, 536 bp, Zea mays
  Clone ID: MRT4577_153672C.1
cctcaacagctggcggagttcttggaaggaatcgaatctgaatgcttcagagaggacgctgcattcgagaatttggaagctaaaccctttctccaagtgtaccagagcgtcctcaactccaaggccaccgaggactctttgtgcaacttcgccaagtgggagccatgccatggcaaattcaaattccgacatccatggagccaataccagaagctcggcgctctttgtcgcgagtgcgcttcttcaatggaggctctctcctcctacgtcgtcaccctagcaagaaccgagtatcctgaagcgcatccggagctatgctcacagcaggttcgaacagcatgccgccagatgagcttgcactcggccaaggcgctccgagagctcacagcagcgatgcggacgatgacgacgactgtaccgtccccagccagcgtccacgtgtctgcagcgatcaaagcagcgaaaggcctcagagacgggttatcgtcggagggtgcggacctggtgcgagcgatgcatgttgctgttatcgcatc

SEQ ID NO: 58858 - DNA, 310 bp, Zea mays
  Clone ID: MRT4577_153673C.1
ttttgtttgtttttaatctgccagatgggcaactttttaagccagggattgttcctaggggccagatacaaacccacacaggcggctccctgcaagctgagtgaacagcacagccggagatttgactgtccatagggagagtgaaagcattggtctgaactacaagctcacacatgagagtgggaaagagcaaatgattgctgtttgggacaggcagacagcctgattgataacaggacctgacgctcccatgacagtacggagcttatctttttgtttgctgactaatcaagacctgacctgtttttcg

SEQ ID NO: 58859 - DNA, 319 bp, Zea mays
  Clone ID: MRT4577_153674C.1
ttgctgtcgcgtgggacaagatccaggaagctgatgaacttgtcatagaggagctcacgatgtttccagaactcaagaacgcttactgagaaaaacatcctaagcgactagctgcatcccctaacgatttacgctggccgtctgaaggacaagagactaacaacttgttgaagacctagcaggagatgtgaaagaagactcaggttcagaatcagaccacagacactgaatattaatcatgtacagcgtgaaatcgtgcaagctaaaatttggaaatcaaagtttgagaagaaactgtaacacatgggcctacataaca

SEQ ID NO: 58860 - DNA, 598 bp, Zea mays
  Clone ID: MRT4577_153675C.1
aaaacgatggggctcggaagttcatcaccggtactttgctggcatccggtgcctggcaagatttgggcaaggcccccgtacaagcggcggtggaattcacctatcttttggaaggctgtcaatttaacctcaaagttaaccaggcaactttgcagattcccgatcgccaggcagtgagtgcgttgttatttgcgggtaacttcaattacagcttgaataatcccaatccccaggaacgggtcagcgtggccaaacagtacattgaagcgtggcaatccgacttggatactttccggggcattgtccacgaaaaattcttggcggagcaacaaccccaaacggtgtttggttaattcggtataactatttgggggtttaacacctctaacatggagcaatcaatccgtagaaatttccgttgaccatactttatccatggacaccaagccccctcgacaacgattgattggtttgaccgggggcattgctacgggaaaaagtacggttacggattatttacagcaaaaatacagcgtccctatcctcgacgccgacctctatgcccgccaagcagtggaaccgggttctgaaattctag

SEQ ID NO: 58861 - DNA, 1183 bp, Zea mays
  Clone ID: MRT4577_153676C.1
ggttcctccaatgaaatttcaccagtctactctttgtgggctacattcatgggtctttacattgccaattatgtcatagagcgttcaacgggatgggttttaactcatcctttgacaatttcggagtatgagaaattgaagaaacagttgaaaccagattttgaggacatggttccctggtactctgggacatcaactgatttatttaaaactgtctttgacctcatgatatctgtgactctgtttgttggtcgatttgacatgcgtatgatgcaggctgctatgaataaaactcctgatgaagctaacagccatgaccttttgtatgatcatcttgatggaaaagatgagctttggtttgacttcattgcagatactggtgatggtggcaactctacatatgctgtagcacgattacttgctcaacccttgttagttataaactctgatgactcgaggctaacatttcctcgtgggcaactgcttctcgttggtggtgaccttgcgtatcccaatccatcctcattttcgtatgaacgacgttttttctgtccttttgagtacgctctccagcctcctgcttggtataagcctgaacatatagcactggagaagcctgaacttccccttggggtttctgagcttaggcggtacagaggaccacagtgtttcatgatacccggaaaccatgattggttcgatggattaaacacattcataaggtatatctgtcataagagttgggtgggtgggtggttcctacctcagaagaagagttattttgcattgaagcttcccaatggatggtgggtttttggtcttgaccaagctcttcatggtgacattgatgtttaccagttcaagttttttgctgagttgtgtcaacagaagtatgcaggtcggagaaagtgattccgtaattattataactcatgaaccaaactggctccttgattggtattggggtgatagcactggcacaaatgttgcatatttgatacgggagtaccttaggggaagatgcaaactgcggatggctggggacctgcaccattatatgcgacattcttgcattgagtcaaaagaaccagttcatgtacaacacttactcgtaaatggctgtggtggggcctttttgcatccaacacatgtcttcgaaaacttcagggtattttatgggaac

SEQ ID NO: 58862 - DNA, 627 bp, Zea mays
  Clone ID: MRT4577_153678C.1
atggtggtcagacgggggattcctgcattgctcttcctaggaactgtagcgggttttctaaagctagtggaactagactcaagcagtccaagcgattggtcagaccttagcagaaatgcaacagccacccccacctcagcctcaagtgcaagttcagatgcctcaggtgcccagagacaagcgggtagaattcatgaggggccatcccctttctttttccactctgctggtcccatggacgccaaagattggctgcatacttctcagtgcaacgatcgcaagaaggttctgtatggtcctcgtctgctaaggggagtagcacagtcctggtgggagtcttatctcgccacccatgccgaccctgaagccatcacctggaaggagttcagggacaacttccgtctctaccatgtgcctgaaggactgatgatagtaatgaaggaggagtttctagctttcaagcaaggtcccctatctgttagtgagtacagggacaagtttctatacctgtcatgttacgccctagaagatgtcaacacggatgctaagaggcagtaccattttctgagagtactagttgacccccttcactaccagctgatgaaccacactttccccaccttctag

SEQ ID NO: 58863 - DNA, 233 bp, Zea mays
  Clone ID: MRT4577_153679C.1
aacacgcaaccggactaacttacgtatgcccttattctaaccatgtcacatgcatcaaaagctcgtctagtgtgaacctttgttgggaaagctagactcacatgaacatattatcaagcatcagtacctaatcttgcgtgtcaaccctaattgtctataattgcaacatttctacatacgaccctttcacatgtactaacccttaatctgtctaatccttgcattacctctat

SEQ ID NO: 58864 - DNA, 479 bp, Zea mays
  Clone ID: MRT4577_15367C.1
ttatattttttttttttttttttttttttttttttggtttttttttttgatcataatctcttactactgttaatcttaatgggaaccaaaaggactgccaccccggaactccgaaagggaaccacagggggggggcccccaaccccgtgacgtccaacccgaaaacactggaaaaccacccgtttcccccccccccaaggccgggagagacccactcttcccccccctaaggggggcgaggggaacaccccttgggcacaggaaaaaactggtgccccgtccaacaaagggccacaagaaaaaccccgggggggggacccccaggggaacaggcccccccccggggggggaccccaatttaaaaaagaccccacaagtaaccggccgcctatataaacctgcacaggaggtgaaggccccccagtccaagacctgaaaaggggggggaacggacccccgccctgaagggacccccgggg

SEQ ID NO: 58865 - DNA, 462 bp, Zea mays
  Clone ID: MRT4577_153680C.1
ccattaagcccccaaaatcccatgaggcccccaacatcaaaggcggtatccccaaaacctataacggggggggggggcccccaaaaaaaagcaagaggacatttttttaaaaaaggaagaggggaaacaagcgggaggtgcccccggggggggcttttcaggggggcccaaaattcaagggcccaaccctggccccacaataaagctgaggaggctggggcccccaaaacacttggcaacccccaggggttgggcggctttggcttttgctaagggggaaaggttcgtcttcacctttttttgggcccccttaaatgggccccctttaccgtttttttcagccccaattatcttaatctgggatttctggggtgggaagtttttggccgggttttccttggccccctttccccgtgggagggggaacccggacgggtttttcctttgggaaagaggggtttt

SEQ ID NO: 58866 - DNA, 390 bp, Zea mays
  Clone ID: MRT4577_153681C.1
ctcgaggccggccgggaacactcattcagcgatcgcagcaccgcgatcgagataatgagcagcactctggcctccgggatctctgcctctccatctgcagtgcggcagcaccgctcggcaccgccatgtacgcacatccgcaacaaactaacgagggtcgaaggcgcgcgcgcgacggccacagctgctgcactgctcccgccggcgttcgagtgccccgacgacgccggccgacggcgcgatgatgcagaggtgcgggtctggaccactgcctcaaaacgagccggacctgcaggaagacgacatccacgagtaccgtagcaaccagacctgcccgcaggacttccagcaacgcaagcatgaccgacaccacacctatttccaacgact

SEQ ID NO: 58867 - DNA, 414 bp, Zea mays
  Clone ID: MRT4577_153682C.1
atgcctgacattcggtttgttttaaggttacacggccagattatacagttacttaggaaagtacacggcccttacaccctgggtgagaaccaccattgtgtgtgagaacattatcatattgtgagtttggcgggcccaacaaggggatgggctccataaaaactttaacaaggggagcttgacgcaggcgtctagggtgctggacaaaaaggttaaggggattaaataggccttgtaatgaaggacccctttgtttgatgtaggaaggttttctcaacagaacaatggccttttcaacggaccttgatgaaacccatgttcttggccttgctggaaaaggacctggttgagtaaatgcaccctgacttccttgatagacccagatggttagggaccacccaagttacaatgaag

SEQ ID NO: 58868 - DNA, 597 bp, Zea mays
  Clone ID: MRT4577_153683C.1
tgggtacctcgaggccggccgggactcggtattgttgagctgtctattttccttcgtttcttcatgcttgtttaatattagttcaattgtatctctgtctattttttataggcactcgcttcaaaactcctattaatttaatagtttcttcatcaacgttggagaaggaggtacatgtttgatcatcatcttcatgtgatgaacttgggcttaaggttgtctcaaacttgctcattgccattcatcttcttatgctcatcacatgtgagagcaatgcttttatttgatgaagtggcttctttatgacctatctttcatggcatcttaaatgctactagattgcaaatgaccagcgtcgaggttattgtgctcaagtcctacatgttacaaaggatgatgatggttgatgcaaatttgttgtgtggtaataccgagatgatcttcacagtgttgctcatcttcaagatttgtcaaacttatggagtttgattgttaaattcaagaatgaatacatatctctaataatcgtattctactttatttgaaaagaatcataggtttgttttgttatgcaaaaaaaaaaaaaaaaaagcggcc

SEQ ID NO: 58869 - DNA, 317 bp, Zea mays
  Clone ID: MRT4577_153684C.1
tttccgggaccccccaaactttattttcttttttcccaggcaaggggcatttgggataccccacgtttttgtttgctgccctttcagtagagcgcaaagttttttgttttttaacagcgcgaagaaacaaatcccccttaatccttttttaaccaaacaacaaggcccaaggttgctcggaagccgccccaatttttgcctccaaaatacaaaaaagcattttttgataataaggtcaggccattccaaatcaacaacattgacttttacattaggggttggtcgggtattttcaatccatatggatcgggggggat

SEQ ID NO: 58870 - DNA, 624 bp, Zea mays
  Clone ID: MRT4577_153685C.1
acgcgttcgtatctagcatcatataaagcacaatattgtacgcaacattggcaatcaaaatattatgcctgcttatgctccttgatctgtctgcaggagctcactcggggaccatgtcaacacgaagtgcgtcgcgaagcgtgcctataagctgtccgctagcttgccacgaggacctcctgacgcataggcgcactcgcgctatgtagaacacccacatctgcaaccctacacagatacagcagcgcgtctcacaccagcttgctacctgtatgaccctagttgctgctgcttcattaagcctattacatcagtgaccttaggtgcatgaatggacacaatacatgagggcacaccaactacaacaactctgagctagcaaacctggctgcctactctcaacaccaacagcatcttacattcaaccaactatggtcattgctactctgctctcttatgtgcaacaacaggctctaccattcagccagctacctgctgcctaccctgagcaattgctcccattcaaccaactagcagcctggaactctactgctgattgacagcagcaacaactactaccattcaggcagctagctggtgtgagccctgctaccttcctgacac

SEQ ID NO: 58871 - DNA, 333 bp, Zea mays
  Clone ID: MRT4577_153686C.1
gagaagacgccaggcgtcgtgtcctccactaaaatgaccgcaaaaataccagatggttcaccccttctgcattgtcttaacctcaagtatgagcacctctggcgtcttatttcatttacaacttcgttaaccttcctcgagagttcgttgtcaaattgctccaacgctctctgggctggtaatgcagggggggaagagacaccgaatatttgttccagggtagccggatttaccatgtttcctacataaattaaaccatcctcaccattttcccggacgcgtgggcggacgcgtgggcggacgcgtgggcggacgcgtgggcggacgcgtggg

SEQ ID NO: 58872 - DNA, 1615 bp, Zea mays
  Clone ID: MRT4577_153687C.1
ccggctcggcacgaccctgcgcctggctgccgcagccaggttgacgcccgcgacttcctgcgctcccctgctgctcctgcggcgtccgccgagggttttggcctcgcggcctcgccagccctcctcttccggcggctcctcggccctcgcggaactcgccacatcccccattgcccccgtcgcccgttcgctccccgtccgaattatttactcaaatcattcatcgccggcccgtcccactcccacctccccaagcaacctgaccacgccaccccgcgaggtccgcgataccgtccaaatccacgcgataacaaccaggccgtcccccttccttccttcccgtatatagctagcgaggggcgtggcaatggttcttccgctccgcctgatcccgcgcctggctgccgcagccaggttgacgcccgcgacttcctgcgctccccggctgctcctgcggcgcgcgccgttaccaccggccctcgcgatggcgtcggcgtacagcgccggttacggcgcgggcaggaggctgctattcaggcagctgttcgagaaggagagctccacgtacacctacctcctcgccgacgtcgccgaccccgacaggcccgccgtgctgattgaccctgtcgacagaacagttgacagagatcttaatcttatcaaggaattgggcttaaagctcgtgtatgctatgaatactcatgtacatgctgatcacgtcactggaacaggactaataaaaactaagctacctggagttaagtctgttatttcaaaagctagtggagcaaaagctgatcattttgttgatcatggggacaaaatacactttggtaaccttttccttgaggtgcgagctactccaggccatacctctggctgtgtgacttatgttacaggtgatgctgatgggcaaccttcaccaaggatggcttttactggtgatgccttaattatccgggcatgtggaaggactgacttccagggaggaagttctgaacagttgtatcagtcagtgcattcacagattttcacattgccaaaggatacactactttatcctgctcatgactataaaggtttcacggtaagtactgttgaagaggaggctgcctataatgctcgactcacgaaagataaggaaactttcaagacgatcatgaataacttgaatttgtcatatccaaagatgatggatgtagctgtacctgccaatttggtctgcggtatccaggatccaccaccgaagatctgagctgttcccgtggaagcctgcaactgcacttctggttgtttatgaactctggatcgccaccagaggcttgcagctgagttgttcattaaataatttgtttgctgcatcctgtgatatcgcgagaaaataatctaaccaatggccggtgtagcctctggttgtatgtggcaaagcactattgtttagagagatcaaaaggaacaatgctgatagtcaatgaagtttgattgcctgacaacatctctagaaatacttcgctaaccgcaatcatgttatttggatgttctttttaaaacggtgaaaggatgttcttttttttaaaaaaaatagtgaaaacaaaagaaagctgtctgtttcttc

SEQ ID NO: 58873 - DNA, 237 bp, Zea mays
  unsure (1)..(237): unsure at all n locations
  Clone ID: MRT4577_153688C.1
aatgtgaggctgcagtgaacgccgntccgcgtcnccagtgggctctgctcctcctcttcantcccactcccgccccgatggccacctcttccgtgctcncgctccacctcctgtcctgcgcgcnccgngccagcaccgccgcgcgcgcctccncngccccggcggtggcagcgacgaccgcgcagtccntggaagagtcgttcggacggaagggcntgcggttcgtggccgacccgg

SEQ ID NO: 58874 - DNA, 330 bp, Zea mays
  Clone ID: MRT4577_153689C.1
accaccgttgtgacctcttggctcgatggcaagcacgtcgtctttggcgaggttgctgacgaggcctcaatgcaggttgtcaaggagctcgaggctctcggctcctcctccggctccgtccgctccgctaccaagcccaccatcgtcaactgcggtggtgattaaatgagttgagttttggcggcagagtccctctttgaagcgtgggttcttcctctgcaaaaatagtgggttgcagggcggattggccgttctaggtggcgttggtatcttgtatgtcacatctagaccatctacccaagctagtcatgtatgctctctattgcaggg

SEQ ID NO: 58875 - DNA, 1106 bp, Zea mays
  Clone ID: MRT4577_15368C.1
cattgggtacctcgaggccggccgggattgaagggtttgccgttcggaggacggtgatccctgtctgtttctgtctctctctagagatccgataccgccgccagcccgccgctgtgcctcatcgccggcgacggcgcagaacaacccagccgatcagccgtcctcacatcgaagtctccatacacaagtggcatcgcccccctatttcgcccgttgcattgaactactgcagagtggagatccgtccatccatgacccacccagcaggccctggatcgatctgtcattctcttggtaattaacccacgcttgctcggaggaacgctgcagggcacaagaaatgcagagggatgccggctccggcgaccggacgccgggcaccccgagcccgacgcacggtggccggctcaggcaccggaagcgctccaacgaggtccccagcgacgtgaacacgactaatggcgccaacctgctcttgaacgaccagaacaagtacaagtcgatgctagttcgtacctactcctcactgtggatgatggccggggtcgtgttcttgatatatatgggccatctctacatctgggccatggtggtggtcgtccaaatcttcatggcaaaggagctcttcaaccttctccgcaaggccaatgaggaccggcagctcccagggttcaggatgctcaactggcattttttctttactgcgatgctgtttacctacgggcgcttccttagccatcagcttgttaacacgatgacttcagataagttgttgtacaagctggtgagcaggctcatcaagtaccagatgtttatttgctactttctttacatagcaggctggcattggacccagggagttcagtctgacaacgacatttggtccatttcccttttggtagatgtgtttagaaatgtaggccggagaagtagtgccatcaaacctcctcaaacgggactttgcttagtgagttttttagagtgacaaggaacagttcttccttcattctccagttcataatgtttttttagttgattttgtttattgagtaaaggtggttttattgtgtttatatttattgagtgatggtggttgggaaggctgt

SEQ ID NO: 58876 - DNA, 368 bp, Zea mays
  Clone ID: MRT4577_153690C.1
ccgggagagcacactaaaatgtgccgacctgctcctcacacatcgtgcagggcattaaggccactcaccaacggcggctcacgtaattcatcatgcttatgttataatgatggtgtatggacagtgctgcgccgagcacacatagttagggaaatgatcgagcgactctatcagctaggcttcttgcgtcctcataatcacgagctgccgatccggcgatgagaacacccaagagtcaagaggtacagagaacagaccacgagaaggcccgtgctgttgcgttcatcctgtgcgaacaacccagcagacgcctattgctacatactcttacgggtaaccggggcacacttcttgagattctacaactg

SEQ ID NO: 58877 - DNA, 486 bp, Zea mays
  Clone ID: MRT4577_153691C.1
tcgaggccggccgggaacaagctgcgtatcttcatacgtatgagtatcttgacatagtcacaatggcctcgtctcttgtctcttccctgcgaatcgcttctcgcactgctcctctggtctcttcgcgatctgctatccgacctaccgcgtcgttcttgaaccaacagagaaacactttcgctacaacagcagcaaagatgtccgtacaaggtacctccagcggccagccgatcgcaacgctcgatcaatccgtcgcccccagactcgcctcccactgcggcatcctcttcgacgcaaagaaagccaagaacctctccttcgagaccatcgccaaacacctcggccgcgaagaagtctccaccgccgccatgttctacggccacaccccagccaacgaacaagacctcaagaaactcgccgagatcctcgagatccccgaagccgagctgcgcaagaccgagctgatgaacttccctgaccgcggcc

SEQ ID NO: 58878 - DNA, 304 bp, Zea mays
  Clone ID: MRT4577_153692C.1
gacattatggatgagggtcattctgcaacactgtatcgactaagctgggcgagatgttatgatttatgggcacaatacacctaagaccatatgaggtttgcatagagcaatatagcatagtccagagagggttgatatagatgcacctggcgcaattgagttaaactacacattacatgctgattacatccagatgacagtacatgcagatgagatggagatgaaaatgctctattagctgcgatacgatgagataggcgtacacatgcataataggtatcaccggccattgcaaaaacaagct

SEQ ID NO: 58879 - DNA, 430 bp, Zea mays
  Clone ID: MRT4577_153693C.1
ccaccttgtatgagctatatataattatatatgttaaaaaaaaaaaaaaaaaaaaaaaaaaaggggaaataaaataaaaaaaaaaaaaaaaaaaaaaaaaaaaaataaaaaaaaaaaaaaaaaaaaaaaaaaaaaaaaaaaaaagaaaaaggggggggccgttttaggggtcccaggtttccttccccgggcttgcgaggtattattttttttttggggccccctaatttaatttcccgggccgcggttttccaccggggggcctgggaaaccccgggggttccccaacttattggctttgcagcccttccccttttccccagttggcttataagcaaaggggcccgcccctttcccctttcccaacatttgcccaccctaattggcaaatggcccccccccttttccggccctttaagcccggggggtg

SEQ ID NO: 58880 - DNA, 853 bp, Zea mays
  unsure (1)..(853): unsure at all n locations
  Clone ID: MRT4577_153695C.1
ccggccgggacctccaactaaacagggtcatcataacgaccaccattctacaccaccctcaacgccttctctcgtccgcgtagcatagcgcataattctactacacacgatcttcacccccgacacacgaaaccacatcctacacaatggcggcggccgaatcggcgagggtccaggaagcgcagaagctcgccaagtccgacccacgaaaggctgaggccatctacaaggacatcatctccaaggctcccagcaccacatccgatgcagctactcgcgagtatgaaaccgctttggtcagcctaggagagatctaccgagacgagaagaagacgcaagagttggtgaacctggtcaaggagagcaggacagtattctcttcttttgcaaaggccaagtcggccaagttggtccgccaactgctcgacctcatcaaggaaatccccgacagtaccgatatcgaaatctccgtcaccaaggattgtatagaatgggccaccgccgagcgccgtgctttccagcgacaggacctcgaggtccgtctggtagccctccaaatggctaagcaatcctactatgaagccctcggtctgatcaacaacctccttcgcgagctcaagcgcctcgacgacaagctccgcctcgtcgaagtccaactcctcgaatccagagtctaccatgcccttggtaacattcccaaggcccgtgctgctcttaccagtgcacgaaccagcgctgccagtgtgtacacacctcccatgctacaggncaacctcgacatgcaaagtggtatgcttcacgccgaagataaggacttcaacaccgctttctcctacttcatcgaggctctcga

SEQ ID NO: 58881 - DNA, 140 bp, Zea mays
  Clone ID: MRT4577_153696C.1
gtcggacggcgtcgtcccgtccttgtgttgaggagagggaaggagcgggaggcgcggctgatgcggtaccgtgagaagcggaagagccggcggttcgacaagaccatccgctacgcgtcccgcaaggcgtacgccgagac

SEQ ID NO: 58882 - DNA, 645 bp, Zea mays
  Clone ID: MRT4577_153697C.1
ctcgaggccggccgggatagtactatgtcacagtgacatcacgaacatctgtacacggaggcgctcgttcgttgcgccgcacgatcacgcaggaccacgcacgagctcaaaaacgacagccgtccatcatcacgcatctcagccatcatccagagagatcaggtccgggaaaatgtgtggcagaaacaaaattgatcgatccatcctgcgcccgcccgatcatgagtctgcacttgacaggatgctgcgcatctgccgccgccgccgccggcgagtggccgggtgacgatcacaatcaatagcgacgccatctacacgccagagagcggcatcaaaaaaaacgaggggcaaatgatgagcaaaacatgaacaatgtaggagaacaagtaccgcagcgagccactggagatatagagaggagcaataccaatgatcgtcacacatgagctcctccgatcgttgtgcatcacatcgacttccactgtcgccccagattgctctgaattactctactcatctagccatcatgagcgagtcagggatcatgtgatgattcccgatctcgagtgctatccattgagatatatctatcacagtatcagaaacactcattttctcttaaaaaaaagggggacctcaacgtcc

SEQ ID NO: 58883 - DNA, 2136 bp, Zea mays
  Clone ID: MRT4577_153698C.1
catctctgagccggtctcccggcagcagcagtccctcgggttgtccacgcggagcgccagccgatgcctcgaggccggccacagtatgtcggttcacccgaagcctataaattcctcgccgccccgcctctcgccgcccatttccttccgccgcctcctaatcctcaacacccgcgcccccaccgcgcccgtcgtatgccaccatgcaccgcgcccgccccaccgcgcacgctaatgaccccgatgctccgtacgccgccgccgccgcgatgctgctggagcccaaactcgaggacgaggagttgccgctgcagcagctggcgtccccgggcaccttcgtgtccctggaccagctgatgccgccggtgaccgcgccagccgagccgcgcccgctggaggcgctgctgcacggcccgcagctgccgcccttcctgtccaagacgtacgacctggtgaacgagccgtcgctggacggggtcatctcctggggcgctgccgggaacagcttcgtcgtgtgggacccctccaccttcgcgcgggacgtgctgccccacaacttcaagcacaacaatttctccagcttcgtcaggcagctcaacacctatggtttccgcaaggttcatgctgacagatgggagtttgctcacgaagatttcctgcgagatagcaagcatctattgaagaggattgtcaggcgcaggtcctccccaacaaaacaatgcagcgttcagcctggctcttcttctggagagtccagcttggaccctgagctccacacgctgaggagagagaagaacgcgctgcttgaagaagtagcaaggttgaaacaggaacaccgccagacaattgagcaaatgagcacgctgaatcacaggctggaatctgcagaggaccggcagaggcagatggtctctttcctggccaagctccttcagaacccgagtttcgtgaggaagctgaagctgcacagggagaagaaggagatcgactccaccagggtgaaaagaaagtttctcaaacatgttcctcatggcagcgtagagtcaggtgaatccagctcacagcacgccggagagagtggttcgtatttcgctgtgagttcccccatggctacaactacaagcgtgcatgacgacatcacggagcttcagaactttcttttggaagatgatgacctcaacttcggcatggattcagaaaacaccgggcttgaaggcaccgaggcaccagatgatattggagaactgattcaggggttcgacacacaagaggaacttgacctcggcagtggagctgagctacaggagatgcctccagcttctggttctcttgctcaagatcccacaatcggcaggttcaagggaaagaatgtgctgtgtccaggactggacgctacctcctccgaaggcgactgcctcagtccattgcctgacaacatggggctgctttcaggcaccatgctagggacggcaggcagcatgatggccgctgacgatgagcaaatatggggcgttgatgcttcggcagccctgcaaagctcttgcagtggcactagccaacaagctttcggtagccatgttagtgatccctatctgatggacatcgccaacaggcctgagagattttgggagcttgatttccaggcactggatgaggctgatctgcagctggacaagtgtgctatcgatgaccctgctcttcagcagcagccaagcatgaagaagccgtagacgaatttccgttgtgagacagacagacaatgtatatggtggtgctttatccactgaagtgctacgattaacttatggagattgctatagttacttcggtatttgggagcgaggctgatgaactcgcctactatggcacttagtagtagcagcagcacagcagtagtatgtttttgtttcccatttattcacccccggtgtttttgaatggaaacttgtatcctagtgatttcttcagagcagctgttaactgctctggccgattcttttttgttgtttccaaaaaaaaaaaaaaaaaagcggccttccatttatgtttttgttctgatttttttttttacttgctagttgctacttgcgaatgtcttgcaatgagtaatgggattaaaaaaatccgttctcagag

SEQ ID NO: 58884 - DNA, 143 bp, Zea mays
  Clone ID: MRT4577_153699C.1
tctctgacacctgggttaggccggcttcttgcgcgcgctataaatggctcatggcgaggtagctaaggaagatagaatcgctcggccgggccgactacgaaccttacaagacacgcgcgcggacagtgccctagggaggcagc

SEQ ID NO: 58885 - DNA, 299 bp, Zea mays
  Clone ID: MRT4577_15369C.1
tgttggagaaactgtttgttttttttttttttgttttttttttttttttttttttttttttttggcacacatccaacatgtttttcccctttttttgatcaccagaagacgtaaattaaacagcacaccgttgttcccagtttgcttgctcacgggttattaatacgcataaacataaagcatccatggatggatgccttgaaacatgcattacttgaacaaaagcttacgaggcaactttgtcaaatgcatttaaaagatttaggttcccggaatggcctcaagcaacaggagtaaat

SEQ ID NO: 58886 - DNA, 246 bp, Zea mays
  Clone ID: MRT4577_1536C.1
caccacgcctgtgcagggaccagcgttaagggctatgccacgccaaaggtctgtgttactgaagagccgttcgacaggctgtggaagggtcgttcgcggctgacatcctggtgtggtgagatcgtatttgctattgctgcttccaaagccttgattgctggtgatcgttttttacatggactccttacgtatatactacatgtactgcttctgttgatctgtgggaatacacctgatctggataaa

SEQ ID NO: 58887 - DNA, 388 bp, Zea mays
  Clone ID: MRT4577_153700C.1
gattagacaaaaaatgggggtaaatacatttttagaggggttagccatgaaaaattaatttggggagccatgaattgaaaaaaaaaaaaaagaactggtggggtttattcaattcagtctggagcgtgcaaagaaggcttaattcaattgaggtgcttgttgaacaagctgaccatgtaggcaagggccgtctttgcggtcttgacggcaaaagggttgggggggggggacctgtaggaaaacccgggctaaacgccctggaagattttggcgtagtagggaacctggggtctttcacgcagaaaatgcacgaaccgggacaattttttcagctgcagggacggggggttctgggcccccaggatctagaagggggatgtgacctttt

SEQ ID NO: 58888 - DNA, 241 bp, Zea mays
  Clone ID: MRT4577_153701C.1
ggtcgatcctcatcgcgtccggagctaaccgcgtatagcgcgtagattccgtatttcccgttccctgcaccgtatcgcaccgcaccctatcctcgtgggtgagtgagaaggcatcggaggcaggagttgcagtccctcgcgccgacggggtaccgccgcacgccggagttgttggtgatggcggtggcctcggaagaggacctgtatgccgtgaccgggtagacgctgtacccggggagct

SEQ ID NO: 58889 - DNA, 214 bp, Zea mays
  Clone ID: MRT4577_153702C.1
atgtcgagaacgcggcctaagcgttttttttttttttgttttttttcttattaaacactcatactgtttttatgaccttgcgtatattttcggtcttcccacacatgttaatgtgtgtcgacttactcggttgttccactctctttatcgtgtgtggtggtgtcgcggtgtttttccatggtcatgattcagttgtgggtttggtgggcagggt

SEQ ID NO: 58890 - DNA, 438 bp, Zea mays
  unsure (1)..(438): unsure at all n locations
  Clone ID: MRT4577_153703C.1
ngcgggcggccggggttttttttttttttttttttttttttttttttttttttttttttttttttggcccaaaacccttggaaaactattaaatttaaaaaaaaaaaacataagacccggggttttaaaaaaaaaggtttttgaaaaaaaaggcccccgggggggggggggcgaaacccaaaattttaaaaaaaaaccaactcccaaaaaacttttttttaataacctaaaggggaaaaacgggcttccaaccaaaaatttaacaggtgaacccctggccgtggccaaacttaaaaaacggacctttaaatttgggggaaggccaaatggcccaactggggggggtcctattggaggggttttgggggaggggggccccaatttgggggggggtgggccccaggtcggcggccattggccaccggggggttttttttt

SEQ ID NO: 58891 - DNA, 252 bp, Zea mays
  Clone ID: MRT4577_153704C.1
ctgcatgcatgcgttccgcttgtgttaacacatacaccagtaacatgtggcgcacctatataaggctgcaactatactgctaggagtctggcaaggagccgctaccgatctaggggagaccaaagatgaagaagcgtctggcactcaactctgcttacggggccacacgaggagtccatctgggccgccgagctgctgccctgcgactgccacacctctgctgcggagctgctcactggcgcgaccgacgag

SEQ ID NO: 58892 - DNA, 189 bp, Zea mays
  Clone ID: MRT4577_153705C.1
gttgatggaacttataccaaaatgggtgcatatgacagatattcaacaaaaaagaggggggtttcatgagaagatgaatgaaccttcaaacatacttcataaatgttcaaatggttgcaaaggtattatctatgagctatgactaagtacaaggacacatcacattgtcgttattgcttattataaatt

SEQ ID NO: 58893 - DNA, 187 bp, Zea mays
  Clone ID: MRT4577_153706C.1
tcttttccttccatccaatcttttattcaatctcagccatagcttctcttcggacagcattctactaactaccacgccgcctataccaattcccgttcctaggagaaaactcgtcaagtgattgaggcggcccatgacaaaaggagggaggccaatcacaatgcttcctactccgccaaccacacca

SEQ ID NO: 58894 - DNA, 1164 bp, Zea mays
  Clone ID: MRT4577_153707C.1
atgggcgagccggacgcctgcgcgctttggcgcgcattaaatgccgttgcagcgcgccagcctctggaaattcccgaggctgaggagttcagtgcgaggtcccctggtgcaccggacattgtccgtgcccaaggcgagggtggtgccgaagctggcggcgaggcggacctcggcggcgccttcgggggtcgagatccgagagacctctcctcaggcacggttgatcatggcccggagcgggtaagtatcttggaacgtcttcgtcctggcttctcattcgtatgtcccgaccgcgacttttctttcctcctcagtaagcgaagccatggcctgaccgatctggctccccggaaggcccttaagacggcgtcggcttccgcagccggtgccgcgctaggtctcgctgttcagttgaccttctcgcaaggcgctccacagcggggggctcaggcggcaccagtcgccgtggagcgagttcccgaggctggctcttctgctgaggcggtcatcgtgctggaggaggcggctagcgcggacgtggcctcgggcccaccggacatgtcgccggtgctggcacctgttgctgctgaagccgctgccgtcccagtcggggagcgacctgttgttgccgacgctgagatggccgaggcgtcggcgctcggccttgcgttctggctgctcgcagagctcgagtccgcccttgatgagtccaccagggcgcttaccggggcggccgagcagagggaggccgaccatgcggccatgtctgaggccgtctcgaacttctgccaggtctttggcttcggtgacgtcccctcagggagctcccctcaaagtcgcctgcaggccttgggcgatcacgtgcacggcagactccgcgaggcgctacaccacggcgtcaggcgggccttcgccgtgcttgcttcccactacgtcgtggatctggagcgggtcagcgagggatattgccttcctgatgaagatgaagccgccttggctgaagtccagaggctcgacgcggtcgccgcgggcccgagcgcggtgctggcgaccaccttcgaggcagagatcctcccgcctgcgccgtcgtccgaagccggggtggactttgccgagggtggggacgaagccgaaggcgcggctccttccgcgggcggcgcctaa

SEQ ID NO: 58895 - DNA, 196 bp, Zea mays
  Clone ID: MRT4577_153708C.1
gctcttgcgtcgtcctagccgcgtcgcaccgcatcgcatgttacgattcgaagctctctgctcgcaggggacctggcgaaaactcccaaccggagcgccgagtacagcgaggccgcgagaaggccggcgcaagctccgcgccctatcgcgagaagagctggcacccctatgctccgcctgggggggggggggggga

SEQ ID NO: 58896 - DNA, 846 bp, Zea mays
  Clone ID: MRT4577_153709C.1
atggattccccccgtgagcggagccgctccgtcccaccgccggggtacatcatgagcttcgtctccttccacgagcggggatttggtgtgctggcgagccgctttatgcgggcgatcctgcaccactacagggtggagttgcacaacctcagccccaactccatctcgcaggccgccatcttcgaagcgttgtgcgaggggtacttggggatcgccccccactgggacttgaggactcatctcttcttcgcggatctttttgcttcgccgacaggggagagaaaggttaggcaggagccgtcaagccagcccccgagtgggctgatgccgtctgtccccggagccgggacgccgaggtcccggcccgaagagcgggggcagtccaagagggtgcttgacccctcgaccaggggagttgaggtgaccccggggagccaggccgaggcgtctgttccccgagagccgtcgcccacgccggcagcgcaggagagcgaccctcaggtcgccgtggcagtgcctgggcagtctgtctcccgggcgtccaaggcgcccaaagcaagggtggtgccgaagctgccggcgaggcggacctcggcggcgccttcaggggtcgagatccgagagacctcccctcaggcacggttgatcatggcccggagcggctccgagggtcggcgccagttgctccggttccggacccgtgaggcctcggatcccttcttcgttctcgacgatgagcgggaggagcagtcctggggcgagcttcgcgagtatgccgaagcaacggtggggtcgctccggtcgtcgctggaggttttctgtagggatgtccccaaaatcctccag

SEQ ID NO: 58897 - DNA, 390 bp, Zea mays
  Clone ID: MRT4577_15370C.1
ctgggggatgggtttagcgggatatgcaacattaaacattcaaaccataaaatctaacttcatgtccaacaatgaaaggatttactggttcctgcgcaatatacttggtcccgtaatgcatattaatgcacaaaacgcttgctcccctttatgcacattaataaaaacgttcccttcttaacatgccatggcttaatggctactgcaggttttaaactggaactgaactggaacaaaaatattcttggccatggaaaactcgaacatacattggaacttactttaatgaactaatgtggaagccgtctccttcccggggggcaacaccgcttttttaacaaccctgctttggggacacaacacttggggcaatattcctagccttttttt

SEQ ID NO: 58898 - DNA, 240 bp, Zea mays
  Clone ID: MRT4577_153710C.1
aattcggcacgaggccttgcgagcttgacacagctgcacacaaccctactaggacgcggcgctggacaccagtagacggcaggccactcaccactggcagaggcatgggggccggcggcgtcgacaggctgaacactacattcctctcctcccgcgctctcgccttctcctcctcttctacaagcggcggcggggatggatgttccaatacacggacacggacaccgactgacgaccgcc

SEQ ID NO: 58899 - DNA, 2676 bp, Zea mays
  Clone ID: MRT4577_153711C.1
atggccgaccgagtgaccatcatctcgccgcgtgacccatggcctttctccacagtgacggcgggtgatctggaggatctcgttgctgagggtttacttcgccctctctctgatgagaggcagccggagtggattccccccgcgagcggagccgctccgtccccaccgccggggtacatcgtgagcttcgtctccttccacgagcggggattcggtgtgccggcaagccgctttatgcgggcgatcctgcacaactatggggtggagttgcacaacctcagccccaactccatctcgcaggccgccatcttcgtagcggtgtgcgaggggtacttggggatcgccccccactgggacttgtggactcatctcttttccgcggagctttttgcttcgccgacgggggagagaaaggtccgcgcggcagtgcgggccggcggctgcatcctccagctgaggcagtcgcgggcgtcgctgtatattcccgccatccttgcgtcctcgaataaagggtggcagcgccggtggttctacctccggaatgatggcgagttgctcccgccgttttcccagcgagtggtcaccgtcgccgccgatgcttggcgccacgggaccccgcacgaaagacagaagaacctcgaaccccttctcaaggccttggaggcgttgcggaaagggggactcaccgccgtgggagtgattgccgccatccaccgccggagggtgcttcccttggcggagcgacggttgccgctttgggagatgacgccggaggctgatttggagggctcgcggatgtcctcagatcctcttcccttcgacgttctccacaggcgggtggccgtcacgttgggaaaaccggacaccagcgccttctcccagcccttgatgcgccccgaccaagggtgcgtgaccctggaggtagggtggcacaagccttcctggccacgggtcccggaggatgcggtggaccgagcagcgcggcgggttgccgcggaggagaagaagaagaagaaggacccggagaaggcccgggcccgcgagcggatgcgggcccgagatgccttggaaaagctccgtcgtcggcaggagagggaggggctcccgagggagccatcgccggaaacgcctgacgatgacgacgacgatgaagatgatgacgaggatgacgacatggctgcccgcctcggcttcagcccgggtttgaggctaggcctggagtcgtcgagccagcccccgagtgggctagcacccgcccgggcagtccgtcccccgggcgtccaaggtgctcgaggcgagggtggtgccgaagctgacggcgaggcagacctcggcggcgccttcgggggtcgagatccgagagacctctcctcaggcacagttgatcatggcccggagcgggcggccatcgtgctagtggaggcggctgacgcagacgtggcctcggccccaccggacatgccgccggtgctggtacctgttgctaccgaagccgttgccgtcccagtcggggagcgacctgttgctgccgacgctgagatggccgaggcgtcggcgctcggtgcctcggaggaggggggcgtggagacgcgatccgtcccgccgagcggcagccttgtccctgcacgacggagctccgagggtcggcgccagttgctccggttccggacccgtgaggcctcggatcccttcttcgttcttgacgatgagcgggaggagcagtcctgggacgagctccgcgagtgtgccgaagcaacggtggggtcgctccggtcgttgctggaggttttctgcagggacgtccccaaaatcctccaggatctgacggatctgagcgccgccaagtcatcgttcatccgccacgaggtcgacatctggggctcgctgcgatccctgaggacctcgctcgccggggctactgcgcgcctctctcaacagggcaccgaggtggcggactttcggttgctctgcgccgatctgagagccgaggcggcagcggcacgcgcagaggcggcagcggcacgcgcagaggtgcgacgacaacagtcggagttcgaccaggtcatcaatgagcgagaccaatctcggggtcgggctgccgaggccgaaagccgggctggagcccttgcagccgacctagccgtagcccaggtcgcagcctcggagcagcgtgcccgagccggagagctcgagtccgcccttgatgagtccgccgaggcgcatgccgaggcgcttgccggggcggccgagcagaggaaggctgaccatgcggccatgttcgaggccgtctcggacttctgccgggtcttcggctttggtgacgtcccctcagggagctcccctcaaagtcgcctgcaggccttgggcgaccatgtgcgcggcagactccgcgaggcgctacaccacggcgtcaggcgggccttcgccgtgcttgcttcccactacgtcgtggatctggagcgggtcagcaagggatattgccttcctgacgaagatgaagccgccctggctgaagtccagaggcttgacgcggccgccgcgggcccgagcgcggtgctggcgaccaccatcgaggcagagatcctcccgcctgcgccgtcgtccgaagccggggtggactttgccgagggtggagacgaggccgaaggcgtggctccttccccgggcggcgcctaa

SEQ ID NO: 58900 - DNA, 2544 bp, Zea mays
  Clone ID: MRT4577_153712C.1
atggattcccccgtgggcggagccgctccatccccaccgccggggtacatcgtgagcttcgtctccttccacgagcggggatttggtgtgccggcgagccgcttcatgcgggcgatcctgcaccactacggggtggagctgcacaacctcagccccaactccatctcgcaggccgccatcttcgtagcggtgtgcgaggggtacttagggattgccccccattgggatttgtggacccatctctttttcgcggagctttttgcctcgccgacgggggagaagagggtccgcgcagcggtgcgggccagcggctgcacccttctgctgaggcagtcgcgggcgtcgctgtatattcccgccatcctcgcgtcctcgaacaaggggtggcagcgccggtggttctacctcaggaatgacggggggctcaccgctgcgggagtgattgccgccatccaccgtcggagggtgcttcccttggcggagcgacggctgtcgctttgggagatgacaccggaggctgacctggagggctcgcggatgtcctctgatcctcttcccttcgacatcctccacgggcgggtgtccgtcgcgttggggaaaccggaccccagcgccttctcccagcctttgatgcgcccagaccaagggtgcgtgaccctggaggtggggcggcacaagccttccctgccacgggtctcgcaggacgcgatggaccgagcagcgcggcgggttgccgcgaaagagaggaagaaaaagaaggacgcagagaaggcccgggactgtgagcggaggcgggctcgagacgccttggagaagcttcgtcgccggcaggagagggaggggctcccgagggagccgtcgccggaaatgcccgacgacgaagatgatgatgaggatgatgacgaggaagacgacatggctgcccgccttggcctcagccccggcttggggttaggcaaagggccatcaagccagcccccgagcgggctgatgccatcagtccccggagtcgagacgccgggttcccggcccgaggggcgggggcaacccgagagggtacttgacccctcggctggaggagctgaggcgaccccggggagccaggccgaggcgtccgctccccgagagccgccgcccgcgccggcagcgcaggggagcgaccctcaggtcgccgttgtagcgcctgggcagtccgcctcccgggcgtccggggtgcccaaagcaagggtggtgccgaagctgctggcgaagcggacctcggtggcggttccgggggccgagatccaagagacctccccccaggcacggttgatcatggcccggagcggcaagcgaagccatggcctgactgacctggcaccccggaaggcccttaagacggcgccggcttgcgcggctagcgccactccgggccttgccgttcagctgacctcctcgcaaggggctccacagcagggggctcaggcggcaccagtcgccgtggagcgggttcccgaggctggctcttccgctgaggcggccattgtgataggggagacggctgacgcgggcgtggccccgtgtccaccagacgtgccggcgatgccggcacccgtcgctactgaagtcgccgtcgtcccagtcgcggagcgaccggtcgctgccgacgctgaggcggctgaggcgtcggcgctcggtgcctcggaagagaggggcgtggagacgcgatccgtcccaccgggcggcagcctcgtcgttgtgcggcggagctccgagggccggcgcgagttgctccgtttccggacccgtgaggcctcggatcctttcttcgttctggacaatgaacgggaggaccagtcctgggacgagctccgcgagtgtgctgaagcaacggtggggtcgctccggtcgtcgctggaggttttctgcagggacatccccaaaatcctccaggatctgacggatcgaagcgccgccaagtcgtcgttcatccgccgcgaggtcgacgtctggggctcgctgcgatccctgaggacctcgctcgccggggctactgcgcgcctctctcagcaggagctcgagtccgccctcgatgagttcgcccaggcgcttgccgaggcgcttgccggggcagccgagcagagggagaccgaccacgcggccatatccgaggccgtctcggacgtttaccgggtccttggctccggcgacgtcccctcaggaagctcccctcaaagtctccttcaagtcttgggcgatcatgtgcgcggcagactccgcgaggcgctacaccacggcgtcaggcgggccttcgccgtgctcgcttcccactatgttgtggacctggagcgggttagcgaggggtattgccttcccgacgaagatgaagccgccctggcagaagtccagaggctcgatgcgggtgccgcgggtccgagcgcggtgctggcgaccacctttgaggcagagatcctcccacctgcgccgtcgccggaagttgggatggactttgccgatggtggggacgaagccgaaggcgcggctccttcccaaggcgacgcctaa

SEQ ID NO: 58901 - DNA, 1712 bp, Zea mays
  Clone ID: MRT4577_153713C.1
ccgtttgtctaagatatgcttgcaagaaatcagcatatttgaccagatttcatttgaaaaatggtcttaccccttgcccacattgattaaagaggaagttttaccaaagatatgtgatttgcaagacagattcgaccagctcaatgcactaaacattcagctggaaactgaagttgcagtcctcaaggatggcatgaaagagctggatgaagatcttggaacttcgcgatctgagcttcagaaaaaggtttctgaacttgaacagttagatcagaaattttcatctgtgaaggaaaaacttagtattgctgttgcaaaaggtaaaggtttgatagtgcagcgtgacagccttaagcagtctttgctggagaagtctggtgagatcgagaaactcacacaagaactgcagttaaaggaaacattgctgaaagagttggaagccaaactcaaatcctatacagaagcagatcgaattgaagccttggaatcggagctgtcatacataaggaattcagctacagctctaagggattcatttcttctaaaagactctgttcttcagagaattgaagaggtcttagaagaactagatttgccagagcaatttcattctcgagatattgttgaaaaaatagaactgctgtcaaagatggccattggcactcctttcactctacctgatggtgataagggatcctctgttgatgggcattctgagtctggtgtggctatgaatgtcatagacgatgagcagaactcaaattcaaattcagtatctgatgaagtaaagagcaaatatgaggaactgaataggagattctgtgagctggctgaacagaacaatatgctggaacaatctctagtggagaggaacagtcttatacagaaatgggaagaagtccttggccaaattagcatccccccacagttcaggatgttggaagcagaagataagttagcatggttaggaaacagattcttggaggtggaacaggagagagattcattacagttgaagattgagcatcttgaggattcctcagaaatgcttattgctgatctagaagagtcacataaaaggatatctgaactcagtgcagaggtggttgctataaaggctgagaaggatttcttttcacaaagcctagagaaactgagatttgagttccttgggctctctgagaaagttgttcaagatgagtttgttagagataaattgcgaatggatctatctgaactgcgggataagttcgctgaaaaatccgaggagagcaggcactaccatgaaatggacaccgaggtccacaaactgctgaatttggtgcaaaacacattgcaggatagcactaactctgaaatttcatctggaggcatttctgctgtgttgtgcttgggcaaaatgctgaagaaacttttagatgactatggcactcttctgtacaagtcgactgaaggcaattttgccgagagagacattcagttagaggatatcaagccatctaaggatgcctctaaatcggacactggtgcatacgagaaagagatggaactaaattctttaaataacgagttagatcatgctcacaacaatctggccttagcgcaacaggagtgtgatgaagctgtggagaaggcacaatcactaatgatggaaattgagaccttacatgctcaaataagtaaattgcaggaaagtgatgctgaacaaatgc

SEQ ID NO: 58902 - DNA, 1938 bp, Zea mays
  Clone ID: MRT4577_153714C.1
atgacgccggaggccgacttggagggttcgcggatgttctcggatccccttctcgtcgacgacctccacaggcgggtagccgtcacgttggggaaaccggacgccggtgccctttcccagcccttgatgcgtcccgaccgcgggtgtgtgtccctggaggtagggtgtcacaagccttcccggccaccggtcccggaggacgcggtggaccgagttgcgcggagggttgccgcggagaagaggaaggagaaaaaggacgcgaagaaggctcgggcccacgagcggacgcgggcccgagacgccttggaaaggctccgtcgtcggcaggagagggatggactcccgagggagccgtcgccggaaacgcttgacgacgacgacgatgatgaagacgatgacgaagacgacaatatggctgcccgccttggcctcagcccgggtctgaggctaggccaggagtcgtcaagccagcccccgagcgggctggcgccgtcggtttccggggccgggacgccggggtcccggtccgaagagcgggggcagaccgagggggtacttgacccctcggctggggaagttgaggtgaccccggggagtcaggccgagctgcctgttccccgagaaccgtcgcccgtgccggcttcgcaggaggggatcctcagcaagcggactcatggtccgaccgatctggctccccggaaggtccttaagacggcgtcggcttccgcagctggtgccgcgccgggcctcgccggccagctgacctcctcacaagacgccccacagcggggggctcaggcggcaccagttgccgtggagcgagctcccgaggccgtctcttctgtcgaggcggccatcgcgctgggggaggctgccagcgcggccgtggcctcgggcccaccagacatgctgccggcgatggcgccggctgctgtcgaagccgttgccgtcctggccgtggagcgacccatcgccgccgacgttgagatgaccgaggcgtcgctacttggcgcctcggaggaggggggcgcgggaccgcgacccgtcccgtcgagcgacagccttgtccccgcgcggcggagctccgaggggcggcgccagttgctttggttccggacccgtgaggcctcggatcccttcttcgttcttgacgatgagcgggaggagcagtcttgggacgagctccgtgagtgtgccgaggcaacagtggggtcgctccggtcatccttggaggtcttttgcagggacgttcccaagatcctccaggatctgacggatctgagcgccgccaagtcgtcgttcatccgccgcgaggtcgatgtctggggttcgctgcggtccctgaggacctcgctagccagggctatcgcacgcctctaccagcagagcaccgaggtggcggaccttcggttgctctgtgccgatctgggagcagaggcagcagtggcacgcgcagagagctcgagtctgcccttgataagtccaccagggcgcttgctgcaggcgaccgagctgagggaggccaaccacgtggccatgtctgaggccatctcggctttctgccgggtctttggcttcgatgacgtcccctcaggaagctcccctcaaagtcgcctgcaggccttgggtgaccatgcgcgtggcagactctgcgaggcgctacatcacggcgtcaggcgggccttcgccgtgcttgcttcccactatgtcgtggatctggagcgggtcagcgaggggtattgcctccccgatgaagatgaagcctccctggccgaagtccagaggctcgacgcgaccgccgcgggcccgagcgctgtgctggcaaccaccttcgaggcagagatcctcccgcctgcgccgtcgtccgaggctggggcgaactttgccgagggtggggacgaagccgagggagcggctccttctccgggcaacgcctga

SEQ ID NO: 58903 - DNA, 447 bp, Zea mays
  Clone ID: MRT4577_153715C.1
ccgtgctgcctcctcctcctctctctctctaccgacgccgcccccgccagagagaaaccctagcctagggttccacgcgccgccgccgccgccgacgtcgaccccgcgtcgccctccccccgagctcgccatggacgcgggccgcaagagggccgtgccggagggcaccaacggcggtgccgccgtcaagcgcgccagagaatcggagtcggttcaaacgggtgtaggaagcaaatcgaagccatgcaccaaatttttcagcactgctggttgtccctttggttcaagttgccattttctccataacttccctggaggtcaccaggctgtttcaaagatgaccaacttgggtggtccagctgtttcagctcctcaaggaagaatgcccatgggacctggtgttcctgatgggccacctacacccagcttgaagactcgcttgtgtaa

SEQ ID NO: 58904 - DNA, 2745 bp, Zea mays
  Clone ID: MRT4577_153716C.1
atggccgaccgggtgaccattgttccgccgcgcgacccgtggcctttctccaccgtcacgacggaggatctggaggcccttgtcgctgagggtttgcttcgccttctctccggtgactcgcagccggagtggatgcctcccccgagcggagccgccccgtccccgccgccggggtatgtcgtgagctttgtctcctttcacgagcgggggttcggagtgccgacaagtcgttttatgcgggcgattctgcatgtctacggggtggagctgcacaacctcagccccaactccatctcgcaagccgccatattcgcggcggtttgtgaaggatacttggggattgaccctcactgggacctgtggactcatttcttctccgcggagcttttcgcctcgccgacgggggggagaagagttcgcacggcagtgcgggccggtggctgcatcctccagctgaggcaggcgcgggcgccgcagtatatccccgccatccttgcgtcctcgaacaaagggtggcagcgccggcgggtagccgtcacgttggggaagccggacgccgtcgctctttcccagcccttgatgcgtcccgaccgcgggtgtgtgtccctggaggtagggcatcacaagccttcccggccaccggtcctggaggacgcggtggaccgagctgcgcggagtgttgccgcggagaagaggaaggagaaaaaggacgcgaagaaggctcgggcccgcgagcggacgcgggctcgggacgccttggaaaagctccgtcgtcggcaggagagggatgggctcccgagggagccatcgtcggagacgcctgacgacgacgacgatgaagacgatgacgaagacgacgatgtggctgcccgccttggcctcagcccggatctgaggctgggcctggggtcgtcaagccagcccccgagcgggctggtgccgtcggtatccggggccgggacgtcggggtcccggtccgaagagcgggggcggaccgagggggtacttgacccctcggccggggaagttgaggtgaccccggggagtcaggccgagctgcctgttctccgagaaccgtcgcccgtgtcggctgcgcaggagggcgatcctcaggttgacgtggctgcgcctgggcagtccgtctctcgggcgcctagggcgcccaaggagaggatggtaccgaaggtggcagcgaggcagacctcggtggtacctttgggggtcgaggttcgagagacctccccacaagcacggttgattatggcccggagtggcaagcggagtcacggtccgaccgatctggctccccgaaaggtcctcaagacggcgtcggcttccgcagctagtgtcgcgccgggtctcgccggccagctgacctcctcagaagacgccccacagcggggggctcaggcggcaccagctgccgtggagcgagctcccgaggctggctcttctgttgaagcggtcgtcgcgctgggggaggctgctggcgcggccgtggcctcgggcccaccagacaagctgccggcgctggcgccggctgctgccgaggccgttgccgttctggccgtggagccacccgtcgccgccgacgctaagatggccgaggcgtcgctacttggtgcctcggaggaggggggcgcgggaccgcgacccgtcccgtcgagcggcagccttgtccccgcgcggcgtggttccgaggggcggcgccagttgcttaggttccggacccgtggggccccggatcccttcttcgttcttgacgatgagcgggaggagcagtcttgggacgagtttcgtgagtgtgccgaggcaacggtggggtcgctctggtcgaccttggaggtcctttgcagggacgttcctaagatcctccaggatctgacggatctgagcgccgccaagtcgtcgttcatccgccgcgaggtcgatgtctggggttcgctgcggtccctgaggaccacgcttgccagggctaccgcgcgcctctcccaacagagcgccaaggtggcggaccttcggttgctctgtgccgatctgggagcagaggcagcagcggcacgcgcagaggcgcagcggcggcagtcggagcttgaccaggtcaccggcgagcgggaccaatctcggggccgggccgccgaggccgaaagccgggctgaggctcttggagtccagttagccgaggcatctgctcgggccggagcctttgcagcagacctagctgtggcccaagccgcatcctcggagcagcgtgcccgagccggagagctcgaggctgctcttgataagtccaccaaggcgcttgctcaggcagccgagcagagggaggccgaccacgcggccatgtccgaggccatctcggccttctgccgagttgttggcttcgacgacgtcccgtcgggaagctcccctcaaagtcacatgcaggccttgggtgaccatgcgcgtggcagactccgcgaggcgctgcatcacgatgtcaggcgggccttcgtcgtgctcgcttcccactatgtcatggatctggagcgggtcagtgaggggtattgcctccccgacgaagatgaagccgccctagccgaagtccagaggctcgacgcggccgcagcgggcccaagcgcggtgctggcaaccaccttcgaggcagagatcctcccgcttgcgccgtcgtccgaggccggggtggaccttgccgaaggtggggacgaagacgagggcgcggcgccttctccgggcgacgcctga

SEQ ID NO: 58905 - DNA, 2478 bp, Zea mays
  Clone ID: MRT4577_153717C.1
atggccgaccgggtgaccatcatcccgccgcgcgacccatggcctttctccacagtgacggcgggcgatctggaggatcttgttgctgagggtttacttcgccctctctccgatgagaggcggccggaatggattcctcccgtgagcggagccgctccgtccccaccgccggggtacgtcgtgagcttcgtctccttccacgagcggggatttggtgtgccggcgagccgctttatgcgggcgatcctacaccattacggggtggagttgcacaacctcagccccaactccatctcgcaggccgccatcttcgtagcggtgtgcgaggggtacttggggatcgccccccattgggatttgtggacccatctctttttcgcggagcttttcgcttcgccgacgggggagaggaaggtccgcgcggcagtgcaggccggcggctgcaccctcctgttgaggcagtcgcgggcattgctgtatattcccgccatcctcgcgtcctcaaacaaggggtggcagcgtcggtggttctacctccagaatgacggcgagttgctcccgccgttctcccagcgagtagtcaccatcgccgccgatgcttggcgccacgggaccccgcacgaaagacagaagaacctcgaaccccttctcaaggccttggaggcgttgcggaaggggggactcaccgccgcgggagtgattgccgccatccaccgccggagggtgcttcccttggtggagcgacggttgccgctttgggagatgacaccggagggtgacttggagggctcgcggatgtcctctgatcctcttcccttcgacgtcctccacgggcgggtggccgttgcgttggggaagccggaccccagcgccttctcccagcctttgatgcgccctgaccaagggtgcgtgactctggaggtagggtggcacaagccttccctgccacgggtcccgcaggatgtggtggaccgagcagtgcggcgggttgccgcggaggagaagaagaaaaagaaggacgcggagaaggcccgggcccgcgagcggttgcgggctcgagacgccttggaaaagctctgtcgtcggcaggagagggaggggctcccgagggagccgtcgccggaaacgcctgacgacgacgacgatgatgaagatgacgacgaggaagacgacatggctactcgccttggtctcagccctggcttgggattaggccgggagctgtcaagccagcccctgagcgggctgatgccgtcagtccccggagccgggatgccggggtcccggcccgaagagcgggggcagtctgagagggtacctgacccctcggctgggggagttgaggcgaccccggggagccaggccgaggcgtctgttccccgagagccgtcgcccacgccggcagtgcaggagagcgaccctcaggtcgctgtggtagtgcctgagcagtccgtcccccgggctcccaaagcgcccaaagcaagggtggtgccgaagctgccggcgaagcggacctcggcggcgccttcgggggtcaagacccgagagatctcccctcaggcacggttgatcatggcccggagcgggttttctgcagggacgtcccccaaaatcctccaggatctgacggatctgagcgccgccaagtcgtcgttcatccgccgcgaggtcgacgtctggggctcgctgcgatccctgaggacctcgctcgccggggctactgcgcgcctctctcagcagggcgccgaggcggcggaccttcggttgctctgcaccgatctgagagccgaggcggcagcggcacgcgcggaggcggccgcggcgcgcgcagaagtgcaacgactacagtcggagttcgaccggatcgtcaatgagcgggaccaatctcggggccgggctgccgaggccgaaagccgggctggagcccttgcagccgacctatccgtagcccaggtcgcagcttcggagcagcgtgcccgagccggagagctcgagtccgcccttgatgagtccgccaaggcgcttgccgaggcgcttgccggggcggtcgagcagagggaggccgaccacgcggccatgtccgaggccgtctcggacttctgccgggtccttggctccggcgacgtcccctcaggaagctcccctcaaagtcgcctgcatgtcctgggcgaccatgtgcgcagtagacttcgcgaggcgctacaccacggcgtcaagcgggccttcatcgtgctcgcttcccactacgttgtggacctggagcgggtcagcgaggggtactgccttcctgacgaagatgaagccgccctggcagaagtccaaaggctcgatgcggccgccgcgggtccgagcgcagtgctggcgaccaccttcgaggcagagatcctcccgcctgcgccgtcatccgaagccgggatggactttgccgagggcggggacgaagccgaaggcgcgggtccttcccggggtgacgcctaa

SEQ ID NO: 58906 - DNA, 653 bp, Zea mays
  unsure (1)..(653): unsure at all n locations
  Clone ID: MRT4577_153718C.1
gtacnncctcgaggcnncggccgggaaaaaaaaaaaaaaaaaaaaaaatcaatgaattattcataagacatctattccatattgggctcctacctctttagtctcttccttctatcttctagagttctacttctctatatagatcgttagctcgctgcaactttcctttcctatcgtcatgtactcagatcataattgaatccaattatccagtgtttggttgagaggtgttgttaacacacggcgacgagccgtggatccggcgcctgtgcgcgctcgtccagtctacgccaggaagcgggtcctgggcatctgtttcgggcaccaggttctgtgccgagcactgggcggaaaggttggcaaggctaggaacggctgggacgtcggggtgaggaaggtgacgtttgcgcgagacctcctggagggcctcgcgttccccggtgatctcgtcgaggagcttgagcttccccggagcgcctccctcgtcgaggttcaccaggacgaggtgtgggaaatcccgccagcggtgacgatgctggcctactcggagaagaccgcgtggaggtgttcgcggtcggggagcacgcgcttggcgtccaggccacccggagtacctgtcgaatcctacacacctcatcgacagcctcccaacc

SEQ ID NO: 58907 - DNA, 2037 bp, Zea mays
  Clone ID: MRT4577_153719C.1
atgacctggaggacctcgttgctgagggtttacttcgccctctctctgatgagaggcagccggagtggattcccccccgagcggaaccgccccgtccccgccgccggggaggtagggtgtcacaagccttcccggccatgggtcccagaggacacggtggaccgagcagcgcggcgggttgtcgcggaggagaagaagaagaaaaaggacgtgaagaaggctcgggcccgcgagcggacgcgggcccgagacgccttggaaaagctccgtcgtcggcaggagagggatggactcccgagggagccgtcgccggaaacacctgatgacaacgatgatgatgaagacgatgacgaggatgacgacatggctgcccgccttggcctcagcccgggcttgaggctaggccaggagtcgtcaagccagcccccgagcgggctggcgccgtcagttcccggggtcgggacgccgaggtcccggcccgaagagcaggggcagtctgagggggtactcgacccctcggctggggaagttgaggtgaccccggggagtcaggccgaggtgcctgttccccgaagaccgtcgctcgtgccggcagcgcaggagggcgaccctgaggtcgccgtggcagcgcctgggcagtccggctcccgggcgtctagggtgcccaaggcgaggatggtaccgaagctggcggcagggcggacctcagcggtaccttcgggggttgagatccgggagacctctccacaggcgcagttgatcatggcccgaagtgggaaggtcctcaagacggcgtcgacttccgcagccggtgccgcgccgggccccgccgttcagctgaccttctcgcaagacgccccacagcggagggctcaagcggcaccagttgccgtggagcgagttcccgaggtcggctcttctgttgaggcggctgtcgcactgggggaggcggctggcgcggacgtggcctcgggcccaccagacatgccgccggcgctagcgccagctgctgccgaagccgctgccgtcctggtcggggagcgacctgtcaccgccgatgctgagatggccgaggcgtcgccacttggtgcctcggaggaggggggcgtggaaacgcgccccgtcccgccgagcggcagccttgtccctgcgcggcggagctccgaggggcggcgccagttgctctggttccggacccgcgaggcttcagatcccttcttcgttcttgacgatgagcgggaggagcagtcttgggacgagctccgcgagtgtgccgaggcaacggtggggtcgctccggtcgtccttggaggtcttttgtagggacgtccccaagatcctccaggatctgacggatctgagcgccgccaagtcgtcgttcatccgccacgaggtcgatgtctggggctcgctgcgatccctgaggacctcgctcgccggggctaccgcgcgcctctcccagcagggcgccgaggtggcggaccttcggttgctctgcgccgatctgagagcagaggcagcagcgacacgcagaggccttgcgctctggctgttcgcggagctcgagtctgcccttgatgagtccaccagggcgcttgcccaggcggccgagcagagggaggccgaccacgcggccatgtccgaggccatctcggacttctgccgggtctttggcgtcggtgacgtcccctcaagaagctcccctcaaagtcgcctacaggccttgggtgaccatgtgcgcgacagactccgcgaggcgctacatcactgcgtcaggcgggccttcgccgtgcttgcttcccactacgtcgtggatctggagcgggtcagcgaggggtattgcctccctgacgaagatgaagccaccctggctgaagtccagaggctcgacgcggccgccacgggcccgtgcgcggtgctggcaaccaccttcgaggcagagatcctctcgcctgcgccgtcgtccgaggccggggtggactttgccgaaggcggggacgaagccgagggcgcggctccttctccgggcgacgcctaa

SEQ ID NO: 58908 - DNA, 606 bp, Zea mays
  unsure (1)..(606): unsure at all n locations
  Clone ID: MRT4577_15371C.1
gcatgaaggagctaaagctcttgatgtaggatctggaagtggaatccttactgcatgttttgcacgtatggttggnctctagttggaaaagtcataggaattgaccacattaaagagctagtagatgactcaataaataatgtcagaaaggacgatccggtgcttttgtcttcagggagagtgcagctggttgtgggggatggaagaatgggatatgctgaagaagccccatatgatgctattcatgtgggagctgcagccccagttgtaccccaggcgctgatagaccagttaaagcctggtgggagattgatattgccagttggtcccgcaggtggaaaccagatgttggagcagtatgacaaactacaggatggcagtgtcaagatgaagcccctgatgggagtcatatacgtgcctttaacagataaggagaagcagtggtccaggtggaagtgattttatcttctgctctttcttcttccacacatgcaagggatgaactgtaaaaacaccatcagcttgaccagtaaataatattacagtggattgctcatctcagtcctcaaagctttttgaaaccaacagcatcacagcttgttttgg

SEQ ID NO: 58909 - DNA, 1713 bp, Zea mays
  Clone ID: MRT4577_153720C.1
atgacaccggaggctgacttggagggctcgcggatgtcctcggaccctcttcccttcgacgtcctccatgggcgggtggccgtcgcgttggggaaaccggaccccagcgccttctcccagcctttgatgcgcccagaccaagggtgcgtgactctggagatggggtggcacaagccttccctgccacgggtcccgcaggatgcggtgtaccgagcagcgcggcgggttgccgtggaggagaagaagaaaaagaaggacgcggagaaggcccgggcccgcgagcggatgcgggctcgagacgccttggaaaagcttcgccgtcggcaggagagggaggggctcccgagggagccgtcgccgaaaacgcctgacgacgatgacgatgatgaagatgatgacgaggaagacgacatggctgcccgccttggcctcagccctagcttggggttaggccagggtccgtcaagccagcccccgagcgggttgatgccgtcagtccccggagtcgggacgccggggtcccggcccgaggagcgggggcaatccgagaggggcgcccaaagcaagggtggtgccgaagctgccggcgaagcggacctcggcggcggctccgggggtcgagatccgagagacctccccccaggcacggttgatcatggcccggagtggggggctcaggcggcaccagtcgccgtggagcgagttcccgaggccggctcttctgctgaggcggccattgtgctgggggaggcggctgatgcggacgtggccccgggcccaccggacgtgccggcggtgccgacacctgtcgctactgaagctgccgccgtcccagtcggggagcgaccggtcgctgccgacgctgggacggttgaggcgtcggcgcttggtgcctcggaagaggggggcgtggagacgcgatccgtcccgccgggcggcagcctcgtcgctgtgcggcggagctccgagggccggcgccagttgctccggatccggacccgtgaggcctcggatcccgtcttcgttctcgacgatgaacaggaggaccagtcctgggacgagctccgcgagtgtgccgaagcaacggtggggtcgctccggtcgtcgctggaggttttctgcagggacgtccccaaaatcctccaggatctgacggatctgagcgccgccaagtcgtcgttcatccgccgcgaggtcgacgtctcgggctcgctgcgatccctgaggacctcgctcgccggggctactgtgcgcctctctcagcagggtgccgaggtggcagaccttcggttgctctgcaccgatctgagggccgaggtggcagcggcgcgcgcggaggcggccgcggcgcgcgccgaagcgcaacgacagcagtcggagttcgaccgggtcgtcaaggagcgggaccaatctcggggccgggctgccgaggccgaaagccgggctgaaacccttgcagccgacctagccgtagcccaggtcacagcctcggagcagcgtgcccgagccggagagctcgagtccgcccttgatgagtctgccaaggcacttgccgaggcgcttgccggggcagccgagcagagggaggccgaccacgcggccatgtccgaggtcgtctcggacttttgccgggtccttggctccggtgacgtcccctcaggaagctcccctcaaagtcgcctgcaggtcttgggcgatcatgtgcgcggctga

SEQ ID NO: 58910 - DNA, 460 bp, Zea mays
  Clone ID: MRT4577_153721C.1
cctacgcttccgcgcaggcgtccggtggacagcttccggcgcgccggaatgccgctcgactcgctcatgtgcaacgccgccatataccgggccacggcgcggacgcctacgttcagcaccgacgggtacgagaggagcgtaggagtcaaccacgtggacgacttactcctggagcgcctgctcctggacgacatgcagaagaacgactacccggaccgccggctcgtcatcctcggctggatgaccggcaacaccaacacggtggccgggaacatcccgcccaaggacgggctgggcgatctccgcgagcctcaggtggggctgcgcggacagaacggttctgccatgatcgacggctacgagagctttgacggtgtcaaggagtacagggacagcatgatctgcaacatgctcaccatggatgatctgcaacggaagtaccacgaggagacgggcataa

SEQ ID NO: 58911 - DNA, 549 bp, Zea mays
  Clone ID: MRT4577_153722C.1
ggagtaataccccaaaggtatgggatgactttgagcctgtgtacacgattaaatgagtatggcaatgatcacttgcttagaaatgttgtttttcctatgaagtctaaattccttaagtactggagggatattccaatgttatatgcttttgctttcatattggaccctagagcaaagattagaggttttcataataatctgaggatattgtctggtctcactggtactgactactcaactttctattctaatgtgaaatctgaactgagtgtaatgtttacaaaatatgatgataagtttggtgcagttaaactgtagaggcccactcctacaacatctattactagtaagaggaaacaacagtggagctggatctatggatctgaaaatgagtatactccctcctaacttgtctaggggaacattagcatctgaattgctaccgacagcaagctctgatgcatgcataagttctgtagactcagaactgtcctcctaccttgacagtgacactctttaaaagtttgatgatgatttcaaccccttaaa

SEQ ID NO: 58912 - DNA, 454 bp, Zea mays
  Clone ID: MRT4577_153723C.1
gactaaaaccatacttaacttggtaaccatacccaaacaacatattcggacaccaaacaatgctgtgggtcagagctactaactagcattaccccagtacactgcggacaatcttgttacctcattttagaaaggggacactgtacaaaccgggaaacatattcccatggtcactctggggcgggacaaactagcgtcaacagtctcagtacaaaaaagcaaaaaccagtccggcccatcttttgaagttctccatgcacagctttgaatagggaaaggtaagccatgggccacccatctgcagaggatggtcccaaaatgctttcctccttgcgggagagcggggtagcatcatcaaactagatccattttcgcgaatcttgttttacccatccaacatagaggccagaggctgcacttcttcccttgtgtgtcaagacagcaaccaaatcat

SEQ ID NO: 58913 - DNA, 248 bp, Zea mays
  Clone ID: MRT4577_153724C.1
ccgacgatgaagcactgctcggcatatctacctgcccggccacaaccgaccgcactgacgccagaaggggtaccaacgcaacctgacgggatggttgccactaaggggtctagccccacggtaacagccgatcctctactacctccggcaactgacagagcgcgcatctcaaagggacaacaagctgcgacaacggattcttttttttttccccccccccccccccacgagaccgcgccgcgacgagc

SEQ ID NO: 58914 - DNA, 823 bp, Zea mays
  Clone ID: MRT4577_153725C.1
gtttttgtttttgcacgcgtacagaatatttggtctttctatattttttttttttttttggttgtaaagtagataaatgttggagcacaattaacacaaacttaagagtacatagacagaacatgtatcatacatgaagtttggttttaaataagcaaacaacataatatttataaaaaaggagttgcgggtggcatcgaattagttccccaggagacgaaagctatgtgttctctgatacgggatgcagcaacatacataaaacaaggcatgttttagtaggttggtcgtacgtacacgaaagtagattgcttctgccagcatgggtaacctttgtagccacacaaaattagattcctgtgagacttaaaaaatggtaaattcagctaggtttttcgtttggtactaaacaagatgttggtgtatcatgcatacaatgtagtagatttaagaaaaaaatacgtgatgataaaagcagtattgaagagtgtcgagtaaatcaatgcagtaactatatgttgtggtgataacagaaatacacatactttatgtccctaataaaaagatctgtgacaatacttgagttttgtgaccggcaatgggaatattattaaaagtcacctacaatgcttcaaagttagcgtagttcatggtgtgtatatagaaaagtcactgaagatcttaatgtgcatatacgaacataactgtagtacatatgacaaggcacatggaacaaaagaaattaccaaagatatggtatccaaacatctgattgtatattatttgactataaaataggctaagggataaagcaattacctcg

SEQ ID NO: 58915 - DNA, 1661 bp, Zea mays
  Clone ID: MRT4577_153726C.1
tagagacattggaaattaagcttgcagctgccaatgaaaagttaaagaggtctaatatgacggcctcggaaaccatgaccgagtatgagaacatgaagaaaatgctggaaagtgttcagtctcgccttgaagaggccgagcaaacaattctggaaggagagaatttacgaaaaaagttacataatacaattcttgagttgaagggaaatatcagagtattttgtagagttaggcctttgctgccaaatgaatcaggagcagtatcatatccaaagaatggagaaaacttaggccgaggcattgagttgttacataatgcacagggatattcatttacttttgataaagtatttgatcattcggcgtcacaagaacatgtgttcatagaaatatctcaacttgtccaaagtgccctagatggctataaggtctgcatatttgcctatgggcaaactggttctggtaaaacatatacaatgatgggcaaccctgagttagaagatcaaaaaggaatgataccacgatctctggagcaaatttttcaagctagccagacacttaactcacagggttggagatataagatgcaggcctcaatgttggagatttacaacgagactatacgcgacttgctagcaacgaatcgcatggctgctcaggatgttggtgcttcaaagtacagtatcaagcatgatactaatggtaacacgaatgtgtcggaccttacgatcattgacgtaactagtatcaacgaagtttcttctctccttaggcgggctgctcagagcagatcagttggtagaacacaaatgaatgaggaatcatcaagaagtcactgtgttttcactcttcggattttcggtgtaaatgagggaacggatcaacaagtgcaaggagtgctgaatcttatagatctagcaggcagtgagcgcctgaacaaaagtggtgccacgggtgatcggttgaaagagacagtggctatcaacaaaagcttgtcatgtttaagtgatgtcatcttctcgattgcaaagaaagaggaacacgttccatttcggaactcaaagctgacatatctgctccagccgtgtctcggaggggactcgaagacactgatgtttgtgaatctgtctcctgaagcgtcctcgacaggggagtctctttgctcattgcggtttgctgcaagggtgaactcctgtgagatcgggatccccaggcgccaaacccagatgcggagctcacaatgatgaaaaacggcggaagcgagctgccagtgtaatgtttgtgtgttgatttggtgatgcaaccgatcatttgcatccccttgtctggaggtggtgtgagttgccaattttatttggtttgtggccttgttgattgcgctaacggctggcagcggtgggtgtgctggcctattatattaatcttaggacctgatctgatttgtatgttgggatgtgttgccattttcaattttttgctttcattcgtagtcttgatttgtcgtttgcccaatgcccaatgcctctgagctgagctgggcgtgtatgtaaacaactgtgtacccgttgtcggacacgcacacagcctgacatgataattgtatttccctgctctgggaattctgcaaaaaaaaaaaaaaaaggactagttctagatcgcga

SEQ ID NO: 58916 - DNA, 2625 bp, Zea mays
  Clone ID: MRT4577_153727C.1
cgctccttccactcctcccttcctaaccactcacatgcacttgtctttttcattagaagaattgcattggcacaaactgtccaatcctgacatacaatcaggtaggaactctagcgtgagaaatgtcaacccatgcggacgacggtaaatggatgatcttgctgtggcgcaagtcgtacgttaaaggcaggttgtgtgtttctgcagtctttgcacttggcgggtcccaaatgcgttggtagtgactacacctgcggtctccaaagcagtgtgttaataacccgcggtggtgcatgtaaaatgcgttgtgcttgccagcaccggtagcggtgaaaagcaactctagtggaatcgaaggtttagggttcattgaccaatccgggtcaagagatcaggtcgagacttgatagagaagccgttggcagctttgtatctacctcaacgtggactaggggtgaccggcaagtcatcgacaccacgggaaaaaatcattgtgccacgtgttatcatctttccgttggtttctcactttcctcactagcttgtctgcatttaatgctaggatgttactaggttataatgtgaggcatatagcgagcgcaaactgcgcagcttcagcccatcggttagatgcaacccatcttctttggatatcttgcaccttgatttcttccctccgggacctctcttctccacttgcaaatacaagactcttgaggtattctgcgttgctaggtcctgtactttgcaccatcttggagaaagcactcccctcgttgcttagaagattctcaggagagtcgaattccagaacctgcccagaacttagaataagcaacctgtcacagtcaatgaccgtgttcaaacggtgggcaattatgagcattgtgcaactcttgaattcttctcggattgttttctgaataagagcatcagtccgcacgtcaactgctgctgttgcctcatcaaggacaagtatctttgctcttctcagcagcgcacgagctaagctcaacagctgtcgttgtccaacactgaaattttcaccagcttcagaaacctcagcatccaatcctaaagaattcctccttataacatcttttagatgagccctttccagagcctcccagaggtccgcatcattgtgctcattaaagggatccagattaaaccgaacagaacctgagaatagaactggtgcctgtggtattattcctagaactttgcgcaagtcccaaattccaaacttagaagtgtcacaatcatcaattaatattctccctcgttcaagctccacgatacggaacaaagcattaagcatgctagatttgccagcacctgttctgccaactattcctaccttctcacttccattaataacaaaagatatgccatgaagaacaggaggaagttctggtcgatatcgaagcacaacgtcttcaaacttgatgacacctgatgatggccaaccagggggtggcctatgatcctcaatgacaggaggagcttctgaaggtaactcaatgtatgttccgacccgttcaacagcatttaaactattttcagcaagactagcaagacgaagaacagctgtgagtaaattggtaatattgagagtgtaagtaagaagaagacccattgtagaagcaaaggccttctgattctctgctcgttgattttgcataacagcaaatgttgctgtaaaccatatcatgatgccacccaatgtctccagacgaatagctagccacctatttgcacccatgttcacaagtgtgaacctaatgttgttgtccattgatctcccattgatgtttgccattctatcataggctttataggcacggattgtggacagaccattcaaagcctctgaaaactgagcatacacaggagacctggtaatggaatccagacgcttcacctcgcgagatgttgcctggtaatagaggtaagctgcataaaacaaaatcaggagtggcatgatagcccaaagagacatggtgctgacaaagccgatgagaacgaaagttgagagcaactgagatatttgtgccataaacatattgacaaatacagcgacatttcggtcaatgtcacccatatccttcgaaaatctgttgatgatccgtccaagtgggtttgtatgaaaaaataccatgggagctctcaatattgatcggagcatggcatcatgaagccttttggctgcccgaagacttgatataatcaaccagcctgcgcgtgcgagtgtgactagaacctgcccaaaggaaagaattccatagatcaaattataataaccagagccatgaattttcagagaaccctcatcagtccaaatgctcaaccatgtgctacttgaaatgcgaagaacttcagtcagtgcatagcaaaagaagagtatggacaccacccatatccctcccagtgcatttttgtaacgtgaaaggaccctcgcactgacaaccccagtttccctttcctcttgcttaataaggacagattttcctggttttgttttactagaactatcctggctcttctgtgaaccttcatcagctattgtaacatcaccgttcacagtttgttttgcaacatcctttggtttactttcatcctctt

SEQ ID NO: 58917 - DNA, 387 bp, Zea mays
  Clone ID: MRT4577_153728C.1
ggggaccaaggggggtttaaagaaatttttgtttcactccaaaaaccggcaacctttttgttcaatccgccccaaaaaaattaacaattttccccgttttttttgtttaacctaaactagacacagccccgggacattaggggtttactactcccaaaactgtttttttgggggggggggggtctcaccaaaatggtctaaataaaaatgactgggtaaggggacattggagttcacccccccttattgaaaagattcaccactttttggtcctgtttggcgacccttttaaacattactgggtagacaccaatcctggtgaaacccaaaaaccgccccatgggaatggaagggtcttatgggggtttgcgattttattgggaccgg

SEQ ID NO: 58918 - DNA, 357 bp, Zea mays
  Clone ID: MRT4577_153729C.1
ctgggggccatcttttgtttcttgtgacccttatgccttttttatgcgccgcccggatctgcgccagtgggtgctcacccacatgggtgtgcaagaatgttaatatttctacctgaccacaatcccgattgaggggaaatatccccacctgacaaagatcctggacacgacgcatttgtttatggcccccaagacaaacatttttctggtaaacacgagacacttattctgtgagctctcatctcaactactgcggtcagaactatgtcctataaaaccctagaccttctctagctggagcataatcctgttttgttatgttgaaataaagccactgatcttacagtttctaaacat

SEQ ID NO: 58919 - DNA, 440 bp, Zea mays
  Clone ID: MRT4577_15372C.1
ttttttttttttttttttttttttttttttttttttgttttttttttttttttttttttttttttttttttgggggaaaattatggaaaaattttacagatttgaaccctttacccaagccaaaatttttattttataaaattaacccactttttgggaccggaaacatttaaactaataaggggttttaaaaaagtttccaaacgcgaatgaaaaaaaaattttgcggggaacttaaatttgacatgggaaaactcaattttcaggggctgagcaatgcattattgttacggctttatatttaacaaaagaaaacccatgcaaaaattgaattttccccctgaataggtgtgggtgaactctcaaaaaaactaaaaaattgtctctttaaaaaacgtgtacaacataaagattattgaaaaaccacactttctggaatg

SEQ ID NO: 58920 - DNA, 347 bp, Zea mays
  unsure (1)..(347): unsure at all n locations
  Clone ID: MRT4577_153730C.1
tttatttatctccacagccaacaccacccggcgaggctactctacaaacgccaggagtaaggaataaactcactgccanccagtgaaaacgcataagtgccaccttctcctcccatnnnaatgaactgatagcactcttttccttttattttcaccacggcaaaaaaattcttcannnccatcanctnctttctttattttattcccttttttatatttacaaggagaagtatgcaccctttgaagacattcttcgtgctgctcaagaagcaattgtgctccccccatgggttgcacttgctatcaggccaaggcctggtgtctgggattacattcgggtgaatgta

SEQ ID NO: 58921 - DNA, 277 bp, Zea mays
  unsure (1)..(277): unsure at all n locations
  Clone ID: MRT4577_153731C.1
agcacgcctttcccgaccttttccttgagngtcctttgctcactatatatgcaggtacctcgccggtcatcgcgacacctggagtcacatacgtcgacaaggcgaactgtaacagctggatcttacaccaaccaagccattcatccaactgtacgaccagaaagaaattcacttcctgacggagggacttgacgccgctgaaaacaccaccatacactacaaacagaacctatgctacaactgctcaaacaacaccaccatattgactcaatgtata

SEQ ID NO: 58922 - DNA, 178 bp, Zea mays
  Clone ID: MRT4577_153732C.1
gggagcgtacgcccacgccttcgaaatagactttcttatttctgggaagccgcacacctcctccaaaaaacttgatctttgaactcttacctcattagccctctaaaaaagggcaccctcaatgatgggttggggggagaacgcttctggggttgacaaatcaagacgattgaatggc

SEQ ID NO: 58923 - DNA, 299 bp, Zea mays
  Clone ID: MRT4577_153733C.1
cccggaccggatcttcctttccagcattgggcttcccctttttggctcacaaggcctttcctcgcctaaaaaacgggtgtcaaccaggggaaccctggggggccaaagtggatatttgaaggtttgggttaaaaccttcgggattcccctttccaactgtccggttcaacgtcttttggcctccgtcacaaaagcgggggaccccgaactctgggggggtctttggccccccaaaagactgtcaccaaaatctgaattcctccccttttattttcacttgcgcctctcctctttttggg

SEQ ID NO: 58924 - DNA, 539 bp, Zea mays
  Clone ID: MRT4577_153734C.1
tgtaagtggataaccatcaagtcctagcacagtattatagtgtttatcttaatacagtgtcagaaacaaaaacacaagagcacatgcagaaagaagggcttcgattttcggcggtttcttcacttcttgaatcttgcatattcgtaacggataatgtttcagatcagagtctcaagagaacctatacatcatgtcagtagatggcactccctttgtagtttgtggcattgcatctgcatatatatttttatccgaagaaccaaagaaccgccttcctctcaagatctagagtcccatataggaatgtaaaaatgttataggaaatccacaggattcacattgtttccacagacacttgctgcgtggttgcctgcgctgcgttgcagttgcacacggactcgaaactgccgaccaggaccgggatgaactgacagagacgttctctaatttcagaaacatggattcggtgcctgcacgagctccctgtttgacggaaccagtggtccgctcggccacctgttttccgagctgcctgcgaa

SEQ ID NO: 58925 - DNA, 244 bp, Zea mays
  Clone ID: MRT4577_153735C.1
aggtgacactatagaagagctatgacgtcgcatgcacgcgtacgtaagctcggaattcggctcgaggcaccgtcgccggatcaagctaaagcagggagacttcgcccacaaggccttcggggcgactgaatccgacatcgaggagacgctcaagcgcctcgtcttgcaactcggcaaggcgcgggaggaggtcttcgacgcgctcaagaaccaaaccggcgacctcgttttcaacggccaacct

SEQ ID NO: 58926 - DNA, 449 bp, Zea mays
  Clone ID: MRT4577_153736C.1
tgcaagtggtaacaaacgcagagtactttttttttttttttttttttttttttttttgcaatccagcgtgaacagtatggggtactgttcatctatttataggcaaccacaatggttcatacgctattacatttatgccctcaacgattacatacagagtttacaaaatatcacaaggtaacatcaccatttgtatttaataacttgagcaacaccttctccttgcattgtctcattgcttcgtcgtgacgaagcttgcttgatgaagcgtgcttcgttatacttctctttcgttataccgaagccacgttgtctacagctcaccgcccttgcatttcactttgatggctcttagtcttcttattgtgcaggctctttggttagttcccttagcagattaatattgggtgctgaaacgtacccgcgtactctgcgttgttaccactgct

SEQ ID NO: 58927 - DNA, 4717 bp, Zea mays
  unsure (1)..(4717): unsure at all n locations
  Clone ID: MRT4577_153737C.1
gncggacgggnctgcggcacncgaaanganggacganctcttggcagcacacgcctcctcctccatggcggngggcgcctcctccgacccctcgcacggctggcagacggtgtcgtatcccaagcgcaaccgcaagcaggcgcagccgccccgcaccacggcgcccgatctggcgctgcagtccaacggcaagctcggcacgaggggacgccgcgcagacgcggcggatccgccgccgcagcagttcgatcgccggcgttggcaggtgggacaccttcccttatcccctccggcgggccccgcacgctccgccccttgcggactccgaggcctgcggctccactcccatcgctctcccggttgcattcgccccaatccaaacgacaaacgccaacggttccctccattaaaagaccttcccctccctcaccagcccgggattccactcccacgtgctgctccacttgcgctgccacgttatacctctgggctgtagccatggggacgtcggggtccaagggcatcgacggcgtcggcgcagtttctggcgtcggcgctggcgcggcgggccttggcggcgtcggcgccggcggggacgggggcgagggcgccgccgcggaggcgtggcatggcggggcgcagctgtacgtgtcgctcaagatggagaacgcgttgatcagcggcgacctcgtcccgcacgtgtatggctccgagcccatcatcggcacctgggacccctcccgcgccctcgccatggaaagggagctcgcgtccatgtgggtgctcagcttcgtcgtgccgccggaccatgaaacactggacttcaagttcttgctgaagcccaaagacgctgaaaccccgtgcatcatcgaggaaggacccacacggctcctcaccggaggcatgctagagggtgatgtgagggttgcactgttcaagctcaatggagatgatgaggtgctcgagtttggggtggtcaacaaggcggaccttgtatcaccgctcgaacttgctgcaagctggagggtgtacaaggagaactttcagccttccaaagttcgggggatccctgatatcagtatcaatgtcacacccactaatggagctgaggaaggatcagcggctactttggaacttgacttggaacattatgttgttccgtccccgccaactgcaccaccaaatggatatgctgcaaaccttgctgcgactccagcatccgtgattcaaactgaggcattgttgacaaatgatatccttctaagtgatgggattcagagtccaagtagtgtttctgcaaaattagaagattgtactaaccacaagaatattgaggcctgggcaacagattcttctaagaaaattcagaattccggactcattgaatcaaaatcagttggcacctttacaccaatgcaaaagctagatggtcaaaaggggctgttcgttgacaggggtgttggctcttctatgcttccaaaatcagccagtgcatgctccttggcatctgggtttagttttggatcagcaaagacaatgccagaagcagcaggagctgttgcagctgcagctgtagctgatcgtttgcatgggtcaaaggaggaccggaagctggccattgttttggttggcctaccagctcgtggtaaaaccttcactgcagttaagcttacaaggtaccttcgttggttgggccatgaaactagacatttcaatgttgggaagtatcgccgtcttaagcttggagcaaatcagtctgcagattttttccgtgatgataatcctgaaggtattgaggcacgtaatgaggtggctgctttagcaatggaggacatgatagattggatgaatggtgggaggtcaggttggtatatttgacgcaacaaacagcacaagaaagcgaagatatatgctaatgaaaatggctgaaggtaactgtaagattatatttttggagacaatatgtaatgatccaaacataattgaaagaaacatacggctgaagatccaacaaagtccagactatgctgaacagctagattatgaagctggactggaggacttcaaggaacgtttgattaattatgaaaaggtctacgagccagtaggggaaggttcttacatcaaaatgattgacatggtaaaggggcaagatggtcagttacaggtaaataatatcagcggttatctccctgggaggattgtcttcttcttggtgaactctcatcttacaccacgacctattttgcttaccaggcatggtgagagtttacataatgttagaggaagagtcggtggtgatacagttctaagtgaaactggcgaactttatgcaaagaaactagccaactttatagaaaagcggctcaaatgtgagaaaacagcaactatatggaccagtacccttcagagaacaattttgacagcaagtccaattgttggattccccaagatacaatggcgtgctcttgatgagatcaattctggagtgtgtgatgggatgacttatgaagagataaagaaaatcatgcccgaggaatttgagtcacgaaagaaggacaagctaagataccgctacccccgtggagaatcttacctcgatgtgatacagaggctggaacccgtcatcatcgagctagaacgccagcgtgcaccagtggttgtcatatctcatcaggctgtactgcgagcactgtatgcatatttcgcggaccgtcctttgagagaagttccagagatagagatgccactacacaccataatcgagatacaaatgggcgtcacgggtgtggaagagaagaggtacaaactcatggactgaatgaatacataaaagcagctggttggctgtttcatacagcaagtacacataacacagaagccttttcccttctctctctctctccacacggtgttcagtgtaatttctttggaaaaaagacatgttgaacattgtaaagaaaaaactaataaggaactgtaaaaatggcatgcttactgtaacgaataaggaatacagactgggggtctccaatgcttattcagaaacatattccgtcaaaaaagttgatcctgtggctgatgatcggaccaatgaaccgtgagannnnnnncggacgtgcatagatagcatcgtgtctgaattgtcaggtccatcagctggccctaagggttcaaagaaggttgcacaacagtctccaagggcccaggttgcaatctttgttgttcttgccatgactttaagaagaaagcctgatgtactggtaaatgttatgccaaagataatgggaaacaataaatatctgggacaggaaaagcttcccatcattgtctgggttattgctcaggcctctcaaggtgacctagtgtctggcatgttttgctgggctcattctctatttcccacattatgtgcgaagtcaagtgggaatccccttgcaagagatttggttttgcagttgcttgaaagaattttgtctgtcaccaaagctcgttctatattattgaatggtgctgttagaaagggagaacgcttagttccccctgtttcatttgacttgttcatgagagccacatttcctgtttctaatgctcgagtgaaggctacagaaaggtttgaagcagcctacccaataatcaaggagttggctcttgccggtcctcctggctcaaaaactgtgaaacaagcatcacaacagcttttacctttgtgtgcaaaagcaatgcaagaaaacaacgcagagctcaccagggaggctgttgatgttttcatttggtgcttaactcaaaatgcagagtcgtacaagcagtgggaaagaatttatcttgaaaatattgaagccagtgttgctgtcctgagcaaagttgtgattgattggagggatgtgtctcctaagctcagttctgaagctctcaaggcaacagtgaagaactttaaggctaagaatgaggctgcgctggagtccacaacagatgctggaaagcaggcatctatcaaagaagcagacaagcactgcaaagtgatctttggaaagctgacccgtggcgccacctgcctgaagagcagcctggtggtcatcgcgctcgctgttgctgctagttacgtgctgtctcctggcatggacctcgagaaggtccaggcgatggtctcatcgcacctgtcgttctaaacatacctgtccagaatctccagacgtggatctaaattatacgagccatccaaaggggatggctcactcatcagtgaagagagctcagggggtgagaataagagggggataggcgctagaaccgaaagggtacagtttcctgagttgcctttttttatttttcccgcgtctcctcgagcagcagtgcgtgggaggagacgcagtcgactttgcagggagttggttaatcggtagactgatgggtgcgaagaaggtcaagtcaaacggctcaaccagaggattaacacctttgcttttctctttctgcatctgagatgattgcaaacagttttggtttaaaaattaagaatcttgaatcgtattcggtgctgtgtgcttgtcggctaaatgtatctgttgcgttgatatccgattaaattgcgtgttgtgatgcctgaaggccttttgaaacatgttccatttttttggacgccggaggtgtgatgtctgatgttggagcgtgaagatcttttgaaatatgttgcattttcatatggtttttggacgag

SEQ ID NO: 58928 - DNA, 1326 bp, Zea mays
  Clone ID: MRT4577_153738C.1
gtctggcatgttttgctgggctcattctctatttcccacattatgtgcgaagtcaagtgggaatccccttgcaagagatttggttttgcagttgcttgaaaggctacagaaaggtttgaagcagcctacccaatgatcaaggagttggctcttgccggtcctcctggctcaaaaactgtgaaacaagcatcacaacagcttttacctttgtgtgcaaaagcaatgcaagaaaacaacgcagagctcaccagggaggctgttgatgttttcatttggtgcttaactcaaaatgcagagtcgtacaagcagtgggaaagaatttatcttgaaaatattgaagccagtgttgctgtcctgagcaaagttgtgattgattggagggttgtgtcttctaagctcagttctgaagctctcaaggcaacagtgaagaactttaaggctaagaatgaggctgcgctggagtccacaacagatgctggaaagcaggcatctatcaaagaagcagacaagcactgcaaggtgatccttggaaagctggcgcgtggttccacctgcctgaagagcagccttgtgggcatcgccctcgcagttgcagctagtctcgtgctatcatctcccgatatggaccttccgctcgagtgggagaagatccaggcgatggtctcatcgcacctgtcgttctgaacatacctgtccaggatctccagacgtgggtggatctaagtcatggatggctgactcagcagtgaagagagctcaacgggtggtgagaataagagggagggggggggataggtggtagaaccgaaagggtatagttttcatgagtcgccgtttttttcccgcgcttcctccagcagcagcggtgcatggtaggaaggacatgcagtagtcgactttgcagagagttggtttaatcggtagactggtgggtgcgaagaaggttgagtcaaatggctcgaccagaggattaacaccttttgcttttctctttgtgcatctgagatgatgttggcaaacagttttggttatctagaatcttgaatcgtattccgtgaaaaaaaaaaaaaaaagcggcctgtgtgcttgtcggctaaatgtaaaaaaaaaaaaaaaaaaaaaaaaaaaaaaaaaaaaaaaaaaaaaaaaaaaaaaaaaattttaaaaaaaaaaaaaaaaaaataaaaaaaaaggggaagaaatttaaaaatataataagattatttaaagattaataaaaattattggggggggcccttttaagggatcaaatgttttggccgggggcttggaaatatattttttttttttgggggcccttaattt

SEQ ID NO: 58929 - DNA, 608 bp, Zea mays
  unsure (1)..(608): unsure at all n locations
  Clone ID: MRT4577_153739C.1
gggtgttgtgtggggtttttgtgcagcattatattccgaagaaaaagggtttgggagaaacccatacaacacatactcactcactcttaaaagacaaatacatgcacctgtgattacaagaacacgggctcgacctagatatctcacacccaggggggggggacaactcctcactaatgaatgataacactccagctagagtaggacaagcttcatcgaagacatattgattatgatgaatccaaattgagcatgatcctttgctgatccaaaactaaacccagatgccaaggagcatgcactggctgattttggaagcatagaagagccaacacccctgtcaacgaacagccccttttgaccatctagcttttgcattggtgtaaaggtgccaactgattttgattcaatgagtccggaattctgaattttcttagaagaatctgttgcccaggcctcaatattcttgtgggtagtacaatcttctaattttgcagaaacactacttggactctgaatcccatcacttagaaggatatcatttgtcaacaatgcctcagtttgaatcacggatgctggagtcgcancaaggtttgcagcatatccat

SEQ ID NO: 58930 - DNA, 150 bp, Zea mays
  Clone ID: MRT4577_15373C.1
agctcattgtctggctgaacttaacaccatgccatacgaaactatatgcgagcgctctaaatatttagcgggtttatttaacattgcaaccaaacacattaccgtcggctgcaatcacaatattcaagaaaatatgtgatcatacacttc

SEQ ID NO: 58931 - DNA, 169 bp, Zea mays
  Clone ID: MRT4577_153740C.1
ttttgttgggtttaaaggaacctttggtcctataaacggaaaacaatgcaacgctgacggagctgatacagggcaagaccccggcagcactaaaaacttgagaagggaacccccccccagaggctccaaggtaaaccccatgactaccgtacaggggggagggctgtca

SEQ ID NO: 58932 - DNA, 367 bp, Zea mays
  Clone ID: MRT4577_153741C.1
cgaaaaaaatttcaaccaattttttgtttttttttaggaaacccatgccggtttgggggccccattttcgagtcccttttatttgtaatttaaaagagggcccctccaacgatgggttgctgccttgacaagacaggtttttttaaaaaaaaccggttgtttggcaacaattgttgcttttttaagaaggcaaccaccaatgggttaccccctgccaatggattaaataactggtggcgctgttggagggccccaacaaagttcgacataattagttggttgaatggaaacatcttttgcaagtaggcaacagggtttgccacaattagctgagttaaagctggtacaatttgttgcaacaattttt

SEQ ID NO: 58933 - DNA, 1421 bp, Zea mays
  unsure (1)..(1421): unsure at all n locations
  Clone ID: MRT4577_153742C.1
gccggccgggccggggtcctcgtctctctcacagctgctttcttccttcctgttcctgctcgtcgcctctcgaaagccaggaggagtctcgcctccccctcctcgcgcgcgtggcagctatggcgatggacgacctcgcgggcgcctcctcctcctcctccatggcggcggccgcctcctccgacccctcgcacggctggcagacggtgtcgtatcccaagcgcaaccgcaagcaggcgcagccgccccgcaccacggcgcccgatctggcgctgcagtccaacggcaagcctggcggcgtcttcgacgccgtcgagaagcgctcccaggagcgccaccgcgcgctgcagcagcagctcgcctccagggcggccgacctcgacgacgcgcggatcgccgctgccacgggcgccgcctactccgacgacgacgactccgacgaggccgctgccccgcgccaggagggagaggtcaagaagcctaagaagcccaaggtgaagaagccgaaggtgacggtcgccgaggccgccgtcctgatcgacgccgagaacctcgcagcgcacctcttcgagatctcggcatcgtacgagaatcaacaggacattcagctcatgaggtttgctgattactttggccgggcatttgcagctgtgagcgcatctcaatttccatgggcaaagatgttcaaagaatcaacagtgtccaagatggttgatatcccattgtgccatatatctgaggctgtgatcaagactgtgagtgattggatcagtcaaagatcttctgatgccctgggagactttgttttgtggtgtatagatagcatcatgtctgaattgtcaggtccatcagctggccctaagggttcaaagaaggttgcacaacagtctccaagggcccaggttgcaatctttgttgttcttgccatgactttaagaagaaagcctgatgtactggtaaatgttatgccaaagataatgggaaacaataaatatctgggacaggaaaagcttcccatcattgtctgggttattgctcaggcctctcaaggtgacctagtgtctggcatgttttgctgggctcattctctatttcccacattatgtgcgaagtcaagtgggaatccccttgcaagagatttggttttgcagttgcttgaaagaattttgtctgtcaccaaagctcgttctatattattgaatggtgctgttagaaagggagaacgcttagttccccctgtttcatttgacttgttcatgagagccacatttcctgtttctaatgctcgagtgaaggctacagaaaggtttgaagcagcctacccaatgatcaaggagttggctcttgccgntcctcctggctcaaaactgtgaaacagcatcacacagcttttactttgtgtgcaaagcatgcaagaaaca

SEQ ID NO: 58934 - DNA, 532 bp, Zea mays
  Clone ID: MRT4577_153743C.1
gggggggtgtgtttttttttttttttttttttttttttttttttttttttttttttttttttttttttttttttttttttttttttttttttttttttttggggagccgggggcatatcaaaaacaaaaagaaaagggggggccccccccggggggattaacacccgggggcattgcacaatcttaaaacccccaaaaacaggtttttatcccgggaaaaaaaaaaacggggtgcaaaaacccaagacttggcattgcccggggggggggggcccccccctacaggggagggggcccctcggggggccccgaaaaaaccgggaacaggttgttccccaagggggccctgaggggcctggcaagggtccccacggggccctccccggggacctaagcccggataaaaaaggccaacatggaaaaaaagggcagccggccggtcttgaaccccttaaccctgaggaagggggcccgggcgggggccctggccaagcccaggggggcaaagggcccaccggggggcaacttggcc

SEQ ID NO: 58935 - DNA, 432 bp, Zea mays
  Clone ID: MRT4577_153744C.1
atcgaaaaaaatctcaaccaattttttgtttttttttaggaaacacatgccggtttgagggccccattttcgagtccatttcatttgtaatctaaaagatggcccctccaacgatgggttgctgcctcgacaaaacaggatttataaaaaaaaaccggttgtttggcaacaattgttgcttttttaaaaaggcaccaaccaatgggttacccactgccaatggattaagaaactggtggcgctgttggaggcccccaacaaagttccacatatttagttggttaaatggaaacaactgttgcaaataggcaacagggtttgccacaactagctgagttaaagctggaacaatttgttgcaacaatttttgttgcaggtttttaggggcattggccacaaggagggggctaaataaaaacattttttgctttt

SEQ ID NO: 58936 - DNA, 1508 bp, Zea mays
  Clone ID: MRT4577_153745C.1
tgttgcagctgcagctgtagctgatcgtttgcatgggtcaaaggaggaccggaagctggccattgttttggttggcctaccagctcgtggtaaaaccttcactgcagttaagcttacaaggtaccttcgttggttgggccatgaaactagacatttcaatgttgggaagtatcgccgtcttaagcttggagcaaatcagtctgcagattttttccgtgatgataatcctgaaggtattgaggcacgtaatgaggtggctgctttagcaatggaggacatgatagattggatgaatggtggaggtcaggttggtatatttgacgcaacaaacagcacacgaaagcgaagatatatgctaatgaaaatggctgaaggtaactgtaagattatatttttggagacaatatgtaatgatcctcacataattgaaagaaacatacggctgaagatccaacaaagtccagactatgctgaacagctagattatgaagctggactggaggacttcaaggaacgtttgattaattatgaaaaggtctacgagccagtaggggaaggttcttacatcaaaatgattgacatggtaaaggggcaagatggtcagttacaggtaaataatatcagcggttatctccctgggaggattgtcttcttcttggtgaactctcatcttacaccacgacctattttgcttaccaggcatggtgagagtttacataatgttagaggaagagtcggtggtgatacagttctaagtgaaactggcgaactttatgcaaagaaactagccaactttatagaaaagcggctcaaatgtgagaaaacagcaactatatggaccagtacccttcagagaacaattttgacagcaagtccaattgttggattccccaaggtatttggttacacgatttaggagtcttcttaaagaactgttgctatgtaagtacagcaagattgctcgacttgtgttatttgtagatacaatggcgtgctcttgatgagatcaattctggagtgtgtgatgggatgacttatgaagagataaagaaaatcatgcccgaggaatttgagtcacgaaagaaggacaagctaagataccgctacccccgtggagaatcttacctcgatgtgatacagaggctggaacccgtcatcatcgagctagaacgccagcgtgcaccagtggttgtcatatctcatcaggctgtactgcgagcactgtatgcatatttcgcggaccgtcctttgagagaagttccagagatagagatgccactacacaccataatcgagatacaaatgggcgtcacgggtgtggaagagaagaggtacaaactcatggactgaatgaatacataaaagcagctggttggctgtttcatacagcaagtacacataacacagaagccttttcccttctctctctctccacacggtgttcagtgtaatttctttggaaaaaagacatgttgaacattgtaaaggaaaaactaataaggaactgt

SEQ ID NO: 58937 - DNA, 404 bp, Zea mays
  Clone ID: MRT4577_153746C.1
aaaaaaaaagagacttgtatattacattcaaatgtaccaaatattacataaattacacttaaagtggttttcctaataacacctaggctttttttaaaattacttcggcagccttatttaaaagctgtccaaaaactttatacacaaaagttgcggccaatttgataatttcggcaaccccttttgggggaaggccaacaaacaatccagcatgttttgagggaaaagaaaattttggctttactattacaaaccgcgaacaaagtttagaaataaaaattacaacacggtacaaactattaaaaaaaacctaattgaccttctggctttgggtttttttcaacaggcctagccatttttttagtatagggaatgcccttttcaattctttgaaaaaatatttc

SEQ ID NO: 58938 - DNA, 397 bp, Zea mays
  unsure (1)..(397): unsure at all n locations
  Clone ID: MRT4577_153747C.1
gcaccgaatacgattcaagattcttaatttttaaaccaaaactgtttgcaatcatctcagatgcagaaagagaaaagcaaaggtgttaatcctctggttgagccgtttgacttgaccttcttcgcacccatcagtctaccgattaaccaactccctgcaaagtcgactgcgtctcctcccacgcactgctgctcgaggagacgcgggaaaaataaaaaaaggcaactcaggaaactgtaccctttcggttctagcgcctatccccctcttattctcaccccctgagctctcttcactgatgagtgagccatcccctttggatggctcgtataatttagatccacgtctgcccacgcgtccgcccacgcgtccgnccacgcgtncgnggacgcgtggg

SEQ ID NO: 58939 - DNA, 779 bp, Zea mays
  unsure (1)..(779): unsure at all n locations
  Clone ID: MRT4577_153748C.1
gaacccnnnnnnnnnnnnnnnnnnnnnnnnnnnnnnnnnnnnnnnnnnnnnnnnnnnnngaccatagacctcaaacgttttttttttttttttttttaacccagaaatgtaaattttgggtccaattacgtagacctcaacagcatacatagcagagaactgccagtcgctactctaattagcagcaaataatcgctaccggtacatttaacatgaggaactaaaatatactacctcattcctcatacaaaatatctcgatataaccagctactaatgacaaggttgaactacaactgcatatcacaatactataaagtacagcactgatatttgtgggacgacttgtaccagcttaaaaggattctctcttcttcttgttcttcgattgcttggccaggagaacagaaagcccagtcaatgcaaacttcttcctcttccccgaaattcttctgcgagcagccacatcctctctgcacagaacaccactcctgtttataatctgaccgagcgagatctccggtatctcgcctgttttgtcatcccaaacactcttgtcgtacccatcaggtcccattagcttcatgctcagtatctgcccgatcgacaatgttggtttgggtggtctgtctgaagcatcagagatcatatccgtggcgtgcgaatcttcgcgacggtgagctgccgcccttttgaatcttggggagccaccaagagaccgcctcttgtgcccgctctcagatttccatctacgaagaatctcttccaccgcaaacttcc

SEQ ID NO: 58940 - DNA, 158 bp, Zea mays
  Clone ID: MRT4577_153749C.1
acaaaggccagtaaacccacaagatcctcccctagacccatttacttgtgcatacactaaccaaccaaaaaggcagagacctggtgaggcatcacaaaattctagtgatccacgaaactttgagcatattggtgtcatgttcaggttctgggattgaa

SEQ ID NO: 58941 - DNA, 292 bp, Zea mays
  Clone ID: MRT4577_15374C.1
ctcctcaccatggactggacctggaggatcctctttttgcgtggcagcagccacaggtgcccactcccaggtccaactggtgtagtctggagctgaggtgaagaagcctggggcctcagtgaaggtctcctgcaaggcttctggatacaccttcaccgactactttatgaactggatgcgcccagcccctggacaaaggcttgagtggatgggatggatcaacgctggcaatggtaacacaaaatattcacagaagctccagggcagagtcaccattaccagggacacatct

SEQ ID NO: 58942 - DNA, 262 bp, Zea mays
  Clone ID: MRT4577_153750C.1
cgtattgcatatctgttctgagttcttgattcctgcagcggacccagagtcttttggattctaagcttggccaagacgagcatagtagtcatcagaagatataactgaaggttcatctgaatggcactgtgctggtgcctgtattcgagcttggggagatgacatatttatgatggtaatacgtgaagcctatctctttggggggtgtacagctagtgggactgagagcagtgcaagacatagtaagagtgtctgagctgca

SEQ ID NO: 58943 - DNA, 541 bp, Zea mays
  Clone ID: MRT4577_153751C.1
cttaaaaaaaaaaaaaaaaaaaaaaaaaaaaaaaaaaaaaaaaaaaaaaaaaaaaaaaaaaaaaaaaaaaaaaaaaaaaaaagtttgaccttaggccggttacccccctaggggcgatttttgcgggtttcttttcccttgttggcccggtggggggtgctttttgggggccctttttgccctttcgtgggccgttttacttttcattggccttctttttaccccggggggtttgggaaacccttggggttgcccccttttttccctttgcggaatttccccttttcgccggctggttttttagcccaaggggcctgccccgttcgcctttcccatcggtttttcttcctgtttggcgattggccttcccttgtgggggggctttttgtgcggggggtttgggggttccccccagggtaaccgttccccttgcctgggcctttttcccccctcttttcgctttctttttttccttttttcccccgtttgccggctttccccgccaggtttttagttgggggtttctttgggggttcctttt

SEQ ID NO: 58944 - DNA, 633 bp, Zea mays
  unsure (1)..(633): unsure at all n locations
  Clone ID: MRT4577_153752C.1
agccggccgnggatctcatcttcttgccataagctcaaatactgatctcactgatccagtatggctatgggaaaggcaggcgcgccgagggcgtcggcggcccagctggcggctctcgggatatcgctcctctgcgctgtcgccggcccggccgccgcgcataactgcgactgccagacaaacgtctgctgcaacaagatcggttactgcgacacgaccgacgagtactgtggagacgggagccaatcggacccgtgccgctcggacggcggcggcggcggcaaaggaggcgatgaagcgaacgtgactagcgtcttcaccagctccttcttcaacggcatcaacaaccacgccgggagcggtgtgcgagggcaagaactgctacacccggagcgcgttcctgagcgacggcaaggagtacccaagattcgcccatggaggcacacaagagcacggtaagcgcgagatcgccgtcttcttcgcgcacgccacgcacgagaccgggcatttctgctacatcagcgagatcaacaagagcaacggctactgcgacccgaccaacaggcagtggacgtgcgcctcggggcagaagtactactggtgcggcccgctgcatatctcgtggaactacaa

SEQ ID NO: 58945 - DNA, 797 bp, Zea mays
  Clone ID: MRT4577_153753C.1
ccggccggtcgtcgggtgcggtggcgagcgagacgcgggtgccaccaccgttcaccgtcgacggcacctgacgatgacgtacgtggtgggccggggaggaagggatcactgggctgggctggcccgctgctctcgacgtctagagtacaagtgaagcggtgtcgctagtcgctaccgcgtggcgacagggacaccgggcgatcggggccattacccagccagaactgaaaattttcagggtcgaaggccttcagaacaaaggggggcaggcactagaagcagcggtcaggatcagcaaaagatgccaagatcttatctatcatcaggtaaaggaagaccggattttcacacagaacattcaacgtgatctctcagtgcagagaagatatataataggcctgcatccttcttttccctccagagaaattttttttttcatatgtaaattctttcttccgtatttattgttcagaaacaaaaacagttgttcaggagttcgttcgttcgtcagaaaaaaaaaaaaaaaaaagcggccgcttttttttttttttttttagtagacttaataactcaattgcattgctagtacgtacgtacgtacgtatgtactacagtagtacgtagggctcgtttgacatgctgattgatgatgattaattaatatctgcatgcatgcattgtagaagaaaggaaatgggaggtagcttaggcatgcatgcatgatgcatggatgcatggggccttaattaattctccacggccacggggtcgtcggtgatgatagcttgaaccctctg

SEQ ID NO: 58946 - DNA, 2281 bp, Zea mays
  Clone ID: MRT4577_153754C.1
gccggccggggcaaaacccgagcctcgcgacctgcttacgagacaagtaatttacgtgcgtcgagttccatctggccttaaacccaccccggcatcgggcacgccgcacgccacgcctcaccgagtcaccgtcccagtcagctacccttccccctaccaattccaaatctctcacccggcttgaggatggcggcgcaggtggtggcagcggcgggcaccccggtggccaggccgctgggcggcggatctggggccgacgcgctccggccagcggcaacgatgccaagggagagaaggaccggtgctgtggccgcgagaggacgccgcgagtctcaggtggtatccgtcataagccgcgccccacgccccgatgccggggtgctgccggtgtcgcccgacgacgacgcggccgtaaaggaagaagcaaacttccagcaccttaaggctatccagcaacttgcaactgcagcaaatggcgtgtggtctaaaccaaatgtaaggcgcaagacaaagattgtgtgtacaatcggtccttcaaccaacacaagggacatgatatggaaactcgctgagactggcatgaatgtggctcggcttaatatgtcacatggagaccatgcatcacaccagaaagttattgatctggtaaaggagtacaatgcatcacatgctgacaatgtgattgctatcatgcttgacacaaagggaccagaagttcgaagtggagatttgcctcaaccgatatttctggaaagcggacaagaatttacttttacaatcaaaaggggagttgggactgatacgtgtgttagcgttaactatgacgactttgttaatgatgttgaagtgggcgacatgctccttgtagatggaggaatgatgtcattcttggtcaaatcaaaaactgaagattctgtgaaatgtgaagttattgacggtggtgaattgaaatctaggcgccatctgaatgttcgtggaaagagtgcaaccttgccatcaataactgacaaggactgggacgacattaagtttggtgtggataatcaagttgattactatgctgtttcttttgtgaaagatgctcaagttgtccacgaactcaaggattatctaaaaagttgcaatgctgacatacatgttatcgtaaaaatagaaagtgcagactccatccccaacttacattcaatcatcacagcatctgatggggctatggttgccaggggtgaccttggagctgagctgcccattgaggaggtgccgctgttgcaggaagaaattattagaatgtgcaggagcatggggaaggctgttattgttgctacaaatatgctcgaaagtatgattgttcatccaactccaacccgagcagaagtttcagacattgctatagctgtccgagagggtgctgatgcagttatgctttcaggagaaactgcacatgggaaatttcccttgaaagctgttaaggtcatgcacactgttgccctgagaaccgaggcaactattcctggtggggaaacacctgcagaccttggtcaggctttcaagaaccacatgagcgaaatgttcgcataccatgcgacaatgatgtcaaatacccttcgaacatcaatagtggttttcactaggacgggatttatggctatactgcttagtcactaccgtccatctggcactatttttgccttcacagacgaggagagagttaggcaacgattggctttgtaccaaggtgtatgtccggttcaaatggaattttctgatgatgctgagaagacatttggcaatgctttgtcttatttgctgaaacatggtatggttaaggacggtgaggaggttgcacttgttcaaagtggtaaacatcccatctggagatcacaatcaacacacaacattcaggtgaggaagatctgatgcggaacgcacatagtattctgattgttggaggacatcgtttcttctagcaaaccgcaaggtcttgttacaatgaaactacactggtagtaagtactggtattggtgagatagttggtgctgagctagtgttgtgattctttttcttacttgtgcactagtgctgttttccttccgtgtaaaaaggccaatccaattgccgcttggttttagctgtagctttggaaactgtaggcttgttgttgtaatacagttcgttctttgtcaatgttaaggacttttgcctcgagagctaggcataactcgaagctcaccaaacagcaatctacctgcaaattgcaacgcattttgcgtatttaaagcggcc

SEQ ID NO: 58947 - DNA, 508 bp, Zea mays
  Clone ID: MRT4577_153755C.1
gggcctcttgtcttcattggtgaatgggttaatgaatgggacgtgcaaaatgcatctcagtatgagtatcagaagtttggcagtgctcagttggatgtttatgccaacgctacctttgggtggtcgtactggacacttaagaatgacatgatccattgggacttcgagtggaatattaagaataagtacctattattcagtggttcatccatgctgaagacaccaagcttcctgctgctgctagcgttaggatggggaattcacctgatcatcatgccaagataacctggattctaggaactaagctgattggaagtgtggatgtacacatagactactcaaatccgaattatagttgaggcaaaattggtgcatatatctttcttatataaagtcatgtagttgctcctaggtttctccagtttttttatgaaaaaaaaagaaatcctggattactcgaacatctcgtagcacaccttcgtaatgcaatatgttactcagctgacgg

SEQ ID NO: 58948 - DNA, 423 bp, Zea mays
  Clone ID: MRT4577_153756C.1
atcagcagcttctgcttgctttgtgggggaaggagagagagagagagagagatctaggggagaggctagtaggtggtcctcgaacgaagatgttggcggtgttcagcgctcaggtggtggaggtgccggccgcactgctggcagctggcagccggacgccgtcgcccacgacgaaggtctctcatctggtggtcgcgcttcctggccgcctccgagcctgccgtgtccgtgcagttcggccaccacagtcacctcgcctacttccacaccaaccacgcgctcctacgccccaggtcgttcgcggcccaggaccaggtgttctgactgatcgagcgggtgctgcacaccctgagtcgtctgaaccatgcacacgggctgtcatgcaagggcgccaacgaggtgctcctagccatggatgcctac

SEQ ID NO: 58949 - DNA, 229 bp, Zea mays
  unsure (1)..(229): unsure at all n locations
  Clone ID: MRT4577_153757C.1
caggaaaggggatccaggagacccctctgggggaagagggggccctggaatcaccctacttctcgctggtccttttggggggcctaaaaaaaaatagcctggccaccagcactcaggggagaagagcagggaggggaaatgctttagaaaaaatagctctctatatacaccgtggaatatttatagcacataaattagggatgatccgacccccggctgnggagcccga

SEQ ID NO: 58950 - DNA, 300 bp, Zea mays
  Clone ID: MRT4577_153758C.1
gccacaaaaacaataaccccaaaataaaacaaaattttttcttgaattttaacaacaacaacaacaacagcgttaccttttaactacacaaaaaaattttttttgtcaagcattcaacatttacaccaccaaacccctgccttggatcccatatcaatttatacaacaccaccagtaggctttacaaactttcaaaaacacactacacactttataaaccgaaaggaccaaacaatcactggctgacgtttttaacttttttctcggtctcacttgaaaagctttttaaactccaaaaca

SEQ ID NO: 58951 - DNA, 1924 bp, Zea mays
  Clone ID: MRT4577_153759C.1
aaaacgggaaaaaggataaaaaaaaagtggggaaaagaacgccgggaatgggcaagcagcagcaggcgccaccggcgcggcggtccccggcgatgtcggcgcctccgccgccgaagcgccggaagaagaagggccgcccgtccctgctcgacctccagaagcggagcctccgcctcgagcagcagcagctaccccaggggcgccgctccaaccgcaggagcgccggctccgcggacgaggacgacgatgggcccgcctccggctccggccgccgcgagaagaagctgcgcctcgtcatgggcctccacgacggatcagccaagggagaaaagatgaggaaagcgacggatgggcgtgaagagccgtcagattccgggcccacaacacctttaccgaacaaaaagttgttgctcttcatcctcgacaggctacagaagaaggatacgtatggtgtattttcagagcctgttgatcctgaagagctacctgactatcatgacattataaagcatccaatggatttttcgacaataagaaagaagctcgataaggaggcctatttcaacttggagcaatttgaggatgatgtgttcctgataacctccaacgcgatgtgttacaattcaccagatacaatatactatcgacaggcacgaggtattcaagagattgctaaaaaggattttgagaatcttaggcaagatagtgatgccagtgaaccagaaccggaaccagaacgagaacccaagccggagcccgaaccagaagaaccaaagccacagcctcgccggggcaggcctccaaacaagaataatgccaaacagaaagttgggaagccaccagcagaacgtgccactgcagacttttctggtgcaacacttgctactgcggcaaatattggacggcatgcacaggcagatgttgatctgtcacgaagagtaatggataaagcgatgattgcggatgtgttgagagcttcttttgccaacctaaggaatgagcacaactggtctggtgagcggaagtttgaaagacttgaagcttactcaggttatgggggtacatggtctgcaaaaacggggaagaggccgattctgatggaagatagtcgccggagcacatattatgagactcaaccatccagttcaatatatgagctgccggtatcgtcctcctacaatgggaccgagaagctgctagtaccagttggggttcagttaccgcagtcctattcccacagcctggcacgttttgctgcacaacttggccctgttggctgggaaattgcgtcaagacgacttgaacggagccttgctcctggaacaaagtttggtcgtggctgggtaggagatggtgaaacgccgccgaacccatttcagacacctgtactcgctgcattttcagaaacaatggcaccaccgagcagtatagcagcatcaggtgagcagccatctatgaagtcccccacgcacaagcaagcctgcactggcagcataagccataggttgggatctcccgagctgaacgtacccttgagatgaaagggcagccccaataatcttcacggacacccaggcatgcagcaaactgcgaatggtttcaatgatgttccaggaccaatgatgttcccacatgtggctcaactggtggtgaatcagatgcagacacatacggctgattgataatgttgtgtgtgtgccagggggtcgggtcgcctttgatccgtcgcgcctcaacctgaggctgcaactgtgagcctgttgtgtaattgcttaagtagttattaggatgatagcatgcatagatgtgttgggtggatgctgtaacagtggtgatcggtgagttgcgattctgaatgtgtagcagaaaaaaccacagccgaaatgaaacatctgtatagattatcgaggatttttttagcatg

SEQ ID NO: 58952 - DNA, 329 bp, Zea mays
  Clone ID: MRT4577_15375C.1
ttccaggcacaatcattgtgaccacagacagtgctcgattgatggacttacatttatgtgataacacggaggagaggaggagatgaccacacggatacatggctgaagtcgaggcatatgttccacagggggtgcaaccccaccatcaggtggacatggtccttatcgacgagagctacgctaggggggccgtacccagcggtgcatccactggaatatatgacgccttggagttgagggatggaggatcttaatatcttggcatagggtgttgttaaggctgagagaaatgtaaataacatttttgtaccaatcaattgttaggaagg

SEQ ID NO: 58953 - DNA, 195 bp, Zea mays
  Clone ID: MRT4577_153760C.1
aatccacactgacattgagttgcatttcttgaggtaacaagcgtactctgacagggagacggcgagcgagatggtttatagggcaaccaactctgaagtggctggccgcgtgctcacatccctcttactgaaagaagcgtagcttcagctgattcaattggactgctacagatgcacctatcgcatgctggagta

SEQ ID NO: 58954 - DNA, 497 bp, Zea mays
  Clone ID: MRT4577_153761C.1
ttttttttttttttttttaaaacacaacagtcaatatttggggttagctttgaaagcaatatcacaaatgatacaattgcagtgtgtctgctctgactcttctaacaacatccactaatccatccagtctacggggtcggcttaggcgtcgagcttgacggggaagtttccggcctcgcgctgctcgtcccagcgctgataccagccggaggggcacagagatcggtaagacagccagaactggcggcaaggcgcaaagtcctcacccttggcgagaatgcacttgtggtaatcgacgtagttttgccagcagtgcttggtctggttctggttggggaaacgggcgtcagtgccagcagtgacaaacttgaaaggcttggtgacaagctcctgaccgtcgtccgacattgtgaatggcttttaagaggaattgacttggaggaggggagattcttctgtggtcaatgacggcgagtatggagctcggtgcgtttagg

SEQ ID NO: 58955 - DNA, 350 bp, Zea mays
  Clone ID: MRT4577_153762C.1
ctcgagccgctcgagcggctcgagcgccaggagaggacccactatttttggagagcttcccacgcccacgccttcccatacatgagaaagaactgtacacactgccctctaagcatctgggcaacctgttcttccaaccttatatatctttaaagacaaactcttccaacgttctcctcaaaactactctatccaaaaaatccaccatcccctctacgttgttacaaaatattcatttccgcatgtcattcttttcagacatctttaactttctttctcaagaattattcgaattaaatacctgatctcacccctaaatcattcaattacatctttggaccaaatttttg

SEQ ID NO: 58956 - DNA, 607 bp, Zea mays
  unsure (1)..(607): unsure at all n locations
  Clone ID: MRT4577_153763C.1
tccccacgacgagatccatccaccccagaggccaagaagagaagggaggagagagagaggccggcggcggcggaggatcagacgatcggagatggtgcggaaggcgaaggttgagttcgacgagaggccgccggatgacttcgacccgaagaacccgtacggggacccggtggcgatgctggggtacagggagcacctggtgcgggagaagtggatccagatcgagaccgccaagatcatccgcgaccgcctccgctggtgctaccggatcgagggcgtcaaccaccaccagaagtgccgccacctcgtcgaccagtacctcgagtccacccgcggcgtcggatggggcaaggaccaccgcccggcggacctgcacgagcccaagaaggtggttgaggtcgaggagtagctctgcttccgctgccgttcctggaatggagaggtcatctttccattcgaagtgaaggaagtaacttgaattgccgcagctcatctcttacctctgaagttgctgataagcatttaataaatgatgatgcgaaggaaacattgttgtgtggtgtctgtattttttcttttgtcnaattccaggagttaagcaaatcgt

SEQ ID NO: 58957 - DNA, 604 bp, Zea mays
  unsure (1)..(604): unsure at all n locations
  Clone ID: MRT4577_153764C.1
ctttaacaaaaaccttgcttccttatcccacctgatcccagtctgaaggtctcttagcaactggagatacaaagcaaggagctggtgagcccagcgttgacgtcaggcaggctatgcccttccgtggttaatttcttcccaggggcttccacgaggagtccccatctgccccgccccttcacagagcgcccggggattccaggcccagggcttctactctgcccctggggaatgtgtcccctgcatatcttctcagcaataactccatgggctctgggaccctaccccttccaaccttccctgcttctgagacttcaatctacagcccagctcatccagatgcagactacagtccctgcaattgggtctctggcaggcaatagttgaaggactcctgttccgttggggccagcacaccgggatggatggagggagagcagaggcctttgcttctctgcctacgtccccttagatgggcagcagaggcaactcccgcatcctttgctctgcctgtcagtggtcagagcggtgagcgaggtgggttggagactcagcaggctccgtgcagcccttgngaacagtgagaggttgaaggtcataacga

SEQ ID NO: 58958 - DNA, 491 bp, Zea mays
  Clone ID: MRT4577_153765C.1
agacctttctccagagtcctgaacccaatctagggagctgtgctgatttgctgtgcgatcgaggctggcgttctcatgcctggcgacatcaacatcgcaccaggatatcaccctaatcccacactgtcttgatctagactaggggtgtcaatcaccggcgccttgctacccttgcggaccttgaacgcactgttatagatgagatcatgactggctactaccgccaacctctcaaacctgaacaattcagagtgtagaaagatgaagcacacacagcttattcggtcgtctatagactattgcccatgctattgagaaacaattccttgggcggatatgaatcttgtcgactgctgcactaggaatcagggctacataatcgtcagctctgataaaggtggaacgaactacaagcttaggctcgtaattctacatcgcttggctggctactacctgaagaagagcacccaaggggggactgggccccctat

SEQ ID NO: 58959 - DNA, 123 bp, Zea mays
  Clone ID: MRT4577_153766C.1
agggagacgccacgcgggcgactccagagagtgaggctcacgacgaaggtcaggggttgctccacaactctgaggaatacatcaagatgcgtgaaggtgtgatcccctagtggacctagaagc

SEQ ID NO: 58960 - DNA, 580 bp, Zea mays
  unsure (1)..(580): unsure at all n locations
  Clone ID: MRT4577_153767C.1
ctcgtctagctggtccctgctcagcactaagcttagctttgagagcttctccattgtttgcagcactgctaataaagtgctgccgctcttttctctcctctcctctgctctcctagctatacgttctttcttccttacagtacccactgctgctgttcagctgagctaatgcagtgttaagctcagttactgtcgtcggtttcagcaaaagcctcgcagtgtacttgcgcctgaacctgacgagaaagagagcgaggtcaaaacagaggggaaccaaagctccaagaaaggggagggaccttcttcgacccgcttccatccagcatctcgctcgtccgccgctcgaggtccttcctaatcggcggccagccagccgcagccgcctcctttggcaaggacactagttccacctgttttcttgcaaaagagcttttttttttcttccatccctctctttttcttccccatcgtccgtgtgctgcccccaagaagccgggagctagctagcgggctagcggcccaccggccgagtttggagctagcacgagcaggctgcggnaggcgttggcagcacgctctc

SEQ ID NO: 58961 - DNA, 504 bp, Zea mays
  unsure (1)..(504): unsure at all n locations
  Clone ID: MRT4577_153768C.1
cgcctcgggtgcaaaccctaagcaggaagtagatttattcgttgcagccatgagtaagtcgcagtctgagtctgtcaaggatgccatctcccagattgttggggatgccaaggacaagaataagaagctcactgagactgaggaacttcaacattggtgctgaacaattatgatccacaaaaagacaagcgtttcagaggctctgttaagctgccccatatgcctcgcgccaagatgaatgagggcctgcttggtgatgcccagcatgttgaggaggccgagaagatgggacttgacttcatggttgttgacgctctccagaaaatgaacaagaacaacaagcttgttaacatgcttgccaataagtaccatgctttcttggcatcagaggccatccttaaagctattcccccggcttcttggtcctggtctgaacaaggcaggcgaattcccgaccctggttactcaccaagaatccctctgatncaggtgaacgacacttaa

SEQ ID NO: 58962 - DNA, 577 bp, Zea mays
  Clone ID: MRT4577_153769C.1
ccggccgggacttctggcccttgctctgtctatcagtaccatccaggaggatgtctctccgctcgctgaccacacactctaaacaaaacaaggaacatgggaattgagtacagagtctgcgctcggatgacatgggagtgaccggctaggcaaacactctctgctcctgggcgatacaggtgaaacagcaaatactgcaccagaaaggataactgatagatgccatccaactcgcatgagcagcactgtacatgagccaagaacagggggacgagctgacccagatcaactcccaggacgtccacatacatacctgcaccctggcaagacatctacctgcatccatcaccgtgaccgtcaccgccgccgaggacagccctaccaacaacggtatccacatgcggcgactcatccgacatcaccatcaccaacaccggaatcggcgtgcgtgatcactgcatactactgccaccgtgagatcttcaaggtcgaacatcactggcgtgacaccgcaacgcccaccacgggataagcatcgtgagcctaggcacgctgaggacgacaaggacgttaccta

SEQ ID NO: 58963 - DNA, 590 bp, Zea mays
  Clone ID: MRT4577_15376C.1
gcgggtcgatacaagcctcccgccctttttttttttttttttttttaaataaagtcggcctgctttattaacaatatatataaacccataaacatctcgtagacacttgaatgtgacacctaaccccacatgcccatcccatctgtacgtaccggcattatcggtccatgataaccaccgtccaccgccaaataattcatacagacattaacaaatggaaggagatatattccagagatcacaaagtctgctgctcttaatataactaatcaattaatcatgtcccccttgatcgcgagtgcctgatcttccgatcaatcgtccatctccgccgtcttggtcttgggaggaggcccgaacctcttctggagccggcggagctcctccggctcgaggccgaacgccctctcgaggacggcgtccttgatcccggacccgaacacggtcgccgggatgcgcacgatgccggggttctcgctgttgaaggtgccgtacacggtggccggctcgtcgccgacgttcatctggaagtgcaccatggcgcgcgggaacaccatgacctcccctttctcgagcaccttggcgaagac

SEQ ID NO: 58964 - DNA, 407 bp, Zea mays
  Clone ID: MRT4577_153770C.1
caattcgccctatagctatgtggagaacgcggccttagcttgattcctgggaagcgcccctcatcacacaaaagctttatgattgagctatcccttattgaaacttaaggaggcaccaccaatgatgggttgttgtgtagaacgctgcagggttggtcataccacgttgattgactggcttccaacgttgcccttgggagagggtgcctgccgcaaagcgcagcgggccggcagatccgccaccactgtggtttgtgacacgtaagggactacggctaacaccagctagctggctgattggaacaactggctgctgctgacaataagcatgatagttcaatgctgccaccaggttgaatggtagaaattgcctgggcacgcaatatatatcttgctaaaaggtagtt

SEQ ID NO: 58965 - DNA, 582 bp, Zea mays
  Clone ID: MRT4577_153771C.1
tgcaactgcatgcgacgatcgatagccaacaagcaacagcagcagcaggcttcagtttgcacgcagggtttatcgggcatggacttggagcagacggacgaggcgttgtcggtgaacgatcagagcgcggaacggcggcccacggtggccggcggcgccatgaggtggctcgacctcacgctggccgtgaccgcccctcgcgacgagttttcggcgacaacggacggggactcctcgtccgccgactcagacggcgagccgccggccaagcccgtgcccgtgccgtcctcttctccttctccctccgcgcccgcgccgcacaaggtgttctcgtgcaacttctgcatgcgcatgttcttcagctcgcaggcgctgggcgggcaccagaacgcgcacaagcgggagcgcagcgcggccaagcgctcctccgcgccgtcgcccgcctaccagtaccagtaccaccacctccacgcggcgcagcggatggtcatggccggcctgccgctcgaggcgcacgccgccctggtgcgcgccgcgctgcgggtcagcccggcaagtgcgatcatccaaaagggcgacgcc

SEQ ID NO: 58966 - DNA, 404 bp, Zea mays
  Clone ID: MRT4577_153772C.1
ggggaaaaccacgtgcccccattttttggccccccccattttttctttttcaggggggggggaaaaaacgccgagtgggaaaatgggcgtgggggggcccacacaccacacattggtcaccaaacccgcgttcgaagttccctgcccccccattatctgggacttcccatggtttacataggcggggaatcaaacccccgggactttgttgggcctccatgcatgctccttttgggcctggggggcagccttcgtccgcaaggtgatcgatcgagcagcagcccgatcagccgaaaaagggggcttttttttcccctcgccggggggggcggactccttcttctccccggggtccttcggcgcgtttttggcctcctttttggcggggggctcggggaacgcga

SEQ ID NO: 58967 - DNA, 415 bp, Zea mays
  Clone ID: MRT4577_153773C.1
ttattttttttttttaaatttttttttggtttattttgagggagaatcccgtttatcccattaaaagggacgggtccaccaggaaaaatgcaccagccccacagcgaacaccattaaacgaacgcgttagaaaacacgagcacggcaaccaacttcacagctacatgttggctctctaggcccatctgaacgagcagcctcctccaaatatagttgcaggccacgccacttcgcatactgggactgcggatcatgttatattctggggccaggccaacgcaggcccacaagagggactggagcatctccatgagggtttacagagagaccaccttgggcgggaggacaggcaccagggcctcccactgctccgggctcagggagtctgggaactgcaggaagaagtggaagtaca

SEQ ID NO: 58968 - DNA, 732 bp, Zea mays
  Clone ID: MRT4577_153774C.1
ttgggtacctcgaggccggccgggaacctgagaatgaaccagaagtgaagagataatacccggtccacctttgccccctgaatgcaatactgaactgcatactgattatggtggcacggctgttagatggggcttaacacatcacaaagaaagtgccgcagattgctgtcaagcctgtatagatcaggctaagagggccagaccaggagccttaaagtgtaatatttgggtttactgtccgtctgagtatggatgctactcgccagacaaatatgaacacaaacatcaagaatgctggttgaagcaggctgaccaccctagattaaacttcaaagaccggtaccctgagccatacagagattctcatccgactgcccctgttgttgtgccatggatgtcgggtgtcattactgcatgagctgcttgcccacaggagcgcaatgccaatgtgcagcttccagactgaactctacatttttgttttgcaaactcagaaaaccatttttcattttcattctttagtacttaggctttaggttagtctacttggtagctgaagtttaggctgcgctggggcctttgtcaaactgtgccctagggcgtggcaaacaaactgatagggcatgttttggcagagatgtgctgtaatgtatgtacatcaaccaatcatgctcgcagctatatattgtacttcaaactgaaaaaaaaaaaaaaaaagcggccctcgagctc

SEQ ID NO: 58969 - DNA, 2166 bp, Zea mays
  unsure (1)..(2166): unsure at all n locations
  Clone ID: MRT4577_153775C.1
cgtcggagagagacacaaggctgcgtggactgaacagaagtttcgcttgagattctgcagagactgcacgatttgggcgaaggttctaataccacggaacaacaagaagctatagaagcatggcgtgttgggaagctcaaggacatgagaagtgcatcttctaagaatttatcaaattttggcctctccaatgaagattcaaggatggtccggcgagccttggagtttaactggcaaatgctattggaggacattggtctttggatacctcccactatatatcatatcgaacatgatgacaaacctgagaatgaaccagaagatgaagagataatacccggtccacctttgccccctgaatgcaatactgaactgcatactgattatggtggcactgctgttagatggggcttaacacatcacaaagaaagtgccgcagattgctgtcaagcctgtatagatcaggctaagagggccagaccaggagccttaaagtgtaatatttgggtttactgtccgtctgagtatggatgctactcgccagacaaatatgaacacaaacatcaagaatgctggttgaagcagtggttaaaatttctcaccacacactggaatgtgtttcattatggtttctgaagctctccaaaatttctatgatgactgatttattggaatgctacctcagatggaacatgctgaccaccctagattaaacttcaaagaccagtactctgagccatacagagattttcatccgactgcccctgttgttgtgccatggatgtcaggtgtcattactgcatgagctgcctgcccacaggagctcaatgtcaatgtgcagcttccagactgaacactacatttttttttttgcaaactcaggaaaccatttttcattttcattctttaggacttaggctttaggttagtctacttggtagctgaagtttaggctgccctggggcctttgtcaaaccatggcctagggggtggcaaacaaactggtagggcagtttttggcaaaaatgtgctgttaagtatgttatcagctatcttttcttggacactgtacaatacttggatccggtaaaaaaagtttgtacctcttataggtttctatttagtttttttctgccaatctcttcaagctaactcatgtacgtgtatgaatcacattgttatagtagctaacaatgtcagtagtgtaccaatcaataactgtattgcagtcaagaaaatagtaatttccttgactgattttgacatccccatggctttaacagtttaaaaactgaaaattgattctactatatttgtgttttaaggccttagtgtaggcgtacaatctacgtcgacgccaaaattaaatcaccttcctacatccatagttgatatgaactggtgagattcttactgatgcactaaatttcaatcttaggatactctttaattgatgtatgctttgcttcagtcgtataatattagagcaacttatcatcccccatgttttataatccatcctagcatggtacatttttttctgcacaattgtacatggaagcattagtcataggatatcggttgttgaagtacgtcgtcaagtgtacatggaagcattagtgcattgaacggccgaagaatcaccgcaggtacatggctgatgtgttcatcttctagaggatatcttgcaccagagtacaccattcaagggcagctgaacaaaaagagcgacgtctacagctttggtgtgctgctgttggagattgtcagtggcagatgccacactgatcctagattacccgttgacgagcagttcctcctagaaaaggtctggacactctatgagttcgatgatctcgagagcatcattgataggacactaaagcgcgattttgacaccgaggaagcactctggttgcttaaggatcatgaggctggcctgatcacagacgtcatggacctgaaggtcaggatggtagagccggttcagttcagcttgacatcatgctcgagcactatcgcngttgtggccctggggcgcgatgcgcccactccttgttggggatttcccattcagctactacgagtcatgccgtgtangtacgcngtaggtttgtgattcaatcgtgagggtccctcattaaagtcgaatggatgcaatcaaaa

SEQ ID NO: 58970 - DNA, 153 bp, Zea mays
  Clone ID: MRT4577_153776C.1
tcgggactctgctgcccgggaatgatcggaggatgctgtgagggtggatatactcagaaaccgcagtgctgtcccgtgcagcagtccacaatgcttagagaacaggcagaacgtatcacgaggacaaaggcctttttcatgataggtgacaag

SEQ ID NO: 58971 - DNA, 565 bp, Zea mays
  Clone ID: MRT4577_153778C.1
cctcgaggctgggcgggccacctcagctcgctggcgtccgggcgctggtgttcttgagctcgcgcggtgtcctgggcgtgtgctccacaggcaccgtaattacgtgtcggtttgctggggccttggttgctgttttggttcggtgggagcgattgagcgtgttttggcgtgtaaatgcgggtgatgtggccgctctcgctcagggtcctttcggggctccaacttttgtgacgatccactctggaagtcgtcgtaacttgtaacttgtcgccaaacggctcgcgcactacgctgccatccggctgtccaagttggaggccgtggcaagtgtgcgcacgatgttctgttctccgtagatactgaaaaactgaactggaatgacaggtttctgatactccatgtcgtgtccttgtgcatgcgtgtttatgtcagaagaaattactggcttgttaatccagaacacctacctaaaaagtaattgatcgaagggtgaaatagttgaagaggtataaataccaagggctgttttgaaaaaaaacttttataatatcacagcttaccaaat

SEQ ID NO: 58972 - DNA, 421 bp, Zea mays
  Clone ID: MRT4577_153779C.1
aattattataacccaaacgaacaaaacaaaaaagggaacccaggacaaccacaacggcgacaaagaaaaagggaaaagaaggggccgcagaagccggggggggggggggccacccagacccaccacacccaagggggaaccacccgaggcaggcgcccccggggggcgccccccgcgggggcgcgccccgagggggaacaccaaaagcgcaggggggggcgacgggggaaaacgagaacacggagataggggccctgggtttgggcgccacaagggcgaaaggggccgggccatgggggggggaaacaccggacaaagacgccagggggatcgccaaaacccggcaaaaaataaaaagtcatcattccccgcctcgccacaaccgggatagaccccccagacggggacgggagacatggac

SEQ ID NO: 58973 - DNA, 248 bp, Zea mays
  Clone ID: MRT4577_15377C.1
tgtgagatcgtgcgcatctccgagatctgcagaatattgtagtacgctcggggctcatcttgacgttatatatccagcgggtcatctgcattactgacatgcagattcctatccttagtatcgctgctaatggtatgattaacatagtcgaagactgggaactctcaggcatggtcttctatatacggatactgaggctgatcgcagaagatgttcgtgcaaaagacattaggtctcacgtcggtgat

SEQ ID NO: 58974 - DNA, 320 bp, Zea mays
  Clone ID: MRT4577_153780C.1
acgctcgcttcgtggctatatgcaagtgttgttcggagtactaaactcatacgtggtaaaagatgaataaagacttaaacatttctttaacaaaaaaaaaaaaaaaaaaaaaaaaaaaaaaaaaaaaaaaaaaaaaaaaaaaaaaaaaaaaaaaaaaaaaaaaaaaaaaaaaaaaaaaaaataaaaaaaaaaaaaaaaaaaaaaaaaaaaaaaaaaaagggggggcctttttaaaatatcaaatttaaataacgcgggcatggaaggtaaaagtttttttttggggcccccaaaattaaatccactggccgtgttttaaa

SEQ ID NO: 58975 - DNA, 286 bp, Zea mays
  unsure (1)..(286): unsure at all n locations
  Clone ID: MRT4577_153781C.1
accctagctaccgctttcgnngaattccctgtcctccgcccgcntcgccgaagtccctgtcctccgcnngcntcgccgaatttcctctcctccccgccngtngnnngtcancgcggntncgtctgcgcttgtccctcccgttncaaggagcangtgcttcttgncgngncgttcgccngncgtcgcngcnancggttcatcgncagctatgtcgtctcaggtcgacagncgnagncagtccgcngggaagcgngcgcgnancgacggnagncggcgtgaggacgac

SEQ ID NO: 58976 - DNA, 331 bp, Zea mays
  Clone ID: MRT4577_153782C.1
gagaggtcatcgattgctgaactgacatcggccaactgctacagaactgagcatctggggagaccagagaactgtgcactacatcaaatggcggaacacatctacattgctggactattccttacagatgccgcctgattctatccagctagtctctgaacatgctgcaacgtatatcatggtgttcctgatgaacctctctgctaccttcatttgtgagttcttccgtgatgcccaagaaaaggttctactgtatgctgactacatcttccactaccaaactgaagcagagatctttgccaaagtccgatgcatggcagactgacaatat

SEQ ID NO: 58977 - DNA, 214 bp, Zea mays
  Clone ID: MRT4577_153783C.1
ccgggctcctgctcctgccctcggtttctgatcagcgaacatgggaacccgcggcgccgccctgctgctcctcgcggcggtgctgctcctccaggcgctgctccccgggtcgacgaagggcctgacgcgagtcgcgctgaagaagctgaccgacagaccagaacggacgtgtagccgcgcgcctctccgacgaggagagacaaaatctccaact

SEQ ID NO: 58978 - DNA, 777 bp, Zea mays
  Clone ID: MRT4577_153784C.1
gacgcctgcggttctcggtccggaattcccgggtcgacccacgcgtccgggccgcgaacggtccttgcactggccactggcaagcgccccccgtgggcggaaagctgaaaaaacaaacaaaccaaccaacttgaacgtgctggggagttgctggggagttgatgagccagcgtctgcctaaattttacagctcctaagaaggaagaattgcatttcaggctgacctagaactcttggacttccattaccatcctgcatcaacttctgagtaactgggactacagctccagccagacagcatggaaccacaggttactctaaatgtgacttttaaaaatgaaactcaaagctttctggtttcggatccagaaaatacaacctgggctgatgttgaagctatggtaaaagtttcatttgatctgaatactatccagataaaatacctggatgaggagaacgaggagatatccatcaatagtcaaggtgaatatgaagaagcacttaagatggctaacattaagcaaggaaatcagctacagatgcaagtccacgaagggtaccatgttgtagatgaagcactccccaaaaatgtggtagaaaaccaagcggctgccaggacagggaagaagccacttgcacattattcttcactggtgagagtcttgggatcagacatgaagaccacagaggagcctgcaccagagcaatgttcttctgctccttgtgacacagaccagcctcaagacaagcccccagattggtttacaagctacctgg

SEQ ID NO: 58979 - DNA, 522 bp, Zea mays
  Clone ID: MRT4577_153785C.1
ggcgcgggtggcctggacctgaagctgcacctgtctccgccggcgccgccggcgcgtggcacagagggggcggcggcgccgtcgctgtcctccgacgaggagtggtcgtcgtcgtcgtcgccgccgagctcgtgcctgtcgtcggagagcgagcgggagccgcatcagcggagccacagccacgggctgcagtggtcggacagccccgaggcgacgtccatggtgctggcggcgtgctcgcgctgcctcatgtacgtgatgctctccgaggccgacccgcgctgcccgcgctgccgcagccccgtcctcctcgacttcctgcaccacgccgcccgcaacagcaacgtcagccgggaggacgacggcgatcacagccgcggctgcggcgggaggaacaggagggcctgatcatccacagttccacaccaccacacggcagcctcaagaacccacaagattttctttttctttttctcgattattaccattagtactagtagctttaattccatcgttaagttg

SEQ ID NO: 58980 - DNA, 331 bp, Zea mays
  Clone ID: MRT4577_153786C.1
tttgactggtgtaatattgttttcttattgatattatcactcatctaatgacttactgttactcatttgagatctcgtctttgtcaaaatcagaaacaaaatatgataaaagatcaaatgtaaatccccctttcgatccgaagagaattagtaacaaaaaggcgcgacgtcgtaagcgaaccaaaactgcaaagtgtcgagatatcgagacaacttttcggtgaaaaggcgaataagcgaaaacaaaacgtcgaagcaagcggcctgttcgaaaacaaaaataagaaactagagatcgacgtccatgttcgtccccatgctcatcaccata

SEQ ID NO: 58981 - DNA, 428 bp, Zea mays
  Clone ID: MRT4577_153787C.1
aattgctgggtcgacgatgtttctagtcggcggccgcccttctattttagtgttcttgtacgaatgttcatcaggcatttatgataagaacaagcaagcatgcatgctcttagtttggcacggaaactgaccatggtttatccgcgccagattaaacgaacaaaaccgggtcccatgatatgatttatcaggaagggagagcagcagcatttacttgcgagctcagttgctggcgggaactgccgcggagcgtgcctgcagaaccttggcatactcggcgatgtggacggggtccggggtgacctccttggctacgtccagcgcggaggatcgcttcggccacatggccaggcgtggagtccggccggaactcagtagcttgaggtccccaagcttgtcctaggcgcgcagacagtcgatgaagcctt

SEQ ID NO: 58982 - DNA, 287 bp, Zea mays
  unsure (1)..(287): unsure at all n locations
  Clone ID: MRT4577_153788C.1
ggcgaccacgcgtccgattcggcgaccaccggagcgcggaggaggcactatgcgtccatctagagacgatggccgccgggggctgcttnccctccttctggttcttgaataaaccgcttgaaaggaaagtggcccttcttacttggggggccacccgcattggggaaggccttcgttgcctttttattgaacaccgggcccaaggcttgattgcgggacatccaggatgaggccgggcagaaattgcccaaccccttggaaggtaacccccagggccccattttctt

SEQ ID NO: 58983 - DNA, 1675 bp, Zea mays
  Clone ID: MRT4577_153789C.1
gggtacacctcgaggtctggccgggcaggcctatcgctgcatacctcatctacaggtgtctggtgcattggagatcatttgaagaagagaggaccgtggtctttgaccggattatccagaagattactgctgcccttgaggtatctagccgagcagtggcaagtaatacttatgagacaacggattttatgtcagcaagaaatgagaatttgatttttttttcttttttttgccgccgctgccaggcgcgagacaacaacgatgcactagcatactggctgtccaattcatgcgcgctcctggttcttcttcaaaggacactgaaaatcaatggggtagctgccttggctcgtcagaggcgaagagcgtcgtcacctctcaaggtgccacaggtaaaccaattctggaacctgagaattctgaaacctgagagctctgaaacctgatctcgcagcaggaaaaccaagatccagttcccgacggacagttgatctgtggactagcccaagtctaccagtctgaggcccggtacccaactagtgcgttcaagcagcagctcaccgcactgctggagaaggtctatgggatgatccggcacaacctgaagaaggaactgtcgccgcttctcggcctgtgcattcaggcgccacgcacattcgtcgtcgtcagtcccagaggatcgtgttcgcagggaacagatctggcgcaacaagcctccatggcgcattggcagagcatcatcaagatcttgacaaattctctcgatgttctgaaatcaaattacgtgcctccgttcctgatctgcaagatgttcacgcaagtcttctcgtttatcaatgtgcagcttttcaacagccttctgctgcggcgtgagtgctgctcgttcagtaacggagagtacgtgaaggctgggctggatgagctagagcattggtgcttttggctgactgaagagtacgcaggatctgcatgggacgagctgaagcatatcaggcaggcagtgaccctcttgatacttgacgacaagcatagccggagtctcgcggagatcacagacgacttctgcccagtgctgagcatgcagcaactgtaccggatcagcacgatgtactgcgacgacaagtttgggaccctgggcattccatcagaagtcgtctccagcatgcggaccaagatgatcgagggctcgtcgagcagcccgtcggcgcacgacgacatcaactcgttcctgctagacgatgacttcagcataccgttctccgtggatgacttcacgaagctgatagtgcacgtcgacgtagcggacatggatttgccaccgctcattcaggagagcagcggcggcggctccaaaatgggacattgaggagtgacaatatgcacgccttttttgtgtgtgttgcggtgatgtgcatagtgcgtgacatattgctctgagaccagggttttgtttttttcttcgtcgactggtcttccatttttctcccatatgactactacctgagtgagtagtgcctgtttgggtttgcgcgtgtgtatgattgtacagaactgagctgtggcatataaggtaaggaaagaaagcctgtgtgattcaattttttttatcaaaagagtgagtgatgcttgcaagtcaagctttcctttgccaaaaaaaatctcaaattcaaagaag

SEQ ID NO: 58984 - DNA, 170 bp, Zea mays
  Clone ID: MRT4577_15378C.1
agcactcttttttttttttttttttttttttttttttttttttttttttttttttttattgtcatatgattattaaattatcacactaaatcactgaggcatgcatccctgagggaataaagatctgacagctaaaacctgcatgcacaggggctctatagcatggcgga

SEQ ID NO: 58985 - DNA, 2372 bp, Zea mays
  unsure (1)..(2372): unsure at all n locations
  Clone ID: MRT4577_153790C.1
ccacgcgttcgtgtccctctcctgttataatttcgtcttcttccctctcccaccggtgtcctcgcctcgcctatccgatctgccacctcgccgtctcgcacgttcctttccccaactccccagcgcctctccgcgccgcgatccagatccaggttgttcagcatgggtctggtgaaggaaggcgtcgacatggaggagggaaccctagagatcggcatggagtacaggactgtatctggtgtggccgggcctctggttatcttggataaagtaaagggcccaaagtaccaagaaattgtaaacatccgacttggagatggcaccactcgccgtggtcaagtccttgaagttgatggagaaaaagctgttgtgcaggtttttgaaggaacttctggaatagacaacaaatacacaaccgtgcagtttacaggcgaggttttgaaaactcctgtctcacttgatatgcttgggcgcatttttaatggttctggaaaacctattgacaatggccccccgatattgcccgaagcctacttggatatctctggaagttctattaaccccagtgagagaacctatccagaggagatgatccaaactgggatatccaccattgatgtcatgaattccattgctcgtggacaaaagattccactgttttctgctgctgggctccctcacaatgaaattgctgctcagatttgtcgtcaggctggtcttgtgaagacattggagaaaggaaagcatgctgagggtggtgaagatgacaactttgctattgtgtttgctgctatgggagtgaacatggaaacagctcaattcttcaaacgtgattttgaagagaatggttccatggagcgggtcaccctttttctgaatctggctaacgaccccaccattgaacgtattatcacccctcggattgctctaacaacagcggaatatttggcatatgaatgtgggaagcatgtacttgttatcttgacagatatgagctcttatgcagacgcacttcgtgaggtttctgcagcccgagaagaggtgccaggtaggcgtggttatcctggatatatgtatactgatttggcaacaatatatgagcgtgctgggcgtattgaaggaagaacaggctccattacccaaattcctattctgacaatgcctaatgatgatatcacacacccaactccggaccttactggatacattactgagggacagatatacattgataggcagctccataacagacagatttatccacctatcaatgtcctgccatctctttcacgattgatgaagagtgctattggtgagggcatgacacgtagagaccattcggatgtatctaatcagctttatgccaactatgctattggaaaggatgttcaggccatgaaggctgtcgttggagaggaggcactctcgtctgaggatctgctttacttagagttccttgacaagtttgagaggaagtttgtgacacaaggagcatatgacacacggaacatcttccagtcactagatcttgcatggacattgcttcggatcttccctcgcgaacttctccaccgtatcccggcgaagaccttggaccagtactatagcagagatgcttcccactgaatcactgatcgttgatcagtgttccaatattttggcaagtgcagctttggataaattgaacagattggcctcgtggccattttcctgtatttatctgtagtcaggtccaattcttttctgttggtgagcgcaagttattcatagatgactcggtcatgggaatatttgtaatattatgtcatgtatcgttaaatttcagttgttttgtttcagctgccagaactgttagcaagagtattctggagctggaagctcgaacgcaactggttgtatctatatccttgaatgccgaataaaggaggggcaataaactgcagcgaaaaaaaaaaaaaaaaaaaaaaaaaaaaaaaaaaaaaaaaaaaaaaaaaaaaaaaaaaaaaaaaaaaaaaaaaaaaaaaaaaaaaaaaaaaaaaaaaaaaaaaaaaaaaaaaaaaaaaaaaaaaaaaaaaaaaaaaaaaaaaaaaaaaaaaaaaaaaaacaaaaaaaaaaaaaaaaaaaaaaaaaaaaaaaaaaaaaaaaaaacaaaaaancccccccctttttaaaaaaaaccctttttttccacctaaatcccccaatcaaaaaaacctttttttttttacnccaaaaaaaaaaaaaattctaaccctcttttttaaacaaanacactccccatgaaaaacccgctttaaaaacccaaaatagtgtggttgaaaaaacaaacaccttttaccgctacactgggcaaaaaaaaaaaaagccctctc

SEQ ID NO: 58986 - DNA, 573 bp, Zea mays
  unsure (1)..(573): unsure at all n locations
  Clone ID: MRT4577_153791C.1
cgcaccgccgcgccctttactgggngaaagtatgtgaggggttgtgggggggtgaccgccagaaccctgggagggggtgggagaacggtgggatggggcctgggagcttccatcactacgggtgtgcctgtccacactgtctgcatgggcagaggacttcgccgcaagaggagaacatcccgatggcgaggtacttcgccaggcagcatgaatcgtaccggttcgagatgtcaccatctgtttcatccgattatgatcggaggtctgtggcgtcatcactttactcgcaccggtctgtatcgaagaggagagcagagtacttcaggaagaaggcggaacatatctgccgtccagtggatggtgctgcacctttctctgtgtgcagttcatgttataaactactgcagatgcctacagaaaaatgcatagggcggaagcagaaccgatttcaatgcgggtcttgttgtcagatagttagtctgaagcatgatgaagaaaaggtattccctttgcaccgtgattatccttatatgcgccctgaaacagagcaaagttcaagtgaccagatgaggg

SEQ ID NO: 58987 - DNA, 664 bp, Zea mays
  unsure (1)..(664): unsure at all n locations
  Clone ID: MRT4577_153792C.1
ctgcccagtgctgagcatgcagcaactgtaccggatcagcacgatgtactgcgacgacaagtttgggaccctgggcattccatcagaagtcgtctccagcatgcggaccaagatgatcgagggctcgtcgagcagcccgtcggcgcacgacgacatcaactcgttcctgctagacgatgacttcagcataccgttctccgtggatgacttcacgaagctgatagtgcacgtcgacgtagcggacatggacctgccaccgctcattcaggagagcggcggcggcggcggcggcggctccaaactgggacattgaggagtgacaatatgcacgccttttttttgtgtgtgtgttgcggtgatgtgcatagtgcgtgtgacatatttctctgagaccagggttttgtttttttctttgttgactggtcttccatttttctcccacgagtgagcgcctgtttgggtttgcgtgtgtatgattgtacagaactgagctgtggcatatataaggtaaggaaagaaagcctgtgtgtttgaattttttttgaaannnaaaaaaaaaaaaaaaaaaaaaaaaaaaaaggaantnnnngaaagaataaaaaaaaaaaaaaaaaaaaaagtcctctgngttgttaccactgtttaagggcgatttttgggggtt

SEQ ID NO: 58988 - DNA, 1338 bp, Zea mays
  Clone ID: MRT4577_153793C.1
ccacgcgtcaggtagtaccttggccaaaacgacttagctatcaagctcgaccgacgaccgaagctaagctaccaagctactagtagtcttcttggtcacgttgttgattgcagcggtcgagcacacacaagctagctagctagccgctagagctagggtcgtcggatagatcgacatggccggcagggacagggagccgctggtggttggtagggtggtcggcgacgtgctggaccccttcgtccggaccaccaacctcagggtcagctacggggccaggaccgtgtccaacggctgcgagctcaagccgtccatggtggtgcaccagcccagggtcgaggtcgggggacctgacatgaggaccttctacaccctcgtgatggtggacccggatgctccgagcccaagcgacccgaaccttagggagtacctacactggctggtgacggatattccgggaactactggggcagcatttgggcaagaggtgatctgctacgagagccctcggccgaccatggggatccaccgcttcgtgctggtgctgttccagcagctggggcggcagacggtgtacgccccgggctggcgccagaacttcaacaccagggacttcgccgagctctacaacctgggcccgcccgtcgccgccgtctacttcaactgccagcgtgaggccggctctgggggcaggaggatgtactcgtgatcggatgcatggttacataccatgcacactactcactccatcgtctccatacatgtagacggacgatggtgcatgcatcgatcgtcaactactcaacaattacgaactagaaatacacgcgtatatatacatatataaatatgcatatataccggtactgtacatgtcgccgtacacgcgcaggtggctgctagctgcttgctataccggccggtactgagcaggcagcatgcgctatatacttgcttggcgacgacgtgcagtgtgtgtatacaataatgagcggccggccggctagcagggcgacgagccgtggctttagcaatacatataccatgcaggcatgtgtgtgtgcagtgcgtgccaaggtacggtaacgtaattattgtgcacatacacatatgtatacgtacatatgcgtaaatatgaatgtgtacgtatacatatgcatgctggttaattaaggcgctatcttgtgcgtacgtgcttggtgtaataatattacaagtcctcagtggagaatataataataaattaagagctatagcttttgtgtggacaaaccagcagggttgttggtatacatttcatgcatgattctctccataatatatatacacattattgtc

SEQ ID NO: 58989 - DNA, 254 bp, Zea mays
  Clone ID: MRT4577_153794C.1
gatactgttgtttccattccatttgaattgaaaccgaaacattttagggttaaaaacatgtgtttttaatttaaattttttaggagaacacacacctacttcttaaaaattggtgttatacctgggaaagggttcgtgtccccccttggccaaaaaaagggcctcttaaaccaacccaaagaggggcccacccataaaagggcccacccattaaatccatgtgtgggcccataccccaaccaaaaacaccgggc

SEQ ID NO: 58990 - DNA, 428 bp, Zea mays
  unsure (1)..(428): unsure at all n locations
  Clone ID: MRT4577_153795C.1
cccacgcgtccgcatcatcaagatcttgacaaattctctcgatgttctgaaatcaaattacgtgcgtcgtcagaatctcagaactgcagaaacatatacgcctctcttttttttctctctatctctctctctctctctttattagaacgcgcctgattccatcagggctggtcgcgttgcaggtgcctccgttcctgatctgcaagatgttcacgcaagtcttctcgtttatcaatgtgcagctttttaacagccttctgctgcggcgtgagtgctgctcgttcagtaacggagagtacgtgaaggctgggctggatgagctagagcattggtgcttttggctgactgaagagtacgcaggatctgcatgggacgagctgaagcatatcangcaagcagttaccctcttgatacttgacgacaagcat

SEQ ID NO: 58991 - DNA, 403 bp, Zea mays
  Clone ID: MRT4577_153796C.1
ttttttttttttttttttgaaacaaaacaactgaaatttaacgttttttttttttttttttgaaacaaaacaactgaaatttaacgaacttgcgctcaccaacagaaaagaattggacctgactacagataaatacaggaaaatggccacgaggcagatctgttcaatttattcaaagctgcacttgccaaaatattggaacactgatcaacgatcagtgattcagtgggaagcatgccaaaatattggaacactgatcaacgatcagtgattcagtgggaagcattcgcgagggaagatccgaagcaatgtccatgcaagatcgagtgactggaagatgttccgtgtgtcatatgctccttgtgtcacaaacttcctctcaaacttgtcaaggaactctaag

SEQ ID NO: 58992 - DNA, 1375 bp, Zea mays
  Clone ID: MRT4577_153797C.1
taccgccccggaattcccgggtcgacccacgcgtccgtcgttggctcgtcgatcagcccgtcggcgcacgacgacatcaactcgttcctgctagacgatgacttcagcataccgttctccgtggatgacttcacgaagctgatagtgcacgtcgacgtagcggacatggatttgccaccgctcattcaggagagcagcggcggcggctccaaaatgggacattgaggagtgacaatatgcacgcctttttttgtgtgtgttgcggtgatgtgcatagtgcgtgtgacatatttctctgagaccagggttttgtttttttcttcgtcgactggtcttccatttttctcccatatgactactacctgagtgagtagtgcctgtttgggtttgcgcgtgtgtatgattgtacagaactgagctgtggcatataaggtaaggaaagaaagcctgtgtgattcaattttttttatccaaacacacctcacacgcgtagaacgccttcttccggccccgcaatctcatctccacccccgctcctcctccggcaatccatcgctcgggttgtccctactgggcgacacgagggcggccacgcccaccgccgaaacactctctgatctgtgcccagcctgcctccgcactttctccctcttccgttcagcaacagcggctgcggttttactctgtctgttgccgatttgtttggattgctgatctctctacaatttctggtggatcggatagtcagagtgatctgtgtggattggggtaactcggatcagctccgctcctttttctcggttctgatggcgtggctggctgttgccaggtttttcagcatgggcctggtgaaggaaggcatcgacatggaggagggaacccttgagatcggcatggagtacaggactgtatctggtgttgctgggcctctggtcatattggataaagtaaagggcccaaagtaccaagaaattgtaaacatccgacttggagatggcaccaatcgccgtggtcaagtcctggaagttgatggcgaaaaagctgttgtgcaggtctttgaaggaacttctggaatagacaacaaatacacaaccgtgcagtttacaggcgaggttttgaaaactcctgtctcacttgatatgcttgggcgcatttttaatggttctggaaaacctattgacaatggccccccgatattgcccgaagcctacttggatatctctggaagttctattaaccccagtgagagaacctatccagaggagatgatccaaactgggatatccaccattgatgtcatgaattccattgctcgtggacaaaagattcccactgttttctgctgctgggctccctcacaatgaaaatgctgctc

SEQ ID NO: 58993 - DNA, 552 bp, Zea mays
  unsure (1)..(552): unsure at all n locations
  Clone ID: MRT4577_153798C.1
cccgggtcgacctcgcgtccggccgattttcacgccagctggggggggaggcgcgttccctacccctgcgccgataaaacccgagtcgttgttccccttcttcccccagtgcgcatcgatttggagaaagctgggaggaagcgccaccgttgtggatctcctacgccatgaatcctcagcgctttattgtaccaggaggagggcaggagcctcncanagagatttcgagacttggctgcgtgagtactcccgtgggtgcctcagaatttcttgccgaacctggttgtcgccgctggagccgctctgcgttgtggaccggcttcaactcgtggtctgagacagtaataaccctcccctgctgtttgtatcatcttgtgcttcgtttagcacaaattggattgggtctggggtgccagaatggccaacgggcgcggctccggcagtgcaccgccgcatgagtcgcgcgctccgccgtggcctgccggcggggtttgaagacggattcataaccgttgatccccgtggcaacgagacaattgccattataaaaca

SEQ ID NO: 58994 - DNA, 2221 bp, Zea mays
  Clone ID: MRT4577_153799C.1
cattgggtacctcgaggccggccgggtaattttagggcattaattgcacgtctcctccccacctctccttccctccacccgtgccgtcgcctcgcctatccgatctgccacctcctcccgtctcgcacgttccttcccaactccgcagcgtagcctctccgcggcgcgatccagatccaggtttttcagcatgggcctggtgaaggaaggcatcgacatggaggagggaacccttgagatcggcatggagtacaggactgtatctggtgttgctgggcctctggtcatattggataaagtaaagggcccaaagtaccaagaaattgtaaacatccgacttggagatggcaccaatcgccgtggtcaagtcctggaagttgatggcgaaaaagctgttgtgcaggtctttgaaggaacttctggaatagacaacaaatacacaaccgtgcagtttacaggcgaggttttgaaaactcctgtctcacttgatatgcttgggcgcatttttaatggttctggaaaacctattgacaatggccccccgatattgcccgaagcctacttggatatctctggaagttctattaaccccagtgagagaacctatccagaggagatgatccaaactgggatatccaccattgatgtcatgaattccattgctcgtggacaaaagattccactgttttctgctgctgggctccctcacaatgaaattgctgctcagatttgtcgtcaggctggtcttgtgaagacattggagaaaggaaagcatgctgagggtggtgaagatgacaactttgctattgtgtttgctgctatgggagtgaacatggaaacagctcaattcttcaaacgtgattttgaagagaatggttccatggagcgggtcaccctttttctgaatctggctaacgaccccaccattgaacgtattatcacccctcggattgctctaacaacagcggaatatttggcatatgaatgtgggaagcatgtacttgttatcttgacagatatgagctcttatgcagatgcacttcgtgaggtttctgcagcccgagaagaggtgccaggtaggcgtggttatcctggatatatgtatactgatttggcaacaatatatgagcgtgctgggcgtattgaaggaagaacaggctccattacccagattcctattctaacaatgcctaacgatgatatcacacacccaactcctgaccttactggatacattactgagggacagatatacattgataggcagctccataacagacagatttatccacctattaatgtcctgccatctctttcacgattgatgaagagtgctattggtgagggcatgacacgtcgagaccattcggatgtatctaatcagctttatgccaactatgctattggaaaggatgttcaggccatgaaggctgtcgttggagaggaggcactctcgtctgaggatctgctttacttagagttccttgacaagtttgagaggaagtttgtgacacaaggagcatatgacacacggaacatcttccagtcactcgatcttgcatggacattgcttcggatcttccctcgcgaacttctccaccgtattccagcaaagaccttggaccagtactatagcagagatgcttcccactgaatcactgatcgttgatcagtgttccaatattttggcaagtgcagctttgaataaattgaacagattggcctcgtggccattttcctgtatttatctgtagtcaggtccaattcttttctgttggtgagcgcaagttattcatagatgactcggtcatgggaatatttgtaatattatgtcatgtatcgttaaatttcagttgttttgtttcagctgccagaactgttagcaagagtattctggagctggaagctcgaacgcaactggttgtatctatatccttgaatgccgaataaaggaggggcaataaactgcagcgaaatatgtgctgtcagacattgttgaaaattttctcgattttgctgttttgagaaaaaaaaaaaaaaaaaaaaaaaaaaaaaaaaaaaaaaaaaaaaaaaaaaaaaaaaggaaaaaaaaatataaaaaaaaccaaaataaaaaaaaacaaaaataaaaaaaaaaaaaaatattatataaagaaaacataaaaaaaataaaaatggccaaaaatatttagagggtggtttattggaaaaaaccttgttt

SEQ ID NO: 58995 - DNA, 215 bp, Zea mays
  Clone ID: MRT4577_15379C.1
acgacggacaccacctgatcttctttatttcgtatttttcaagggttccaaaaaaattcaaattttaaaatacgtttttgcgggaatttgtgtttttgcgggcaagaaataccaaacttgtaacatactgtacaggatgatctgttaacatccatgctgtggattttatcttgttgtgcctgatcaattttacacatattcaatttgggatttac

SEQ ID NO: 58996 - DNA, 257 bp, Zea mays
  Clone ID: MRT4577_1537C.1
ctgctcgacctcctcgcgccggacctccccgcccccacgctccggggggcatataacctactgctccgctctgcttgccgcgctggcgagctcctgctcgactgcggcctcctcctggagatgcgggagaggggcgtgacccccgactcgttctcgcactacaccgtgctagccgcgctcacccgtgacgggccacctgggggagggggtgaccatgctggcgttaagggaggatgacggcgtggcgccggacctga

SEQ ID NO: 58997 - DNA, 156 bp, Zea mays
  Clone ID: MRT4577_153800C.1
gagcaatctgccatagcatatgaggaccacaggaagttgagatcagaaaaatgcaggctgccgctactgccgccggggtctcgaccgtgctgcccgccaaggacaggacgacgacgaggagcaggatggtgacccgtatccccaccacaaggagga

SEQ ID NO: 58998 - DNA, 337 bp, Zea mays
  Clone ID: MRT4577_153801C.1
gggaaaaacataactagccctttgggggggggggtaatttattggacaggggggtttataaaaaaaaaaggggcccgatttttattacagggggggggggaacgatctacttccaggccccaaaaaagctaaattatggggggggttatttttccaatataaattacaggaccagaaaaaagcgggcgggaaaaaaaaaaatggggggaacactagtaagggacaaaaccattcgatcggttggattaacttgggggggaaggcgtttcgatttactggggggcgtaacactagtaatgctcaaacaaagtttagggggaaagaaacgtaagggggg

SEQ ID NO: 58999 - DNA, 2092 bp, Zea mays
  Clone ID: MRT4577_153802C.1
cattgggtacctcgaggccggccgggggtagcggttacacgagccgtttaaaaaggtgtcaagtggaagtgcagtgatgtatgcagctgaggcatcctaacgaacgaacgatttgaacgtcctcgcctcgcctatccgatctgccacctcgccgtctcgcacgttcctttccccaactccccagcgcctctccgcgccgcgatccagatccaggttgttcagcatgggtctggtgaaggaaggcgtcgacatggaggagggaaccctagagatcggcatggagtacaggactgtatctggtgtggccgggcctctggttatcttggataaagtaaagggcccaaagtaccaagaaattgtaaacatccgacttggagatggcaccactcgccgtggtcaagtccttgaagttgatggagaaaaagctgttgtgcaggtttttgaaggaacttctggaatagacaacaaatacacaaccgtgcagtttacaggcgaggttttgaaaactcctgtctcactcgatatgcttgggcgcatttttaatggttctggaaaacctattgacaatggccccccgatattacctgaagcctacttggatatctctggaagttctattaatcccagtgagagaacctatccagaggagatgatccaaactgggatatccaccattgatgtgatgaactccattgctcgtgggcaaaaaatccccctattttctgctgctgggctccctcacaatgaaattgctgctcagatctgtcgtcaggctggccttgtgaagacattggagaaaggaaagcatgcagagggtggtgaagatgacaactttgctattgtgtttgctgctatgggagtgaacatggaaacagctcaattcttcaaacgtgattttgaagagaacggttccatggaacgggtcaccctttttctgaatctggctaatgatcccaccattgaacgtattatcacccctcggattgctctaacaacagcagaatatttggcatatgaatgtgggaagcatgtacttgtcatcttgacagatatgagctcttatgcagacgcacttcgtgaggtttctgcagcccgagaagaggtgccaggtaggcgtggttatcctggatatatgtatactgatctggcaacaatatatgagcgtgctgggcgtattgaaggaagaacagggtccattacccaaattcctattctgacaatgcctaatgatgatatcacacacccaactccggaccttactggatacattactgagggacagatatacattgataggcagctccataacagacagatttatccacctatcaatgtcctgccatctctatctcgattgatgaagagtgctattggtgagggcatgacacgtagagaccattcggatgtgtctaatcagctttatgccaactacgcaattggaaaggatgttcaggccatgaaggcagtcgttggagaggaggcactctcgtctgaggatctgctttacttagagttccttgacaagtttgagaggaagtttgtgacacaaggagcatacgacacacggaacatcttccagtcactagatcttgcatggacattgcttcggatcttccctcgcgaacttctccaccgtatcccggcgaagaccttggaccagtactatagcagagatgcctcccactgaatcactgatcgttgatcagtgttccaatagtttggcaagtgttgaataaattgaacagattggcttcatggccttttccctgtatttatgtgtagtcaggtccaattcttttctgttgatgagcgcaagtttttcgtagatgactcgcggtcacggcaatatttgtgatattgtgtcatctgtggactatggttaaatttcagttatttgttttctttcaccttccagaactgttagcaagagcattctggaccaggatgctcgaacacaactggctgtatgtacatttgtgaatggtgaataaagaaggggcaataaactgctgcgaaaaaaaaaaaaaaaaaaaaaaaaaaaaaaaaaaaaaaaaaaaaaaaaaaaaaaaaaaaaaaaaaaaaaaaaaacacc

SEQ ID NO: 59000 - DNA, 337 bp, Zea mays
  unsure (1)..(337): unsure at all n locations
  Clone ID: MRT4577_153803C.1
aacccaccgcaacccacgagagacnngaaaatttttncatcctcactttantactacatcaancnnanttccttcggctcgtttattttaaacagacgctactctacactacanntatatnttanaatttcttttttatatctattttttttcacctactctttatttgacgatctncttataactgtaaccacactcactcattactttttcttctgcttcacaatcactctcaacctttccattcttttcatcttatagatcatacaaaatatctactatttcttttatatatactttatccatactatcaacattataataaattttttccatt

SEQ ID NO: 59001 - DNA, 570 bp, Zea mays
  Clone ID: MRT4577_153804C.1
gtcaaaccgctccggtgcgaggaggcgacaacatcttcttgctctgatccacctctcgtccaacccgctaggccgtcgctgccgagagcgagcagaggcctccctcctccgacgaaggaggaagatgctcacgaagtttgaaactaagagcaactgggtcaagggcttcgccttccactcgtgtcgtcgatggatccagtctagcctccacagcagcgtcattcagatgcgggactaccgcatgggcaccgtcctcaaccgcttcgatgagcacgacgagcccatcaggggcatccacttccatgccacatagtcgctctatgtccgaaggtagtatcgctccccttcctgactggatcgtactcctagcccactagcgtcggccttgaacccgcacgaaggtgacttcttggccgagtcagttgctctgtgtctattgtttccctttctcaagttatttctagatacaaattggtctccttgttgctgaaacagtatgatgtccgctgtttctcagaaaagttttggtcatttctactccctgaatcattatttgctgaaatagcatgc

SEQ ID NO: 59002 - DNA, 254 bp, Zea mays
  Clone ID: MRT4577_153805C.1
agaacacaggctatggaactcagtcaactccccagggatatggctcgactggcggctatagcagtagccagagctcccaatcggcttacgggcagcagtccttctatcctggctatggccagctgccagctcccagcagcacctcgtgaagctacggtagcagttctcagagcagcagctatggacagccccagagtgggagctacagccagcagcctagctatggtggacagcagcaaagctatggacagcag

SEQ ID NO: 59003 - DNA, 540 bp, Zea mays
  Clone ID: MRT4577_153806C.1
ggcgactccccgatctcagatccatggcgacagcgaaacttcgtttattgaacgaataatgcaaacaggattgggctgtgactgcatatgatacaataatatacgcactgggcaacacgcggtcaccaattaagtgatcaccccaggtgcgacatatccacactcccgtattagctctgagatgttagaacgaagtgcatccacaccacttatttatcatggatctgagacaaatctgaaataaatgaacgggtgtgactgaactgaatgagaccatcgaacgacacttaaactaatgggaataatgacaatgaaccaatggcgtccgaggtgggaccacgatacatatctgactgactgatcatttacccacattgaacatacacggtgcagctcttgtcgacactcttaaagatgaggatgacgtccacgtacaggttcacgacaatgcccaagatactagactactcggtggtgcacaggtttaccgagaactgcagcactggtagcccaagaaaccgcgagcactacagatactcc

SEQ ID NO: 59004 - DNA, 129 bp, Zea mays
  Clone ID: MRT4577_153807C.1
cgtccggattcccggtcgccacgcgtcgtgggagccttaaggagggttagtccgttagagatcacacaatgtttttttgcttgcaggaggaaagcctgcaaggactaaatgcggtaggtctgtttgtca

SEQ ID NO: 59005 - DNA, 641 bp, Zea mays
  Clone ID: MRT4577_153808C.1
taggggccttttttttttttttttttcttttttttttttttttttttttttttggtttttttttttttttttttttttttttttttttttttttaacgaaattatttggagggttcccattataaaaagagctggcaaccccccgcattaatacaaaaaaaattggtcaaaatcaaaacatttccctagggaacccaaagccccccccgctttgggacaatctttcttctactttcaggggcatacctaccattaccagtataaaaaaatccataggggggccctgggaacccgcaaaatattgctgcccttggcccgccaagtttaggacagggccttggggcccccccccccgatgatctatgaccccctccccccttgaaattacgttccccggaacttgggggccccccccgagtcatcatacccctggaaccgtttccatccccccccatttgtctaccatcatactaacttcgggaaaaaacgggcatccccttcccaataaaatgaacccccaggaagtcaactgaggccctggcaatatgccccataagaatgcccatgggcccctctatctgagtttgaccctggtccacgagaagagaccaacccccccttgtgctctgttgactggggct

SEQ ID NO: 59006 - DNA, 582 bp, Zea mays
  unsure (1)..(582): unsure at all n locations
  Clone ID: MRT4577_153809C.1
cccacgcgtccgcccacgcgtccngctgtgcaatagaatgctttacagtatgactgagaaggttgcgcacctgacctttcatcttataacactgtcatgtatggccttattaaagaggaaagacttgaagaggcattcaggatgttttgtcaaatgaaaaagatcttgctccagattatgccacactgtgtactatcctcccaagttttgttaaaaatgggttgatgaaggaagctctgcatactgtaaaggaatatattttgaaggctggttgtaacgtggacaagtcttcattccattcactgatggaagggatactgaagaaggctggtgtggaaaaatcaatcgagtttgctgaaaacatagcatctaggggaattctgctgaatgatttctttttatgcccattgattagacacctctgcaagcacaagaaagctcttgaagcgcatcaactattcaataagtttaaaggtcttggagtttcactaaaaactggttcttataattctcttatccgtggccttgtggatgaaaacctgattgatatcgctgaagacttgttcactgaaatgaaaagac

SEQ ID NO: 59007 - DNA, 343 bp, Zea mays
  Clone ID: MRT4577_15380C.1
ctcacgcgaccatgatgcagaccatgatagatggataactactcttaagagtcctctaggcgtatatcaattcggatatatacaaatacatacagaaatgcaagcatagaggataggctcatggcttggctcattgctttggaaatagacatggtacatgccataatacataacaaggaacaggagagccaactgaatagccagatgcatgtaaggatccataagagatcatagaagagatcatcttaatagcaagcttatctactagaatttctagattcattagatgatcgattacataagataatacgtactattctaagttctatacaatagcctgaag

SEQ ID NO: 59008 - DNA, 816 bp, Zea mays
  Clone ID: MRT4577_153810C.1
tcacctggtctctttcaaatctctcttcctcgtcgctgctaccgcccttgcagccttcgcttctcctctgcctggccctgccgctggagatgctctcgctgtcctcccagctcgtgaactcgcggtcgagagctctgctcttaccagccgtgccgatgccactactcttggaggctgccaacacggctgtgggtccttgggtgagatcattgcagccgtccaagtcgaggtttcagtccacatcacagctatccaaaacgctgtcaagaccaaagctaacgtcaatgtcattgttgaccttattgtcaagatcaacgtcacgatccaggcagctataggccatgtcaaggctctccctcacggaactcaggtcgatgttaacgtcttcgtttcaatctttgtccaaatcattgccgtcctcaaagttgcagtcggggcttgtggtcaagtccaagtcctgctctctgtcatcgttcagctccaggtcacaatctctattttcctcaagtcttgcttcagcgttgttcctggtctcgacgaccacttttgcggcctccttggctccaatgtcctcatcaacatcaaggctcttgctctcgtcgacatcattgcagtcatcaaggtgcacatcaaggtcggcctccttggtctcctcggtatcaacatcggcatcaacctctaaaatattggcattgactcgtgaaggctggagaaagtgttcgtgttttcatgactttacccctctcacggtggtatctacggtacctatatcatgttttcgctctgactttgaataagacggacttttgtgcttcc

SEQ ID NO: 59009 - DNA, 179 bp, Zea mays
  Clone ID: MRT4577_153811C.1
cacctacacctcgatcacgaattcctgatccaccctgtcgcttcggggggcgggtgccaccgcccaaaggcctccgcctgaatataactagccccataagatctcaccttaaaagccttgcaactcgatcacaaccttcctggaactgaaggcgacgctgatcatcacgatacacccct

SEQ ID NO: 59010 - DNA, 561 bp, Zea mays
  Clone ID: MRT4577_153812C.1
agttgaatctaggctaagcgcgacaatgacaaacccttaaggttagtcaagcagcctcgaacaaattcaaagaattaaggaacatcaacacacttgtctaatgccaagctgccatgggctttctacaagaaagttcagctgcttttgcagcagtggctctgtggcattggacaaatcaagtatacccaagacaggacacctaaaaagtgaaaacctccttggatatctcacataggcacgcacgcgatgcataggtttcagaatcaattgcacacactgatcattgttggaggttggattccctcttccatatctgaaagaacatccttcagctgaccatcacctgcttcaaacagactgaaatcttccaacagactgaaatctgccaggcctacaccatccttgccgccttcatcaaccgcagaacacccatcgaacaggcatccaatgttgctgtcgaagtctgcatcattgaaccactcgctcagattaatcgagctgccaaagttagaccttgacatggtgtctagctcataatccatgcaagggctccataagctc

SEQ ID NO: 59011 - DNA, 482 bp, Zea mays
  Clone ID: MRT4577_153813C.1
tcgacgacaatacaatacaacacgatacaccaccagttcatcttgtagcacatcgatcggagtaaagtgcgtgaaaatcaaggataatggacgcgaccaacaaggcgaccgggcacggcggcgccaccggccccgcggggaaccacggcggggctcctgccggtgctggtgccgggggcgtgcagcagctccaggcgacgagggacgaccgcaagaccgacggtggcctgggccgttccggcgggcccacggggaaccacggcggtgctcctgccgtcggcgcggccgccgccggtgagaagaagggcgtcgtggaaaatatcaaggagaagcttcccggcgccggcgggcagcagtgagagcgtcgagtcactgagctacatgtaccacacagcctctggcactacgtgtaaaaagctcagccacgcttttacgaataaataacgagctgtgtatgtatgcatgcatgtaccgatgtactt

SEQ ID NO: 59012 - DNA, 468 bp, Zea mays
  Clone ID: MRT4577_153814C.1
gggtcaacccggggaaggacgccggggcccacccgggaaaccacccccgacaacggggggggaaccaaaagcccgaaaaaagaacggaaaaaaaggtggccgaaaaaaaggggaaaaccggtcccaaggcgaaaaagagacgaaaccaaaagcccaaaaaaaaaacccccgggaaccaaaagggggaacaaacggggaaaaaaagggggggccaaacggacaaaaaaccagacggaaaaccggccgggccaccagccgaaaaaaaaggggcaaaacccggaaaaaggaagcgaccaaaaagggggcaaaggggggttaaaaatcgaccaccaaaaggggcaacaggggaaccccctaaaccgccaggaccggagagaccttcagcaggcggcccaaaggaggggccccccagaaggccaaaaccgggttcccccgggggtaaaaaaaccagaaaaaaggcgctaaacg

SEQ ID NO: 59013 - DNA, 977 bp, Zea mays
  unsure (1)..(977): unsure at all n locations
  Clone ID: MRT4577_153815C.1
ttgggtacacctcggacttggccgggncacacacacacacaccaaaaacagattcgtccttgcagctcgccgctcataccatgtctaatatttaccatcgtatcgtatccatggtgctgcaccaattcaacgctcctccttattataggtcagcttagtagttggtggtgactcgatcggcgagatgggcatggtcgcttccatgtgcacggagcccatcaagcggcaccgggtggagagagacctcgacggcaaggtggcggacgcgctccgggagcggacgaggtcccggcagaggaccttcaggtcggtgaacagcatcaccatgcgcctgcccaggttcaaggaagggctcagggacgtcaagaacatcttcgaccagtacgacgaggattcagatggcacgatcgacagcgaagagctgcagagcttcggaagcagagtccgggtgcacatgtccgaggaggagatgagcaacctgcaccggtactgcgacatcgacagcaggaagggcgtccagttccaggagttcgtcgtgctcctctgcctcgcgtacctgctcttcgggccagacgtcacacgacgcgtttcggagttcgagtccggcaagctcaattacgtgttcgacgagctcatcgacgcgtacatcttcttcgacaaggacggggacggcatgctgcggaggagagacgtcacccacaggatgaacgaggcgtcgcaccaggagaggacacccagccacataacagcacagctattcaaggagatggatctgaacaggaacgggaaggtgaacctcaaggagttcctctactccatgatcagatgggctggtctcgggaccgaagacgatggcagcgatgaggcctcaccatgatgtaacttttttttttcttttcttttggtctgcattttaacagttgaataagtaaaatgtatgttgacaattgaaagtaaaaataaaaaatatcatgaag

SEQ ID NO: 59014 - DNA, 599 bp, Zea mays
  Clone ID: MRT4577_153816C.1
gggtttaaggtggacaccaaaaaaaaaaaaaaaaaaaaaaaaaaaaaaaaaaaaaaaaaaaaaaaaaaaaaaaaaaaaaaaaaaaaaacctttttacaccttttttccttcccccagtctcccacacccaaactccaacacaaagtcaccgaaccgccgggtttaggtcaccgccatggccggggactggcaggagctgggccaagcgggggccatcggcctccttttcgccttcctggtcgccaagctcatctccaccgggatcgccttcaaggaggacaacctccgaataacgcgctcccctccgacctcccccattgccgccgccgaagccgcgcctcccgtcccctcccattacgggtccaccgacggaggcaggggcagcgacagcaactggaagggcgtggaaagcccccacctcgatgaggagttcagcgccgcctccgcctttatcgggggctccgccgccttcggaaccaaggtcccgaaggaagcgcagttgcccctttacggcctttaaaaaaacgccaccggggggcccttgcccggccccaaccgtccgggcttaagcttaaggcccgtgccaaagggaaagcttg

SEQ ID NO: 59015 - DNA, 1738 bp, Zea mays
  Clone ID: MRT4577_153817C.1
tggtggtgactcgatcggcgagattgttttggtcgcttccatgtgcacggagcccatcaagcggcaccgggtggagagagacctcgacggcaaggtggcggacgcgctccgcgagcggacgaggtcccggcagaggaccttcaggtcggtgaacagcatcaccatgcgcctgcccaggttcaaggaagggctcagggacgtcaagaacatcttcgaccagtacggtaattaaccagtaatctacacctgatactcctgatggacatggacctacccaacccaagtgtctgttctctgttcgtttgcagacgaggattcagatggcacgatcgacagcgaagagctgcagagcttcggaagcagagtccgggtgcacatgtccgaggaggagatgagcaacctgcaccggtactgcgacatcgacagcaggaagggcgtccagttccaggagttcgtcgtgctcctctgcctcgcgtacctgctcttcgggccagacgtcacgcgacgcgtacgtttcggagttcgagtccggcaagctcaactacgtgttcgacgagctcatcgacgcgtacatcttcttcgacaaggacggggacggcatgctgcggaggagagacgtcacccacaggatgaacgaggcgtcgcaccaggagaggacacccagccacataacagcacagctattcaaggagatggatctgaacaggaacgggaaggtgaacctcaaggagttcctctactccatgatcagatgggctggtctcgggaccgaagacgatggcagcgatgaggcctcaccatgatgtaactttttttttcttttcttttggtctgcattttaacagttgaataagtaaaatgtatgttgacaattgaaagtaaaaataaaaaatatcatgaagaaaatcgaaggtccaaatctgattcgataaacctcgttatttcgttaaccaaaccaaccaacattatgtaataatcgatggcactctgatttagcacatctatcagatggtgactagaatctttatagacgtagcaattggaaggtatcaaaataaactttaaatgtttctggtagaagctatcctatatcgcatctagcggatgaacgaatagtataacaaacgaaaataaagcatcacaaataatcataaaacgagatattatagctctttagagctagtttggtaaccacattttcccaacgaaaattagtgggaaaatagaaatcccatggaaaaatacagtctccaaactaatccttactatgattatcttcgtcactgttgggggccttcggctccgaaggtcctcaaaaacagaatttaacagtgtttctggagtataatgtgtgaacaggtatctttagacccgaatcggtaccacagtgggagaagctcaaagaatacgaaggttgatacaccgccgaaggagtgagcaggaaagcttcggcgtgactgcagaaaaggaaaccgacttaaagatgaaaaggctatttaaacctcggtggattactatagaactactaccaaatgtaaagggcatggatgtaattttatatgggttgtgttccatgcctataaataggagaacagtacccccgtactgttcacgctgacttggcatttgctttttgtgtcacgcttgtacttttacttccttccaagctgaaggttcatctgtaacttgatgtcgttttgattcttcaataataataatgcagaaatgaattgataac

SEQ ID NO: 59016 - DNA, 262 bp, Zea mays
  Clone ID: MRT4577_153818C.1
gtaagttgctaggaaacatttagatggcattcttctctgaagtgaaatgaaagatttagggtatgtttggactgacgcctaggccgccacaccgtgccacacttttcaaaccgcagtgtggcggacgatttggccgccgcgggttagtcgcggtgtggcggcgtaggcgccacatcaaacatgcccttagtattcagtcttgatattctgcagaccaaacttgttgcatcatgccctcaagggagactcaaactggtggagt

SEQ ID NO: 59017 - DNA, 397 bp, Zea mays
  Clone ID: MRT4577_153819C.1
gctggggcctgctatgcccccaggcctgcgtcatacaaaactaagagagcatacttggaacaccctcgtaaacatatgaaatgaataatgtgctaaagaaatttcatggcagcgggagtatatggtgccaacacaccaactgtcttctttaatgcgaagcgaagcaaaaccatgctaagctctagagagcaccgaaagaacacaaacgggtaaaagtcactgatgatgtctttctattacaaaaggctgtcaatcaattgaacactgtatgcacttcttcgattgagccaacgagccagctgtagttactccatagaagctaggatctcaaatgctgtaagcagcaaataacctaattccattgactaatgtaacaatatatacaaagtgcatgatt

SEQ ID NO: 59018 - DNA, 278 bp, Zea mays
  Clone ID: MRT4577_15381C.1
cggacgcgtgggagaaaaacccaagaaatatctctgcggccctgctcgtcccgagccgagccggcgagatggctgcgatgtctcgcgcgatccgcatcttcgccgtcacgtcccggcgaaccctgaccgctgcttcggggccggctctgccgaaggaagcggccgctgcggaagcgctgatgagggcagccgcgcccgtgcgcatgggacgggatctggtggacaggaagctcgtgcagcgggtgctcctagggtgccccctggtggggaagggctcc

SEQ ID NO: 59019 - DNA, 260 bp, Zea mays
  Clone ID: MRT4577_153820C.1
cccgggcgggtcattgagttggtgtgcgtctgatgtagagagccgctgcttggtcggtggtctcacatggaccagcatacgaccactaccctctacagcgcgttgaggacctacggtgaggtgctagcagtccaatatcatactctatcggcagacgcatatgttctgcgtgtgctgcttatgtacctctttcacagtagaggccatgcagacacgcctcctcgacgttgacggctaggcacaggtacggccggaacatc

SEQ ID NO: 59020 - DNA, 160 bp, Zea mays
  Clone ID: MRT4577_153821C.1
gttgacccaatgttaaagctaagatatatgtgggcgctatagctatttgttgggcgttgtggctaagtagaaacgatgtggtttttaataaatctcctatccaaacttatttacaggtactcttccgaggaacttactggtgtcgtttctgggggatgct

SEQ ID NO: 59021 - DNA, 360 bp, Zea mays
  unsure (1)..(360): unsure at all n locations
  Clone ID: MRT4577_153822C.1
ttataaattgaattactaacaatataatataattaacatgatcgatggatcatacatcatccataaagcaacaatagggaactgagatcataagcgcgccagccaatcaatcacgatctcatgaaaccaaggccagaactttagactgacaaaatgattatttgctaacctacccgcatgaatgtagaccgtcactcatgctttcggttcaacaatacagatgctaaagccatgccgctaggcattcccaccactgtcccaatatagccatccgacgagcagtcatggttccttgatacccgaggttgatactattgcgctgcacatacagcataccttatactttgcccnggnggntat

SEQ ID NO: 59022 - DNA, 260 bp, Zea mays
  Clone ID: MRT4577_153823C.1
tgccacacatgctgctggacgtgcccctccacttcaggctcgcgttattgcatgactacaccctgttctacctcgagatgaaatggccgggggcctactgatacagcaagcaaagttgtcaatacccaatgacccataagaccgactattgtcagggggatccaccgaatctggcctaaacaagatcactgtacggacccggcgaactggatcactgacaacggctttaacctttgaaggtgagcgacctaatgagcagc

SEQ ID NO: 59023 - DNA, 474 bp, Zea mays
  Clone ID: MRT4577_153824C.1
cttaaaccaaacaacccctttattcaccgagagggagtgtttttataaacagcacttattttgcaaccgcgcatacagcatcaagtttccacattgcctagcaacacatcagttaccatagtaagccatccaacacaacatagaatggttcagtgcttccaggcctaacgaggcaaagggacttttaagcccaaaaccaaaaccgctcaccctaagaatttcaaatgtgcattgccaacacacaacgcatgacaggcccttgaaaaaaaaggaaaaaagcgtccttgatgtggatcaaaatcctgttgagcccaatgtactcacacaccttaatatccttcctcataaactctttaacaaggcatgggacctgaccccccctctttaatgcaccgaaaaaaaatggcttccaaacacgcccagttacgatatttaattgtcgcgtggcgatctcctggacaaaagaggaaaccc

SEQ ID NO: 59024 - DNA, 607 bp, Zea mays
  Clone ID: MRT4577_153825C.1
cagaagatggggccacttgtggtgtggaagacagattgacctcgtatatatatgtttttgggtgtaatatagtggtttctttccaaaaaaaaaggaaaaaaaaaaaaaaagggcggccgcgccccggcgcaccagcgtcggccaaggcggcgcgcccgcagttcgccgaggtcggcttcgtctgatgcggggagttctcgcccgccggccagccggccagggggcggcggcgagctggcgcaagctaacattttgcccttgtgttccagctcttgtctgtttggtgtgggtttcgtctcagttcgtgtgttactgtctaatcctggggagcgtgtaggggcaggagtccgagtggaggcagtttcggcggcggtggccggcggtgtgtcagtggttcgtagtatttctctaccttacgtttgggggtggtggtggccggagtggtgttgctccggcgctgtattctgtgtctccttgtcgcgctcgcgcaatgcaatgcagtagtctgatcgttccattcgctagtcttgtcttgtgattcatggaattctgtttagctcagccacaattgcagagactgatggccgttctaaagatcacatggaat

SEQ ID NO: 59025 - DNA, 648 bp, Zea mays
  Clone ID: MRT4577_153826C.1
ggtaccgcggccttcctcgagtttttttttttttttttttttttttttttttttttttttttttttaaggcaattcggcccggccggttattttttttacttggccttttacccacaaaaaaaaaatttagttaagcccccccacttccaattccctggaaccggccaagcttatcccccaaggtttttgaaacaattttaaacccctttttggaaaacccattggcccaaccgaacattttcaggtgggccttaacaaaaacttggttgggtttggccgccccccccccccgaaaaaatggtgaaaccctgggggggggcccccggggggttattttggcaaggtggaaaacgaatctccccaaaaacttggacccaaaacccttttttggggggaaggtcacagggggacccaaaaatcccccggttaggggagaccccttggtgggattccctaaggccaaaggcggggggaaaaagaacttttgaacctttggaaaatttccaggaatttttgaaagaacttgaaaaagaaacccattggttaacaccaaagttttatggcggcccttggttttaaaatcccaggggggcttcttcccaacctggcccggattttgggaaaaaggcggtaaaggcaaaaaccgg

SEQ ID NO: 59026 - DNA, 443 bp, Zea mays
  Clone ID: MRT4577_153827C.1
tggcttggaacctttgggctgatttatgtgcttgtttacttctctgtctgttaggagaactagttgttgccgtcgtcgttgtgcttatagaacggggggccctgcgaagatctacaagattaacgtgcaccctaaatgcccttaagcgaaacctaagagaaggtgggtcggtaagatagatcatagggttaggacaaggtcgaccaattaagataaaaataagcataatatatttaaacatagacccgccgcgtgacccattaataaggatactatcgtttaaactacactcgtcagcacagtgggcgacacggcctccgtcctcgttcatctgtacgagccgttatgacacggctccgaagccggctcgattaatcacgtagtcgttcatcgtatcggttcctcgccggtctgttgcgcgtctaagacttgcggcccggact

SEQ ID NO: 59027 - DNA, 679 bp, Zea mays
  unsure (1)..(679): unsure at all n locations
  Clone ID: MRT4577_153828C.1
ccggccgggaccttctctctcatctcccttttcctcttcactctccatcgtcaccaaaaatatgtctccctatccgagcgattcgccgaaggaaccgcccacgatggcgccggtccaccgcgtgcacaagacgggtctgcctcgagcttcgcgttggcaggtcggtcttgtgatggctcctcgtcgtcggcgcaagtgcggggtggcgacgactgcgggtcttaggcgacaccgtcacaaccgctgcgtctgcaccgtccagaagtgacgcctccaccttcctctacgcgcagacaccaattcgaccaccttcctcgccaacaccctcagcctcgaggagaacgaggtgtgtgtatcgcgttcatgaaagccatcgtgcctggtgggattgaattcgagatgtacttctctgtcaggagaaatggcgtgggatttggtttgtatctcgattcttctgtgtgcgtctaagtagatcgcggtcatctgtacaggctatagattggtgccttcttccaatctccccctctcttagttccccaccctctccgtcttccatttgtatattggagacctatatctgagatatcaccaggtctatcttttcattgtagccctcattgaatntttctgtcatctgcccccggtgtaatggagttgctactacagatgacgtttgtga

SEQ ID NO: 59028 - DNA, 407 bp, Zea mays
  Clone ID: MRT4577_153829C.1
attcggttagtgcacaggggtctgtatttgttcagtcgagccaaacaggcgatggtgaaggggaactataaaccactggcagcccctagcttagtggatcacgagagaagaagccccaggctgctcgctgagctgaccatggtatgtggctaagcgctggacatagcagctcgtctggacactgcattcattggctcacctagaggcatgccaggcattacgagagcacgttcgcgcgtggcgcgcacaatactgagctggaggagcagacacaccattacggaccgcgacttgaccaggactcacttcagcgtatcgtgtgcgacttcaacgcaggcgacacgcatgtcattagctgggagctgatcgagattgggaagagcttacactcgctgacggcgtacgag

SEQ ID NO: 59029 - DNA, 176 bp, Zea mays
  Clone ID: MRT4577_15382C.1
ttggtttttttttagaaccattctcccaattacttataggatatagcatttcaaagacaccctggctgcctcaatatgtataccagaccattttattcattctttaacaagatacaggagctgcctttgtaaactgactttgagtaattcttaactcaatggaacacgcaaattgg

SEQ ID NO: 59030 - DNA, 3076 bp, Zea mays
  Clone ID: MRT4577_153830C.1
agctagcatttgttagcattgcggtggcctttttcatggttgaaagctaaagttaagcgtacactataatgaaaatgttgactagagttgccaaagaagacaatgcggatgagacacagcaggatctatagatggggctgatgactggggttaggacattggagatgaatcctcacatgtacccagaagtcgacatgattaatgaggaaggtccaatacagatgggcatagatgatgtcctggtccatcttgagaaacaagatgttagcctatttgaggtggaactcgatcgcaagtataagcaagttgacatgacaagatgggatatacaacaatttggaaatgaactacatgaattcttacaacacaagaggtacttgatcgttgttgacgacatatgggatgctagatcatgggagacaatcagatatgccttgaaggacaataaccgtggaagtagaataatcatgactactcgtaattttggggttgtcactaaagtagaagaggtttacaaattaaaacctctatctaatggaaactccaagaaattattctataaaagaatacaaagtcacgaaggagaaaacgtagatggtgaactgtctacccaaatcatagataaatgtgtcggcacacgattggctatcatggcaattgctagtttattgcttcaaagacagcagaggaagtgatcacgaggctaggtcgcttctgctgttccaaaagtaagacaatgcgactaggatacttccctaaaagtaagctgatcttccttagtatcttaagccacttttactgggcctatacataattccaggagatgctattctttatacacaagctagaatatgggagttgctaggtgaacggttagtccgtcatgtcgatcagtagggtagcctatatgaggtcggagaaagaggcgccaaaaagcttgtgaatagatgtgtgatccatccaatagagggcatatatgctcggtttgtggaagaattccgtattcgcgacattgtgtttcatctcatccgtacattgacaagagatgaagacttcattacccttttggactgtatcggactacttttattttcggttagtttaagaagagagaagaaaacaggggggcctcactctaactgcaagctacgccgactggctgtacgcaatcaccgtatgttgtgctttgaagacaccatggatacgtcagaggtgttgaggtcgcttaacattatatagtgtaatattatgataaaacccccacttaagagcttcaaagttagccgtatgctatgtatagaatacaacattttgcatatcaacctaaaacatctagggaatttgttgcacctcaaacagataccggtaattgatacgtctgtagatgtcctacctaaggaaatgtggcatttaagttctcttctgacaatggtgttaagccaaggtttgcaaggtgacacgttgcagtttgtgcagggtactgtagttgggaactgtatggtgtgaagctcgttcaataggcagcgagggatcagatcggaggtcctgacgtggacctaggtgatgtcctttaagttcatcaagtgatggactgagttgcctgcgcaagtggtactgccccgcaagtggaggaggttgagggcggtgaacatcacgttttcagaaaacatagaggagagtttgcaagaagcattggtgcaatctctgttcaatctgcggggactccaggaactagtgctttcttctgaaatgtggcagagttcttctaaaatgtggcatctttcttctaaaatgtggccgcggggaagccctatgtggggagactgggagccaccaaggcagctccggcgcctgactattgaaggcatcatcttctcacgacagcctggatcagaaaaccgctcctgcctatagagcctcaaccgcttatctcccgaactatccaagtatcaagcttatcagaacaaacaccgacggaatggcctcctcctcatctgtccatcccaacacagtctccgcgaattgatggggtatgctgttggtccggatgacttcaggaatctgaggttctgctatgtgggtacaatgcttgagtttcatatgggtgccatgccaccaaggcttgaagagctgcagtttggagtttatgcagggttctgtagttggaaacacaatggtgtgctgttggagcagttcccaacaatggatgttgttatctgtattgactcctacctttataagctgtcatatattttctaaaaactatctgcagttgattttgtgtgaagtgtacttttactggcacgggccacgtatttccttggaaacgaccatgtggagttattttttccccgtccaaccataaaaatggttcgagtatatgaagaaagtaacttatctattgaagagcaggagacttgggtgaggctgttctcttcgagtctgcttaagaaaatatgttgtcttaattatatatgttcttgggtactacttactcacctgtatgtttgtgtactgcatttctcagcttcagcgacagattgaagagcttcagcgacagattgaagagcttcagcaacagaaagtggaatccgagtttcatcgtaaccatccgaatatcaaactgaccagaaaaaacaccgacgaaatggcctcttcatctgactatcctgacacatagctcaagaaattcgtgtctcttgtccaatccttgcaatccagcagcaggtaaacgtgagttgtttaagtacggaagagataggtcctgttcagccagatgattacaagcattcgcagggcttgttagatttgtggttcttagtctaaaatcacattgaagagggagatgaacacaagtgatgcagtttatgtgttatctacatttgtctctatttttgtaagatggccatatatttcctcgaaagtgatcttgattgattatgtgtgaagtgtatttttttaatgacatgggtcatgtatttccttggaaacggccatgagattggttgtgtatttgcttgaaagatgaggatgatataattttccttgaaaataatcatgagggtatttgaaccgt

SEQ ID NO: 59031 - DNA, 474 bp, Zea mays
  Clone ID: MRT4577_153831C.1
agcagaatacttcccttcgtctgcttgccagagaccgcagccatggacgatctcccagatctcacgcatattcctggccagtacttctcctggccgacgtcttggccgccgcccaagatgtgcttgcggacggccacgacgtggtgtgccttaccggttccacgttacctatggaggtctgacaggaccgaggcgccctcgtaaccatctacctgccctggagtgatcactgtacgaatgttgttcctgattctcatacatttgtggcccgtcttactatagggacatgagcatggactgctctggtccgatctacggtgagacacatgcctactgcgctgctggactggaggtacaggatttctaccaatcacatggcacctgcagggatcctacacgcccacagtgtctgatgcgcacagtattattgtggagcgccgtgcgtgaccgtatggactctgactgatatgcaaa

SEQ ID NO: 59032 - DNA, 1784 bp, Zea mays
  unsure (1)..(1784): unsure at all n locations
  Clone ID: MRT4577_153832C.1
ccgggtcgaccctgcgtccggtttgctgtgtgctgtctatagaaaacaactacgtacccatcagcctaaagcatctgggaagctgttgcatctcaagttactagagatattttacacgcctattgatgagctccctaaggaaattgggcatctgaggtctcttcagacactgacattagtccgtactggactagacgagctgccaccggttgtttgctcgcttacacggttgatgtgcctgatagccctagggttcgaaaggttgccaactaacaggatggggaacctaacgtccctggaggagctacgactacatagggtagttggccggagtgccacccaagccctagtggcagagcttggcaagctgacgaggttgagggtggtcagcatcgccttttcagagcagctagaggagagctcgcaagaagcattggtgcaatctctgtccaatctgcggggactccaggaactagcgcttttgtctgaaatgccacagcggggaagcgatacgtggggagactgggagccaccaaggcagctccggatcctgtttattaaatacatcgacttctcacggcagcctcgatggatcagccgctcctgcctgccacgcctctgctccttatctctggtggtgtacgctcttgaagcacaggacctagataatctagcgaggttgccagagctccagtacctcacgctagatggtctcagctggcctccaaggtatactgttggcccagacgacttcaggaatctgaggttctgcgatgtgagcacaacgttcgagtttcgtaagggcgccatgccaaggcttgaagtgctgcactttggagtttatgcagggtactggagttgggaaaagaatggtgtgccgttcgagcagttcccaacgaaggatgtgatcgaagatcttgacttggacctggataacgtccttttacttcagcaagtgatggtcaaagtcgactgctcaggtgctactgccgcacaagtggaggaggtggaggccgtggtcatgcgtgccgtggaaaatcatgccaaccgtccaaccatagtaatggatcgagtatatgaacaaaatatcctatccgacgaagagcgggaggctctgctttggcgacacattgaagaggattgctgcgtgcgcacgatgaaggataaatctgatgctttcttcatcagccagctgcggaggtatcgacatcttcagaaagccattattttcatcgactgttcgggtgccagcatgtgtgaggtgcagaaagtggaagcagcttttagacatgcagccgaggttcatcctaaccatccaagtattgaacttatcagaacaaacaccgacggaatggcctcctcctcatctgaccatcccaacacagagcccaggaattgatggctcggtttgtcagatccttccaacccaggagcaggtaaatgtgagttgcttaagtaccaaagagagaggtcctgttcagcaagatgattagaagcattggcaattggcatggcttgttaattagattcgtggttcttagtctaaaatcacattgaagagggagacggacccaagtgatgcagttcatgtgttatctgtatcagtctctgtttttataagctgtcatatattttctcgaaactatcttgtgttgattttgtgtgaagtgtacttttaatggcacgggccattgtgtatttgcttgaaagataaggatggtattatctttgtatttgaactctaaatgcttaaatgaagtgatcattctggatgggggttnaag

SEQ ID NO: 59033 - DNA, 1226 bp, Zea mays
  Clone ID: MRT4577_153833C.1
gaagagagtttgcaagaagcactggtcaaatctctgttcaacctgcggggactccaggaactatcgctgtcttctaaaatgtggcagcagggaagcactatgtggggagactgggagccaccaaggcagcttcggggcctgatcgttcaaggcattgtcttctcacgacagcctcgatggatcaaccgctcctgcctgccacacctctgcttcttatgtctgatggtgcacgctgttgaagcacaggacctagataacctagggaggttgccagagctccggtacctcaagctagagggtgtcatctggcctccaagggtactggagttgggaacacaatggtgtgccgttggagcagttcccagtaatggatgtgatcgaagatcttgacttgggcctggataacttgctttcacttgagcaagtaatagtcaaagtcaactgcttaggtgctactgctgcacaagtgcaggagctggaggctgtggccatgggtgccgtggaaaatcatgccaaccgtccaaccataaaaatggatcgagcatatgaagaaaatatcttatctgatgaaaagctggaggctctgcttcagcaacacattgaactagaactagaaggcggcgtgctccagctgaaggataaacctgatgctttcttcatcagccagctacggttgtatcgacatcttcagaaagccgttatttcctacgactgtgcgggtgccagcatgtgtgaggtgctgaaagtggaagcagcttgtagacatgcagccgaggttcatcctaaccatccaagtattgaactgatccgaacaaataccgatgaaatggcctcctcatctgaccatcctaacacagaggtttgtcctagctgcttgaatgtccaacccagccgcaggtaaacgtgagttgtttaagtacggaagagacaggtcctgttcagcaagatgattacaggcatttgcagggcattttggatttgtggttcttagtctaacatcacattgaagagggagatgaacacaagtgatgcagtttatgtgttatctacatttgtctctatttttgtaagatggccatatatatttcctcgaaagtgatcttgattgattatgtgtgaagtgtattttttttaatgacatgggtcatgtatttccttggaaacgaccatgggactggttgtgtatttgcttgaaagataaggatgatataatttccttgaaaatc

SEQ ID NO: 59034 - DNA, 2990 bp, Zea mays
  unsure (1)..(2990): unsure at all n locations
  Clone ID: MRT4577_153834C.1
aattcggcacgaggcccaatcccgtgttctagccacggccgcttgctcgcacgcgcccgcgccgccgttctacttccaattcaagctcgcctcggctctccagcgccatcttctcttcctctcactccctggcgtcacctaaccggtccgattctgggccgatgtcggtcgccatggtccgacccatggtcggaggagagcggagaccagtgaaggccttgcgcagaagagtggcggggaggagaagcgacggggaagcgcgctgctgcgctcacatggccgaccaaggtacttgatcgttgttgacgacatatgggatgctagatcatgggagacaatcagatatgccttgaaggacaataaccgtggaagtagaataatcatgactactcgtaattttggggttgtcactaaagtagaagaggtttacaaattaaaacctctatctaatggaaactccaagaaattattctataaaagaatacaaagtcacgaaggagaaagccttgatggtgaattgtctactaaaatcatagataaatgtggcggcataccattggctatcattgcaatagctagtttgttggttgaaagatcacgtgaggagtggtcagaagtgtacgacaagattggtcatgggaatgaagacaatacaacaaagataatgtcatacagctactatgatctgcctccttatctcaagccatgtctgctgcaactaagcatatatccagaagactacctcattaatgcaaaagttgcaatatggatgtggataggtgaaggtctagtccatcttgagaaacaagatgttagcctatttgaggttggagaaagatacttcaaggagcttgtgaatagaagcatgatccagccgagagaggacaaatatgatcggtttatacaagagtttcgtattcacgacattgtgtttgatctcatctgtaagttgtccaggatgaagatttcattacccttagcgggcaacattcatctcaggatagtttaagaagagagaagaaaacaggtgtgcctcgctcagactgcaagctacgtcggctagccgtccgaaatcaacatgtgcagcgcttccctgaagaaaccatggacatgccagaggtgttgaggtcacttagcattacagattataatattgcggttatggccccaattgatagcttcagggtttgccgtgtgctgcatatagaaaacaactacgtacccatcaacctaaagcatctagggaagctgttgcatctcaagttcctacagatatctggcacgactattgatgagctccctagagaaattgggcatctgaggtctcttcagacactgatattagccgatactggactagacgagctgccaccggctgtttgctcacttacacggttgatgtgcctgatagccctggagttcgaaaggttaccagctgacaggatggggaacctaacgtccctggaggagctacgactacatangggtagttggcccggagtgccacccaagccctagtggcagagcttggcaagctgacgaggttgaggggtggtcagcatcgccttttcagagcagctagaggagagcttgcaagaagcattcgtgcaatctctgtccaatctgcggggactccaggaactagagcttttgtgtaaaatgccagagcggggaagcgatatgtggggagactgggagccaccaaggcagctccggcgcctgattattgaaggcatcgacttctcacggcagcctcgatggatcaaccgctcctgcctgccacgcctctgctccttatctctgatggtgcacgctcttgaagcacaggacctagataatctagcgaggttgccagagctccagtacctcatgctagatggtctcagctggcctccaaggtatactgttggcccagacgacttcaggaatctgaggttctgcgaagtgggcacaacgttcgagtttcgtaagggcgccatgccaaggcttgaagagctgcactttggagtttatgcagggtacagtagttgggaacagtatggtgtgccgttcgagcagttcccaacgaaggatgtgatcgaaggtcttgacttggacctggataacgtccttttacttcagcaagtgatggtcgaagttgactgcgcaggtgctactgccgcacaagtggaggaggtggaaattcgcgtcagcgtcgacgtttaaaatcatgccaaccgtccaaccataaaaatggatcgagcatatgaagaaaatatcttatctgatgaaaagctggaggctctgcttcggcgacacactaaactaaaaggcggcgtgctccagctgaaggataaacctgatgctttcttcatcagccagctacggttgcatcgacaccttcagaaagccgttatttcccacgactgtgcgggtgccagcatgtgtgaggtgctgaaagtggaagcagcttatagacatgcagccgaggttcatccgaaccatccaagtatcgaacttatcagaacaaacaccgacggaatggcctcctcctcatctgaccatcccaacacagagcccaggaattgatggctcggtttgtccaatccttccaacccaacagtaggtaaatgtgagttgcttaagtaccaaagagagaggtcctgttcagcaagatgattagaagcattggcatggcttgttaattagattcgcggttcttagtctaaaatcacattgaagagggagacggacccaagtgatgcagttcatgtgttatctgtatcaatccctatttttataagctgtcatatattttctcgaaactatcttctgttgattttgtgtgaagtgtacttttaatggcacgggccacgtatttccttggaaacgaccatgtggaacatctttcctgagatgggctgtgtctgagatggggctaaagataaggataaagataaggatgatattatctttgtatttgaactctagatgcttaaatgaagtgatca

SEQ ID NO: 59035 - DNA, 351 bp, Zea mays
  Clone ID: MRT4577_153835C.1
aagatcctgagcatcattttgttagataggatgctcttttcctattttcctatgagtatcctctcacgggggaaggcatgttctggtgtaagcgtgcgcggatccatctgtagacctcataatgttgatacaatttacttatgtccctaggaggcgtagctaaactcattttatacactccagagtgattaccatatgttgataaggcgacagtaactataataggtgatattcaactttacatagttggtccataacttgggataaatcatcaaagtgtggctgaagctgtccgttttacgcatttaatcaaatctgcggtccaactgtcacaggcaaggttgataacag

SEQ ID NO: 59036 - DNA, 621 bp, Zea mays
  Clone ID: MRT4577_153836C.1
gccggccggtccgggacctgcaaacaccatctaccatcttgtctctgagagagagcaacatactctctgatagctaggagcaggatgactggcgactgcgattggcggtctccatgatctctctcgcagctctggcggaggagactcacggactggcgaccctacgagcgccgcggctcctccttccgcgtcgtctgctccgagaagaagataaaaaccgacaagccctactcgattggggctggcctgaccgccgacatcgcacgccaacggtagaaatgccaagggaaatggcgtggacaaccccgtcacatgatgatggcatcgaacgtacgaccgaatacatatcattataatatatctatgtctgggctccgaccgaagactactacgtcagggcaacctgtgtgctacagatactggaccgtgagccgcgctggaaacatagacaaacagagcctctcctcgtctactatcatctctgtgcatcgtccggctaacagatatccgaggtctgggcttcttgcgagtctacatgcatgatgagggagcctgtcgattctgtagcctccatgtatgatctgccttcgtcatgtatcaatagtcactgctactcttcag

SEQ ID NO: 59037 - DNA, 789 bp, Zea mays
  unsure (1)..(789): unsure at all n locations
  Clone ID: MRT4577_153837C.1
gtcgggcagctaggccgaaacccggaaggcccaagcccaagcccaaaccctcccactcctctctctaatcccccctaactctcctcccctcccgtcggcggcagtacaatcgtcaaccctaattcgcagcctggacaccaccgccgcctcgagcccctttaactcgaaacccgcctaaatcctatccctcccggccgtcatggcgtcggcagacgaagcgaatgcggcggccgaaggtacggaggggaagaactggcagcggaaggggaagcacaagaaggagaagccgtgggacgatgaccccaacatcgaccgctggacggtggagaagttcgacccctcctggaacgagggcggcctgctggaagtcagctccttctccaccctcttcccccagtaccgagagaagtatctgcaggagacatggccgatcgtcaagggcgcactcaaggagtttggagtctcatgcgagctcaatttggtggagggatccatgacggtttccaccaccaggaagaccagggacccctacattattctcaaggccagggacctgataaagctcttgtcgcgaagtgtccctgcaccccaagcaattaaagtgctcaatgatgagatgaactgtgatattgtcaagattggtagcatcataagaaacaaggaaagatttgtcaaaaggagagaacgccttttgggccctaacctgtcgacccttaaggctatagagattttgactggctgctacatcttagtacagggaaatactgtggctgccatgggntcctttag

SEQ ID NO: 59038 - DNA, 1849 bp, Zea mays
  Clone ID: MRT4577_153838C.1
cgcttcgtagctttagagtttgtcgtgtgctatgtatagaatacaactctgtaccaatcagcataaagtatctaggaaagttgttgcatctcaagttcctagagatatgtggcacacctgttgatgagctccctaaggaaattgggcatctgagatctcttcagacactgctattagtcaatattggactagacgagctaccaccgactgtttgctcgcttacacggttgatgtgcttgatagccgaggggttcaaaaggtttccagctgacaggatggggaacctaacgtccctggaggagctacgattacggatggtagttggtcggagtgccacccaagccctagtagtagagcttggcaagctgacgaggttgagggtggtcgacatcaccttttcagagcagctagaggagagcttgcaagaagcattggtgcaatctctgtccaatctgcggggactccaggaactaacgcttttgtttaaaatgacacggtggggaagcgatatgtggggagactgggagccaccaaggcagctccggcgcctgattattgaaggcatcatcgtcttctcacgacagcctcgatggatcaaccgctcctgtctgccacgcctctgctacttatctctgatggtgcacactcttgaagcacaggacctagataatctagcgaggttgccagagctccagtacctcactctagatggtctcagctggcctccaaggtatactgttggcccagacgacttcaggaatctgaggttatgcaaagtgggcacaacgttcgagttttgtaagggcgccatgccaaggctcgaagtgctgcaatttggagtttttgcagggtactggagttgggaagagaatggtgtgccgttcgagcagttcccaacgaaggatgtgatcgaagatcttgacttggacctggataacgtccttttacttcagcaagtcacggtcaaagtcgactgctcaggtgctactgccgcacaagtggaggaggtggaggccgtggtcatgcgtgccgtggaaaatcatgccaaccgtccaaccataaaaatggatcgagcatatgaagaaaatatcttatctgatgaaaagctggaggctctgcttcggcgacacattgagaagcattgctgcgtgcgcacgatgaaggataaatctgatgctttcttcatcagccagctgcggttgaatcgacatcttcaggaagccactattttcatcgactgttcgggtgccagaatgtgtgaggtgcagaaagtggaagcagcttttagacatgcagccgaggttcatcctaaccatctaagtatcgaacttatcagaacgaacaccgacggaatggtctcctcctcatctgaccatcccaacgcagagcccaggaattgatgtctcggtttgtcagatccttccaacccagcagtaggtaaatgtgagttgcttaagtaccaaagagagaggtcctgttcagcaagttgattagaagcattggcatggcttgttaattatatttgtggttcttagtctaaaatcacattgaagagggagacggacccaagtgatgcagttcatgtgtcatctgtatcagtctctatttttataagctgtcatatgttttctcgaaactatcttgtgttgattttgtgtgatgtgtacttttaatggcacagggccatgtatttccttggaaacgaccataagagtttgtatatggacttattttttctcccattttctttcttgagatgggctgtatatttgcttgaaagataaggatggtattatctttgtatttgaactctaaatgcttaaataaagtgatcatcctggatggagat

SEQ ID NO: 59039 - DNA, 461 bp, Zea mays
  Clone ID: MRT4577_153839C.1
ggacgccctttttttggtgtgttgtccttaattctttattggtggtgtcaacttacaacactctttctttcttattcttttttttttccccccccaaaaatgacatcaaacaacctcctatcaatactgtttttttttgtccttcaacaaaatttttttggtttgaaaaggggcacatcaactcgccaaccaaaacttcctcgtaaatgaatttatcccccaaacccccgactttctgacaagcctctttttccatgccgaagatcccccttccctcagatccaaaccattacatgttctttttttggatacccataccccccccccttttttcccaaacccctcccttttgtttgctatcttcactatcagcgcaattccccaccctatcttttacccttcctccccgggacccccctcttgaacccccttcattctcttgcccaccccctttcttccca

SEQ ID NO: 59040 - DNA, 447 bp, Zea mays
  Clone ID: MRT4577_15383C.1
tccacgcgttcgggcctcgccattatccagcttcgagagcactggatcctttggttccaactgcattgtggatttttggtgccgttgatcgagccacgcgtgcttgaggcttgagcagttgaacacgcggggacgcaggcggcaggctagcgcacacccgcgccgtcgcgacgtgacccggcgatggggtgcgcaacctccaccgaggcgcgccgcgacatggtgcggaccggcgccggcgcccccccgcgccggagcttctcgctaccctctgtcgaccgccagcggctgcggctgaagaccgtgtcgatgctcggcaacctcggcctcgccggcagcagcgcccgtcactccagctcgtgcaggcacgcgacgctgtcggtggaggatttgatgaagagcgacaacgaccatgccgcggacgcggtgctcctcggcgacgacgcg

SEQ ID NO: 59041 - DNA, 1094 bp, Zea mays
  Clone ID: MRT4577_153840C.1
cccacgcgtccggggtagcctatttgtggttggagaaagattttcaaggagcttgtgaatagaagcatgatccagccgatagaggacaaatatgatcggttggtagaagtattccgtattcacgacattgtatttgatcttatccgtaagttgttgaaagatgaagacttcattacccttttggacagcggtgggcaacattcacctcaagctagtttaagaagagagaagaaaacatgtgtgcctcgctctgactgcaagctacgtcggctggctgtccgaaatcaccatgtgcagcgcttccctgaagacatcatggacataccagaggcgttgaggtcacttaacattatatattgtaatattgcgattatgaccccacttcatagtttcagagtctgtcgtgtgctatgtatagaatacagctatgtaccgatcagcctaaagcatctggggaagctgttgcatctcaagttcctagagatatttaacacgcctattgatgagctccctaaggaaattgggcatctgaggtctcttcagacactgatattagtcgatactggactaggcgagctgccaccggctgtttgctcgcttacacggctcatgtgcctgatagcctatgggttcgaaaggttgccagccgacaggatagggaacctaacgtccctggaggagctacaactacatagggtggttggccggagtgccacccaagacctagtggcagagcttggcaagctgacgaggttgagggtggtcagaatcaccttctcagagcagctagaggagagctcgcaagaagcattagtgcaatctctgtccaatctgcggttactccaggaactagtgcttttttctgaaatgccagagcggggaagcgatatgtggggagactaggagctaccaaggcagctccggcgcctgattattgaaggcatcgtcttctcacgacagcctcgatggatcaaccgctcctgtctgccacgcctctgctacttatctctgatggtgcacactcttgaagcacaggacctagataatctagcgaggttgccagagctccagtacctgcccgggcggccgctcga

SEQ ID NO: 59042 - DNA, 601 bp, Zea mays
  Clone ID: MRT4577_153841C.1
gcgggattccaatctcgtcttgtgttgttcggagcgggcagcagcacacagccccatcccaatcctagtcgatcttcttcccctcctcaaggaggatactaagctcacccaagcggacgataaagaaacttgctagacgcctcctgaaggcgacgccatggcagacttgtaccctcgctttagatgcccatcctgcatccaccggattaccggatagtgccgtattgacacagaataatctagacgggcgaagcatcttgcttattcagtcacgaaaactttagcacaactgttaatgcactcactgaccctatcgatatatatagagaatggattgatgagagcgatcgtgacaacaatgttgaatgctacgacaacgcgtgagatgggcccatgcaaggaagccgctgcctacaactgcccagtatggagccacgtatagtagagtgccataccccatagacaggcatggtttgaaagaacgtacaggctgactgatatgccagtaggcacctgtatagcagttaatgaactacactgagcctatactatacatatgtggacgaactgatgagggggcacgtgtgaaccctgtctaacg

SEQ ID NO: 59043 - DNA, 1378 bp, Zea mays
  Clone ID: MRT4577_153842C.1
cggacgcgtgggtgcggttactccaggaactagtgcttttttctgaaatgccagaggggggaagcgatatgtggggagactgggagctaccaaggcagctccggcgcctgattattgaaggcatcgtcttctcacgacagcctcgatggatcaaccgctcctgtctgccacgcctctactccttatatctgatggtgcacgctgttgaagcacaggacctagataatctagcgaggttgccagagctccagtacctcatgctatttggtttcagctggcctccaaggtatactgttggcccagacgacttcaggaatctaaggttctgcgaagtgggcacaacgttcgagtttagtaagggcgccatgccaaggcttgaagagctgcaatttggagtttatgcagggtattggagttgggaagagaatggtgtgtcgttcgagcagttcccaacaaaggatgtggtcaaagttctcgccttgggcctagataacctccttttacttgagcaagtcacgcgtccttgtctacggcttaggtgctactgccgcacaagtggaggaggtggaggccgtggtcatgcgtgccgtggaaaatcatgccaaccgtccaaccataaaaatggatcgagcataggaagaaaatatcctatccgaccaagactgggaggctctgcttcagcaacacactaaactacaaggcggcgtgctccagctgaaggataaacctgatgctttcttcatcagccagctacggttgtatcgacatcttcagaaagccgttatttcccacgactgtgcaggtgccagcatgtgtgaggtgctgaaagtggaagcagcttgtagacatgcagccgaggttcatcctaaccatccaagtattgaactgatcagaacaaataccgatgaaatggcctcctcatctgaccatcctaacacagagcccaggaattgatgactcggtttgtccaatccttccaacccaacagtaggtaaatgtgagttgcttcagtaccaaagagagaggtcctgttcagcaagatgattagaagcattggcatggcttgttaattagattcgtggttcttagtctaaaatcacattgaagagggagacggacccaagtgatgcagttcatgtgttatctgtatcagtctctatttttataagctgtcatatattttctcgaaactatcttgtgttgattttgtgtgaagtgtacttttaatggcacgggccatgtatttccttggaaacgaccatgtggacttattttttccccattttctttcctgagatgggctgtgtatttgcttgaaagataaggatggtattatctttgtatttgaaaaaaaaaaaaaaaaaaggcccctagggcc

SEQ ID NO: 59044 - DNA, 312 bp, Zea mays
  Clone ID: MRT4577_153843C.1
ggaggttgctaaaatgttgaaccggcagaaacaggttttaacagagctgtttggggtttgctcattagccaaaatcaattcataaccaggggaacattcccaattgtcccagtgggaatccaatccccaggaattgaagatgcatgcctccataaatttaaagactcttttcctagggaaaacatgtctaattcctaccaagactggacaccctagctttaggggatgtttaatttccaaaggcgacgcccttaattaactccaaagttcggggggccaaagttccttgggaaacccgcccccttttttttt

SEQ ID NO: 59045 - DNA, 736 bp, Zea mays
  Clone ID: MRT4577_153844C.1
gtgaaaaaaatatcctatccgacgaagagcgggaggctctgcttcggcgacacattgaaaaggattgctgcgtgcgcacgatgaaggataaatctgatgctttcttcatcagccagctgcggaggtatcgacatcttcagaaagccattattttcatcgactgttcgggtgccagcaagtgtgaggtgcagaaagtggaagcagcttatagacatgcagccgaggttcatccgaaccatccaagtatcgaacttatcagaacaaacaccgacggaatggcctcctcctcatctgaccatcccaacacagagcccaggaattgatgactcggtttgtcagacccttccaacccagcaacaggtaaatgtgagttgcttaagtaccaaagagagaggtcctgttcagcaagttgattagaagcattggcatggcttgttaattatatttgtggttcttagtctaaaatcacattgaagagggagacggacccaagtgatgcagttcatgtgttatctgtatcagtctctatttttataagctgtcatatattttctcgaaactatcttgtgttgattttgtgtgatgtgtacttttaatggcacgggccatgtatttccttggaaacgaccataagagtttgtatatggacttatttttttcccccattttatttcttgagatgggctgtgtatttgcttgaaagataaggatggtattatctttgtatttgaaccct

SEQ ID NO: 59046 - DNA, 295 bp, Zea mays
  Clone ID: MRT4577_153845C.1
ttaaggggtgggtcctgtataccaaaaggtgcaatttgtaccgatacactgatgccgaattgatgcgcaaccaccagaccgttctgtcatatcctgatgctgctggttcattgtttcagccacagcacatgaggaaaacagattataacacctgtgtctagactcctagcagacaaaaccttcatccttgttgaacatggtcagggctaactcctgccagatggttgggagggtgcctgctatgaggacgtatgtctgtcagaggaggctgcatatcttccccatccacatcccc

SEQ ID NO: 59047 - DNA, 371 bp, Zea mays
  Clone ID: MRT4577_153846C.1
aaaagtccaaacagaaaaccccacagggacccaagccataccgctgcaaaagagcaaggggcacaccacagaggagacaccaggtcgaaaagaccatcacaagccaaggcgacgactcaggacacaaaaaccaccgatgaggccaagaccccgacaacgaagggcaggcccccgaacaagaaccggaccacccagaatggcaagcaccgcgaggacggacacaaaccaggcggcacaacccccagagggagagccccccccagaggggacgccgcctcaggggaggcccgcaaatccacgccacaaccctcacaggaaagaccaaaccccgaagggggcgcccccgcccccaaagacacgccccaagcccc

SEQ ID NO: 59048 - DNA, 478 bp, Zea mays
  Clone ID: MRT4577_153847C.1
gaaagccgttatttcctacgactgtgcgggtgccagcatgtgtgaggtgctgaaagtggaagcagcttgtagacatgcagccgaggttcatcctaaccatccaagtattgaactgatcagaacaaataccgatgaaatggcctcctcatctgaccatcctaacacagagctcaggaattgataactcggtatgtccaatccttccaacccagccgcaggtaaacgtgagttgtttaagtacggaagagacaggtcctgttcagccagatgattacaagcattcgcagggcttgttagatttgtggttcttagtctaaaatcacattgaacagggagatgaacacaagtgatgtagtttatgtgttatctacatttgtctctatttttttaagatggccatatatttcctcgaaagtgatcttgattgattatgtgtgaagtgtatttttttaatgacatgggtcatgtatttccttgg

SEQ ID NO: 59049 - DNA, 132 bp, Zea mays
  unsure (1)..(132): unsure at all n locations
  Clone ID: MRT4577_153848C.1
gcggcggccgtttgcctcgacgaggtcctctgggttgcccgcctcntgcgggcgtgccagtggtctttgcggacggcncggcngccgtttgcctcgacgaggtcctcaagctctgcctggagatgaagactc

SEQ ID NO: 59050 - DNA, 367 bp, Zea mays
  Clone ID: MRT4577_153849C.1
caggcaccggcccggaataaattcccgggccgacgatctcattcagacggcggccgcccacaacaaggggggggggttaattaaaagacgagaacccagcctaccacgaaagacacaacggggacaagagccacacgggggacccaaaccagcagacaagaggaggggaaaaagcacccaaaaaccaaacaagaagcgccaaagccagacaaccgacaccacggcgccaacgaaagcccctaaaccacgacaggaggcgcaccctgacgaaaaacgcaggggacaccaccatggcgaaggccgagagacaggcgaacgccacggagcaaagcgcccgagaaggcacgggccacggacagaacaccgc

SEQ ID NO: 59051 - DNA, 335 bp, Zea mays
  Clone ID: MRT4577_15384C.1
aaaaaaacaaaaaagtttttacccaaattcaaaagggttttgtttaaactttaaaaccccagcccccaaaatggcccccccttttttttcattggggtattttttggttggttgttaaaaaatttaacctttacctttgtttttttaacccaaaaaagggtgtttattaacttttttgggaggatgggaaattcctttttcaacttcttggaaatcttttccattttcttgggtttaccaagtttttttttttttaaaaatgttttttccaatccaaccttcctaaattttggaaaaagggggattacctttaggggttttttccaaaaattggg

SEQ ID NO: 59052 - DNA, 353 bp, Zea mays
  Clone ID: MRT4577_153850C.1
gctggccaagaagacgcttgcatcagacgcgacggcgacccccaagtccagggtcacgaggaggaagacgctctgcgacatcaccaacctgagcaagcgcaagccggtcgacgtgccgggcgagccggcgtgcccggaggcgccggcaccggcggacgcgggcggccttgaggggtttgcgcagctagtcgaggagaaagcggaactcgtgaggctcctcgcggcgagagacgagatcatagagctgagccgggctgagattcagaagctgcgccttgccaactgggaacttgggcggtcccattcccagttgatggcggtggttaacctcgggaggaaattgttgaaagtgt

SEQ ID NO: 59053 - DNA, 541 bp, Zea mays
  Clone ID: MRT4577_153851C.1
tttttttttttttttttttttttttttttttttttttttttttttttttttttttttttttttttttttttttttttttttttttttttttttttttttttttttttggggggggaattcaggtgggtaaaccattttattaaaaaaggggggggccgaggggggaacccccaaattttatttgcaaaaaaaaaaaggggaaaaaagctttttggaaagcactttttttaaaaaaaaagggcaaaagagcttaattttttggaaaaaccgggggaaaacccaaaactgaaaaaaaaaaacgggaagggaaaaaaaaaaaaaaagggtgctcaaccacgggaccctaaaaatgggggggtaaaggacgcccctaaaggaaactttttgggaattaaaaaacaacagggtgtcatggattgattggaaaaaaactttaagcttgagaaaccccaggtaaaaccccccgaacttttccttttggggaaaaaaaacccagtttttactagccagcccaattttccaggaaagggttaatttaacc

SEQ ID NO: 59054 - DNA, 650 bp, Zea mays
  Clone ID: MRT4577_153852C.1
gcgatgtgatatttttttttcaaaataaatacactacggctgaatcaaccagcatatatcatcactgtaccagattatccggcggacaagtgagcaaagcatatacgcagatacgctcagctgggcaggtaagggtgcaggtccttgcaatccgaaggtgtcattaaacaaagcttccagttccagagcagcatccgctgcaaacagtctacacaggtgctcgcgatctatccgaatcgctgggctgcatgcacatgggcacgagcaatcagcaccgggaaacagaatcattctgataacatatttggctggctgcacgctgggctatcatcgacatgaagacgtgccgcctccagatcacgggatgaggcgcaagatctggcacccgaatccactgcccatatcaccggagctgcagaggaagtggagggggctgcgaacggagaccggttaattgctctcaggattaattgctctcagggttcaggaatacaggtacatcccattctcttgtagcaccacggttacagattgaatagtctgctctctgcagcagccgaatcggaggaagacgccgagcggcgggaggatgatgtgcagcagcggtcggggtcggggacaaatgggtggtggtttggtgtaggtgtgta

SEQ ID NO: 59055 - DNA, 715 bp, Zea mays
  Clone ID: MRT4577_153853C.1
ggcccacaaaatcccaaggcctctccctcctctctcctcgcttctcttctccttctccgaccgaccgccatggccctggactccgtcccttcctaccccagcgacctgggatccagcggcagggcaaccaggacccagcaaagaatccggaaggaggagcggacgtggacggcggacacctacgcgccgtacgacgacgggcatcagtggaggaagtacggcgagaagaagctctccaactccaacttcccgaggttctactacagatgtacctacaagactgacctgaagtgccctgcgacgaaacaagtccagcagaaggacatgagcgacccaccattgttcacggtcacttacttcaaccatcacagctgcaacaccacctcgaggcccatcggcagcgccccagacaccactgaacagtcgtcctcgaggagagcagtgtccatctgctttgggtcgcatgccaccggcgagcagccgacattcctaacgttgccgggcacactgcagtctccagcgagcacaaccaaccaacagagcgacagaggcgcttacggtcaccagtttcagtggacagacacatcaccatcggcaggcgatgccccagtcaagatggagaccgacagtcttgctggaacagacgcttcgtctggcgctgctagcggtcatgctctgtcgaggacactgctgccgatcggccagtcgagatgca

SEQ ID NO: 59056 - DNA, 238 bp, Zea mays
  Clone ID: MRT4577_153854C.1
gttaattataaggtacacataatgattgttacatcaaacaatgcatgtaagggacaatgttgttacatcttacaaatgtaatatgatctgattgtaatttaaggggggacaagaaccccacaggatttatccgcctgggacacggggatggtaaagaaatctgcccggcctgtattggtgaggatcccgcaggggcaaaagaaatttgatacgaagacagatattgggagataaaacc

SEQ ID NO: 59057 - DNA, 945 bp, Zea mays
  Clone ID: MRT4577_153855C.1
aaacaccaaatatataagaagcagcttatatatatatatggatcccttgggattgtaactgtgatgactgaatcactgattaggacacatagtatatagtatacatgcataaaggacttgcttgatttccaggatcatctggggggtgggtttacaagcacacgtaggcagcaagaaaagatgaagagaatccctatctcaaaactcctaccaatactatctttctctctatatatatgtgtatataatgttatacccagcacacacatgttttgcttacgcttattcccaaaaaagtatcttgtgtactccagtgtagtgtaggcacgaccgtcactgatccagtgacttccacaagctagagctagacatctgaacgaccgatgccaggcgctgtcgtacgtgcatgctagagatcgctgccttccggtatgctctcgagcgccggccgccaccctccgcagcagacctcctccagttctcgattgcgcagcacgagagacgacaccacgtcgtccagcgacacgccctccctgtcgagcaccttcttcagctcctgcttgctgatcaccagcttcaccctgacgacggcagcggcgccagctgcagcagcgtcggcgtcgacgacgacggcgtcggccgccttactcaggctgcccgtcggggatggcatcttgaggacctcgccgccgccgccgcccacgctcatgatcttgatctccttcctgtcttgaatcaccaggcagtttcccatgatgatggctagctagctggtcgaagaggtggctgcaaaggagctacacacacgcgcacgacctatagagaattgtggcaagagttctgaagctctctctagctgttcttgtaagttggaaagaacaagatcacaagttttttttttctttctttcacaattgtgtgtgcacgatagtgggtaggaggttc

SEQ ID NO: 59058 - DNA, 871 bp, Zea mays
  Clone ID: MRT4577_153856C.1
ctctcttttccccttcccttcacgacctccgccagaggccagaggtaggacgctagggtttcgccgaccaccaccgtccaccgcgcgccatggccgaggcctcccggtaccagatcctggtgcggctcctcgacggccgcacccactgcctccggttctccacgcccaccgtctccggcgcggcgctcctcgacgccgtttccgcgctctcccgcgtccccgccgcctccctccgcctcgtcaccggccgcctcgacatctcgccctcctccgtcctcgcgtccttccccgacgggcaattcccctccgcgtccgcgctcctccgcctccgcggtggcaagggcgggttcggctccctcctccgtggggccgcctccaaggccggccagaagaagaccagcaacttcgacgcctgccgcgacataaacggccgccggctccgccacgtcaacgccgagcgccgcctcgaggagtggagggccgaggccgcggatcgccagctcgagaagcttgccgaggacttcctcaagaagaaggccaaagagtcaggccgcggcggcgcccgagctgccgaggttgacaagtatcttgagaagtaccgaaaggatgccgagagctgcgtcaacgccgtggaggagtcggtacgtgcctcccttgggaagaggaaggctgtccccaagccacgtgatgcaaagaagcttaaaatttggatgggcaaaaagaaagtagcagatgatgagagtgatagtgacagtgacagtgatgtggacgataatgagggggcagatgcaaaacccatagctcttgatcatgggaattactcaatgaatcaacaaaagtgaggaggaaaaggtgatctggcttcagttct

SEQ ID NO: 59059 - DNA, 188 bp, Zea mays
  Clone ID: MRT4577_153857C.1
aaaatagggcacaggaacaagcgaatcgagcggctcgacggactcgagctcgactgaagtcctttagcatacatgagtcggtgagaagcgcgcacatagtcgcgatagttccacatcaggatcggagtcacaagaatggaagagtaacaccggtccgatatatgcagcagtaagagcagcatgcgttg

SEQ ID NO: 59060 - DNA, 749 bp, Zea mays
  unsure (1)..(749): unsure at all n locations
  Clone ID: MRT4577_153858C.1
tgaattcggcacgaggcacaaccactgcgcgtgatcccatttcgaaacaaaaaaggaggagcgcgctcgcactcaactccgcggagccccaatcccagcgtcgcctgcggtttagatggaggcgcacggcgaccagcggtggctggtggattgcctgacggctacgctcgacaccgcgcgcgatgtccgcgccttcgccgaggagtcgctccgccaggcctcgcttctccctggatatggagctgcccttacaaaagttacaatcaacaaagagatctcgtttggtttacgacagcttgctgctgtcttactaaagcagtttatcaagcagcattggcaggaagacgaagagaattttgtgccccctgttgtttctgcttcagaaaaggtggtcatacgacagctcctgcttacctcattggatgattctaatgggaaaattcgcactgctattagcatggctgtagcagctattggacagcaagattggcctgaagactggcctgagttacttccggttctcttaaagttaattggcgatcaaagcaatgggaatggagttcgtggagcattaagatgcctagcccttctatcggatgatctagatgatatgtgtgttccaaagctagtgccagagctattcccatcactgtatagattaatatcatctnctcatctgtatgaaaattctcttcgtgcanaggctttttgcatagtccattcatgtanttctatgcttggatcaatga

SEQ ID NO: 59061 - DNA, 1110 bp, Zea mays
  unsure (1)..(1110): unsure at all n locations
  Clone ID: MRT4577_153859C.1
ccgaattcggccctagatccttggctcacgcgtgcaaattttgtctcttactctgagtcttgccggcgcaggatgaggggcggcgcgtcggcgcagaagaggtccccaagcgacaagttcggtggcggtgagaccgtgctagagattgtgcaggccagccagttcgcgcgggacatcgtgacggctgccggcgctacgaatcgagagcccccgaggaccccgaaaccggctcccaagaccaggaagccggcgacaggcgagctgacgcctctccgcgtgcggcgtgcccgggagaagcagagtcatcggcgtggcgccgcgacacggggcgctgacgccgccacgccgccgtcgcgcagccgcgtgcggtcccagatccagttcgagcctgtgtcgtcggtcgctgtcggccggccgttcgtgtccgccaaccgcgtttcccccaagaaccggccgtgggccaagaaggcggtgatgttcccgaaccccatgttccacgcctccacctctgccgccaccgacccgtgcgcgacgccatcgccttccaagaagcagaagcggctctacaagacacggtcccctgttgtggcccggcagacgccgcacaagttcctggtcaaagtcgtcaccgagcgcgctgggatccaagctcaggatgcacgggaaggccctgcccgcgagactcgccgccgtccgtgaaggcgcaggcgtcacctgcaaaaacgcggtgctgctcgttttcgccgtcaaggttggcaacaaggctcatgtcgcctatcaaagcgaggttgtcgctgggcaggagccgggacagcggcgtcggtgtcggcggtggcccgatgagcgggctgaagcagtggccaggtgttagcttgacggtgcgggtgttgagcaagatatcatcgaggtgatgatcttcgtttgtcttcagtgtcatgtgaagacgaggggtacagattggagagaagagaattgcgttgatcttcttcagaaataagatattctttgcntgggaaagctcctgtcttggggtgctttgacccacactcattacggttattntgtgatttttgttgccccttgggggctattcggggggggtcttctttg

SEQ ID NO: 59062 - DNA, 692 bp, Zea mays
  unsure (1)..(692): unsure at all n locations
  Clone ID: MRT4577_15385C.1
taggggcctttttttttttttttttcgaagaaatacaaaggatttctnttgtaaaagtgatgacgtcgaacgaacgtcgaaactttatacaagttatgacagtgttttatagaagtagagattaggtaaaaattgagctaatgatcagctttagtacgactgtgcgaaataaatttttttaagtataaatatatatctaatattatttaagccgacgttgtgatctataatctgaatgaacctaaacaataacataaactgttcacttattgaactctctacttctgcataggaaacttgactgtcatatgtcatcatccaagactttcaccccactagcaagcctcctacgctccatctgcgcgagactctgaggattccttatcgcgtccagcatcctgtcgaggagctgaacgaactcctggtgctgacgagcaacctggggatctgaaaaccggacgaggtgctgcggctcatgttccgtcctcccgatgtcgtccgtcttggtttgcggcacgtacgcgttgccgcacaccgaccgatccaccgccggcggaatagaacggcggagcgcctcgcctccgctgaagccgcggtggccgccggaaagacggctggcggactggatcccgatcctcccgagcaacaagcgcgacaccatgtttgccgaagagaaggtcgggggatgtggg

SEQ ID NO: 59063 - DNA, 1980 bp, Zea mays
  unsure (1)..(1980): unsure at all n locations
  Clone ID: MRT4577_153860C.1
ggcacgagcttccagctcgttgcgagctcccattgttgaccttcaccagcgccaccttccacgccaaggctacgacgacaatggtggcgaggagcccgaacgccaagccggacaggcagaaggctgcagccctcgccgcggctgccgcgctcaacccggctctcctcagggagacgctcaagaaggttgaccgatgcatggcacggctgcaggagctgcagtacacggtagccggcggcgccaaggtcgtctccggcgtcagtctcagcccccgcagcacgcgcgggtacctccggaccagcctccggtgcaagcaggagaccgtcaggatgaggggcggcgcgtcggcgcagaagaggtccccaagcggcaagttcgggggcggcgtcggcggagagggcgcgcagtggcgacgaatgtcgctgccggcgatgctgctcggcgagaccgtgctagagatcgtgcaggccagccagttcgcgcgggacatcgtgacggccgccggcgctacgaatcgggagcccccaaggaccccgaaaccggctcccaggaccaggaagccggcggcgggcgagccgacgcctctccgcgcgcggcgtgcccgggagaagcagagccatcggggtggcgccgcgacacggggcgccgacgccgccacgccgccgtcgcgcagccgcgtgcggtcccggatccagttcaagcccgtgtcgccggtcgccgtcggccggccgtccgtgtccgccaaccgcgtctcccccaagaaccggccgtgggcaaagaaggcggtgatgttcccgaaccccacgttccacgcctccacctctgccgccaccgacccgtgcgcgacgccgtcgccttccaagaagcagaagcggctctacaagacgcggtccccggtcgcggcccggcagacgccgcacaagttcctggtcaagtcgccaccgagcgcgctgggatcgaagctcaggatgcacgggaaggccctgcccgcgagacccgccgccgtgtcaccgccgccgcccgtgaaggcgcaggcatcacctgcaaaaacgcggcgctgctcgttctcgccgtcgaggttggcgacaaggctcatgtcgcctatcaaagcgaggctgtcgctgggcaggagcagggacagcggcgtcggtgtcggcggtggcccgatgagcgggctgaagcagcggccaggtgttagcttgacggtgcgggtgtcgagcaagatatcatcgaggtgatgatcttcgtttgtcttcagtgtcatgtgaagacgagaggggtacagattggagagaagagaattgcgttgatcttcttcagaaataagatattctctgctgggaaagctcctgtcttggggtgcttgtacacacactcattacagttatctgtaatttttgttgatccttggtgataatacaggggtggtctcctcgaccatataatcgaaaggcaatacacttgatctgcgattgttgttcagtcaggacttgaggctttcagaagatactgcgcttgcactagaatctcggaaattttgcaaacagcaatttcggaagctgcaatttcagcaggatcaagcagccggcgggaccaaacaagttacttttaagggcagtgccgatgagacttggacttggaaggaagcacgtgctcgcccgtcaaaggtctagctgtcaggctctactacaagcactacctgctaaatactttgttggtagggtgtttcagtgtttgaatgcactcaactaatagttagcttcttaaattagttgaagacatccanacagtctatttgatagttcaactattagttatttttatcaaattgcctaatagttggctgctaactaattctcctagcaatttgtagccaactaactattagctctagtggattcaaacactttcttaagacaatatttgaatgcactagaactaataggtgactgctaaaattgaataaaagagtacattctt

SEQ ID NO: 59064 - DNA, 395 bp, Zea mays
  Clone ID: MRT4577_153861C.1
tagggcgaactgtgtaccgggccccccctctacgcgggcgctatatttttttcgagacttgtgcagcacaaagcattattgccaactggtccaaggctagataggagagctaagaaagctgcctatgggctggcgggagaggcttactcagaagccctattactttgcaaggggcccttcaaaagccactgggctcacaaggctcttacacgtgcttgagagagagcctttcgaagagatactcccccagcccaacctccgggccacccagcctgcggaggatgttcatgttgacacccagcttctaggtgcgctccacttacaaatctctgacctaagagtcctattagaaacaaacatagattttccaacgtacagaacctacctaagaataa

SEQ ID NO: 59065 - DNA, 277 bp, Zea mays
  Clone ID: MRT4577_153862C.1
tggtcgccgccagcagcggcgcactgtgcgcacaggccaactggccgcgcgagggcctggtggtgcgcagtgatgcgttgccgttggcactggtgcagccgtggttgccgccgcagtccggccgccgcatctacctgcgcggcgatgtcagcctggacgcgcagatccgcccgcgcggcaatgcctgggaaggccacgtggaagtgcgctcgaaggaaggcggcgtgcgcctgggcgagaaccgcaacaccgtgggcgataccacccgtggcgagtc

SEQ ID NO: 59066 - DNA, 266 bp, Zea mays
  Clone ID: MRT4577_153863C.1
attttctctggagtcattggtgatgtttttggggagattgatagcttagaaacgagggatctggcattcaatgctttcagatagtgacctaccaagatcgtttagctcattgactagacttggctatgtttatctacaggataacgagttcacaggatctgggattttgttagcaggccttccattggcatccctcaatattgaaaataatcacttcagtggctatgttgctggaacattctagtacattcctgagctgaggattg

SEQ ID NO: 59067 - DNA, 340 bp, Zea mays
  unsure (1)..(340): unsure at all n locations
  Clone ID: MRT4577_153864C.1
acccacgcgttcagaagggtctgagagattcccccttcgtgaccaagagcctgagactatagatcatctacttgtagggtgtgtctttgagaggaacttctggtttatgctgcttggacaggtcaacctccaaagttttactcctcaggttggagaagaaaatgtcatgcagtggtggaaaagctgcagtgaccagctgcaacagattgctagaaaaggtttcaactctttaattatcctggggctttggacaatttggaaccacagaaatagatgcgtatttgatggtctttctcctaacttggaaacagccatcanaagagcggatgaagaaagagaa

SEQ ID NO: 59068 - DNA, 222 bp, Zea mays
  Clone ID: MRT4577_153865C.1
attcggctcgagatcgtgtactccgtctttttggagattggagccacgtccaactgggggggctgtattgccccgaccggtcaatcattaagtgagagcacttacctatgtccactggtctcctggattgcggctacatgtaggaagacctattctgagaacggagacgagtccaagacagccggatgattgcattaagtatattgtctgtacttgacattt

SEQ ID NO: 59069 - DNA, 572 bp, Zea mays
  Clone ID: MRT4577_153866C.1
gtcgaggcaccatgaaatgatgtccatgatggatcacgagactgacgaggaagatgaagatgctgaaggtgatgagaatgtggaagaagatgatgcagaccacgcagttgacgatgccgatgttgagatggacgaaggtgatgatgaaattggtgatgacggagaggatggcggcgttggcggggagatgactccggatgaggatccagatgctacttcatattcatctgtatcaacgcaataagcacggggaaataagtgaccttatcctagagatcctccctcagcgtccctttgcgaaccaaaaggaaaagctaaggagcgatagatgtgcatactgtttttttaggcaccgcaggttctaatagatttcctgacgtatgcctactcattcgatgagtggttgtatcttgctaggtatgtgcatgtcactgtagaattccccgagctatacagtgtctaaggagagatgatatcatatcgcaatttgctaaaaaaaaaaaaaaaaaaaaaaaaataaaaaaaaaaaaaaaaaaaaaaaaaaaaaagtactctgcgttgttaccactgct

SEQ ID NO: 59070 - DNA, 1637 bp, Zea mays
  Clone ID: MRT4577_153867C.1
aattcggcacgaggcgaagagagagagagagagggagagggggagaccgggggcaagcctgggaggggccgaggaggcccgcttccgaatctcgcgatccccaatccggaagcctcgattcgccgatccgggctcggccggggagagagggatcccgccgatcggggggcgctcgtgctgcaccgattcgagctcgctccctgctctgcccgcgcggggtgcgttcctgcggaggtccgcgccgggccggtagctgctgcgtgctgcctggtggctgctgctaggtaggtggttaggcggcggcaggaggatgcgggcggcggccgcgtagcgccagcgcaggcgcagcagccccggcatgggcgacgacgccgagctcgaggagggggaggcctgcggctgcggggacgacaccgccttcgtcgaccccgacgtcgcgctctcttacattgacgaaaagcttcaagacatacttggccatttccagaaggacttcgaaggaggcgtttctgcagataatctagggtcaaaatttggtgcatatggttcatttttgcctacgtaccagcgctctcctcttcctcaaactagaagtccccctaaggcaggaaatattacctcaaaatctccctttcaccagtcgaatgaggacttgtctcagaaacctccagctgtggcagtttcatctaccccccaaagtaatggtcctgtggtgcctttttctggtgattcaactaaaaaggaaatacgcccatccacaaagtctgaaaggggttccgtctcccatgattcatatgggccgtcaaaatgtagtgaccaaaacagacttaaagtccggataaaagttggctctgataatgttttggcaagaaataatgcagctatctacagtggcctgggccttgatatttcttcaccttcatcaaacgaggatagccctgatggccgtgggagcctgtcccctgaagttaacaatgtgccacatgaatctccacaaaccattcttcagatcatgacatgcttttcagttcctggaggcttcctgttatcccctctaccagccaatatcttgcagttgacaaaaaaggtcgtgtcttcatcaaagaagtgggaatcaaatgtggatgtagaaaatgtacaagaatcatatgaaggccatgtggctaaaaaggtgaaatctgatggtaacaaaaagaggctgatagacgcaaaaaattcaaagaacaaaaatgatattagtgcagttatgaaaaaggagattgatatggaattagttgctggtcaaaagatagtatctgaagctctcaaaatatcattgctgtctgaccccagagctatggatgcaaaaggtgagaatcgtcttgaagaggagccagcagaaaacaacttggttggaattagagatgctcgattgaaagagcggtgcaccaagactgactccatgacagtcaaagtggaacctgccaaagcagaggcgatggaatgtttagagaacagtagttttggcagttcggaaatggatctttcagcagtgaaagggaaatcaaaacccaagacagaaaagggtgaggcaactttagaagataggaatacaactaatgacaaagacctaatatcagataggaagcaaaaaaaat

SEQ ID NO: 59071 - DNA, 308 bp, Zea mays
  Clone ID: MRT4577_153868C.1
cacaaagagggtacgctagagcgcgaaagcacgaactgccgactgtagctaaagcgaacctgacaactaagccggaaggccgtttccctagagccacaagataatacttgagcggacggaaaaccaagatcgtagaacggagaactccttaatgcacacctgctagatatacgcgtagagccatacatgaaaagggatgtaggttcatccacaccagtcataaaggcgaaaggtcgtagaacctaagaaaaacgatctattgagagacatgtacaatatggaactcggcaggaataaagaaaactagg

SEQ ID NO: 59072 - DNA, 1433 bp, Zea mays
  Clone ID: MRT4577_153869C.1
cgctgagctcgatcgggctactacatccatggcgaggaagcgcaaggcctccgactccgccgcgggtatcgacggcgtccactcgctgccaccaccgctggctctggcttcaacagacgcgtgtgcatgggcatcgtcgggcggtactagcatggccgcggtggctgaggcggcggcggcgcagcagcagcggcggggaaggaagcggttcgtgggtgtgcggcagcggccgtcggggcggtgggtggcggagataaaggacaccatccagaagatccgcgtgtggctaggcaccttcgacacggccgaggaagccgcccgcgcctacgacgaggccgcgtgcctcctccgcggcgccaacacgcgcaccaacttctggccgcgcccctcgccggcttcctccgtcgcagtagccgccgccgcgcatcccgcgccgcctcctccgacgccgccgccgctgccggggctgatggggtctccaacgcagccgccggctcttccgtccaaggtcaccaacctcctgctcctgcggctcagggcccgcaacaaccagcagcagctcctcctcaacgccaccccagctcggcagcaggaggccgcggcggcggcgctgctgcaggggccgctgtgcgcggaaccgtacggcggcggcgaggagtgcgccttccaagtcgacgacttcttgagctacgactgcggcagcgacgagaacagctcacaagaaatagaggacgaggaagaagaggaggaagaggaggaggaggaggaggaggagctggacttccagttcatggaccagcagaccgcgtcgccgggcgcggggtgcgagggcgggctctgctcgccgttcgaggtggtggcggcagagctcggcggcgcggtggaggccggcggcggcgagccggccacggccgttcaggagctgatgatgagcaggatggactacgagaggaagatctcggcgtcgctctacgcgctcagcggcgtctcggagtgcatcaagatgcgcctcggcgccgccgccggtggccacgccgtgcgtgatcagctctccgggctgagggaggcgtgccggaagaagcagcgagagatagttcagcagcagcacgagcaggaaccatcaatggatacagcagaggatgtcaagccgcctcgtgaggagcgttcacccggtgacggcgccccggaggcgacaagctcgtcgtctgaggcgagccatggtgacagtgacggcgacatgctgctgtggagctccctggacttggctcccatctgttgaatgagacatggttgatcagcttagagattggttgagtttgttattcgtgtacttcgttacgttcatggcagatcactaagatcagaaagccctggtgataacgtgcttacccatttgttttatctaaggaattcctagtaaattatagttcatc

SEQ ID NO: 59073 - DNA, 320 bp, Zea mays
  Clone ID: MRT4577_15386C.1
aggaaacaaggcattttttcgcccatttaaaaaagcaaagggcaacttgcaggagggcccatacccacacaaacacattcgccccatttagggcctacccatcaccgaatactggaataaagggactgttaaacatcaaaccactccagacaggcagtttatgccttttggggggactgggcggccttctggggcgactttgcctccttgctccccacactggaccccttttccgccgtttttttgggcagaaaaacagggttgatattggggagcccccccccgtgagcgatggtcaccccgcccaacagtttcccaag

SEQ ID NO: 59074 - DNA, 488 bp, Zea mays
  Clone ID: MRT4577_153870C.1
cctgcgtaccgtccgtatcccggtcgaccccgcgtccgcccacgcgtccgcccacgcgtccgcccacgcgtccgcccacgcgtccggcggcgtcggatgttgagtaccgctgcttcgtcggcggcctcgcctgggccacggacgaccactccctccacaacgccttcagcacctacggagaggccctcgagtccaaggatcatcctcgatcgggagacgcagaggtccctgcgattctgcttcgtcaccttctccacggaggaggcgaaccggaacgtcattgaggccttgagcgtcacgctgctaaatcgcatacagattcatgtaatacaagacccggccaaggatgaaatcgagaccgatgagcctgttcttagtgctagatgaagctacgatcgaccgaggtatatcggcgtaccttaccaacctgcaagtcaactgcgacagctctcttgccacttgtgtgcagcggagacgcactgatcata

SEQ ID NO: 59075 - DNA, 783 bp, Zea mays
  Clone ID: MRT4577_153871C.1
atcatctccaccgccgccgcatcagccatggcgcgccgccacctcgcctaccccctgcgcctctcgatcctctcccgcaatcccggagcccctgcccgctcgctatgcgcctcatcgtccacccacgaggtcccagtcccggccgtcgaggcccaggcggaggcggaagcggcggcgaaggctgctgcgtccccctctccgtcggcgggtccagcccggagggcgccacgttcgcgctcctcgtgcccgcgctcgcgtcgcgccgcatgctcaaccacgcgcgctgcctcgtcctcgacaccatgccgtccttctccgtcgcgcccgacgagcccacgctcgccgcgctcatctccgcctacggcagggccgccatcccgcaggaggccgttaagctgttccggatgatgcccaacataggcgtcccccgcacggcgctctcctacaacgccgtactcaaggccatactctgccgcggacgcgaggccatggccaggcggatctacaacgccatgatcgcggacggggtggcgccggacgtgtccacctacaacacgctcatctgggggttcggcctgtgcaagaagatggagaccgcagtcagggtgtttggggacatgaagggccatggggtgacccctgatgtcaccacctacaacaccctgctgaacgcctgggtgcgtgccggtgatctggagagtgcgcgcaaggtgtttgatgaaatggctggggaggggaccgaccggaactcggtctcgtacaatgtcatgatcaaggggtacg

SEQ ID NO: 59076 - DNA, 707 bp, Zea mays
  Clone ID: MRT4577_153872C.1
aggggattgggtatctcgaggccggccggggtcatctcaccaaatttgaagaatgaactcatgatgaactaccttattttggagggaatgatccctcaaaccaaacactctctaattgattttagtgttaagtcgtttaaaggatagctaaaagagattgaagcagatttattcatatctctacccttcatttagtactctctcttcttgatatcctaagcataaagggtatttcagtctttctacagtgttctgaacatgtttattagtccttagaaccaaatagatagggactaaaatttaatctagaactaattttcagtctagaactaataggaagcaaacagagcctaggactgcactccgtatgctctgattcaaccacgagttcttgtccttgtcgttgtcttccgagggcgcacagttgatcggcgttgcattcggacggtcggacctaggactgcactccagtggtcatcgacttcactgccgcctggtgcggtccatgccgcgccatcgccccactgttcgtcgaacacgccaagaagttcactcaggtcgtcttcctgaaggtggacgtggacgaagtgaaggaagtcaccgcggcctacgaggtcgaggcgatgccgaccttccacttcgtcaagaacggcaagacggtcgcgaccatcgtgggtgccaggaaggacgagctcctggccagatcg

SEQ ID NO: 59077 - DNA, 352 bp, Zea mays
  Clone ID: MRT4577_153873C.1
caaaaaaaactcgggattttaaatcctggaacaggttttttcttaccaagcaaacatttaaaaacagtagttgcttttggacctttgatagctgacatataccatgccagcttaaatttaaaacatttgcacatacttcccaattttaaaaaaaagaaccttccccagtacaaatggttagcccattaagggacaatggtcccccacaaacactaacatttgttaactccgagtctttgacattttttcatggtagagttggagtccaagaccaagacttgcacaagcccgacgaaaagccatagtttctgccttttgtttgggatcaccaaagcttgtataattaacaaaa

SEQ ID NO: 59078 - DNA, 394 bp, Zea mays
  Clone ID: MRT4577_153874C.1
tcacagatcctgcctccgcctaggtgtggtgccgttctcaccactgcgggcgcgcgccaccactctacgccttccccttcctcttcctcagccgcggcggcatctccacctgccccgccggagcgccatgagctctgccgcgtccaggctgtcgcacatcgcggctgccaccggcggcgggggcggcgcggtctgggagtcgaatgagtcgtcgcctgccgcattcgccgtgacccaagaagacgatggtctttcatctggggatattggctaccgccgggggccaaaataaattcttgacattgtttgagcaccaccactttctgtcttggcaattttctccaaacaataattaaattctttttctgtatcaattatctcttcccaccctttt

SEQ ID NO: 59079 - DNA, 965 bp, Zea mays
  Clone ID: MRT4577_153875C.1
aattgattttagtcttaagtcgtttaaaggatagctaaaggggattgaagcagatttattcatatctctagccttcatttattactctctcttcttgatatcctaagcataaagggggtatttcagtctttttatagtgttctgaacatgtttattagtccttagaactaaatagttagagactaaaatttaatctagaactaattttcagtctagaactaataggaagcaaacagagcctaggactgcactccgtatgctctgattcaaccacgagttcttgtccttgtcgttgtcttccgagggcgcacagttgatcggcgttgcattcggacggtcggacctaggactgcactccagtataataccgtcgttttctttccggcagagtagcaactctaccgcctctaacatggagctctgtcaaacttgcgcaacctttcaggtggtcatcgacttcactgccgcctggtgcggtccatgccgcgccatcgccccactgttcgtcgaacacgccaagaagttcactcaggtcgtcttcctgaaggtggacgtggacgaagtgaaggaagtcaccgcggcctacgaggtcgaggcgatgccgaccttccacttcgtcaagaacggcaagacggtcgcgaccatcgtgggtgccaagaaggacgagctcctggccctgatcgagaagcatgccgcgcctgcgcctgcgtctgcgtctgcctaaaggagatcagatcagtcgtcgccgtcaataagggccagcacgtatggctgtagatgttgtcgttatcagttctggctttgtcgtttgtgggcgattgtgaactagtagtatgtttgtttctatccgattcggaggcgatacttaaccatggatacttgttgtgcgttcgtttcaaaaaaaaaaaaaaaaaaaaaaaaaaaaaaaaaaaaaaaaaaaaaaaaaaaaaaactcgagagagggg

SEQ ID NO: 59080 - DNA, 435 bp, Zea mays
  Clone ID: MRT4577_153876C.1
taaccggggcggcccacgcgtccgaacgactacttctgtcggcagtgctactgctcctcctactcctacttcccctccaccgggggagcttggtgagtgtggggagggttcttaacgaacacctgttagaggacccatcatcatggccgccgttgacactcaatgactcaagggtcctatctcatgcgacggttacccacgcgcggtcacaagagtgctctccaatatacaaggagttgaaaccttatacatacaccttactgatcatactgtcacaatcaaaggcaatgtcaatcctgacgacctcttacacacactttccaagtcggggaacaggacctcctactgggagggcgaagccacagcccctaacgctgccccttcttctggagccgaagcagctcccggaaccgatgcagaagctcctactgcttc

SEQ ID NO: 59081 - DNA, 416 bp, Zea mays
  Clone ID: MRT4577_153877C.1
aataggcaaatgatccacattgtaaaaaccctcaaaactataaacatgcctcatacaggctcaaatgcatggaaaccatcagctttataaggcactatgcctattattattacagcgcaaacagcctagttcaacatgtgaaaaattgcttgcaactaaggcaagcaacatattaggccaaacatttttataacaacattacatacaggcatttatgtgatgaaagcaaccacccgcgctcgttaacgtgactacggaaagacgtcaggaagctttgatcacaacataaaaattgacactccccaaaagcacccttatgatctgggcaatgaccgtgcatcctattaccaatcagcatagcggggtattaaggataactggacagagctaatcacacggatgaacccacatgactt

SEQ ID NO: 59082 - DNA, 398 bp, Zea mays
  Clone ID: MRT4577_153878C.1
catatattaactatatccataccataagttaatatatgagacaataggttgcaccaaataaatagtggccaaatacaaattaatttgataacatagctcacaatcacagcatcctcgtactagcttggattgtgataacatagataataaactactcaggactagcaaattattggaagtttttttgccatcgtgcaccactccaatcgatccttcttccgttgcccctactaaaccagctgaactcataccagctgatccttctgcacctgcaccaagtagtgcaaacaacgttcgtacaccagacacaaacaataagaaagacaatatgccagcaaactatattagctcttacactctaaggaatgctgtgacaagacatgtgcaggcaaggggca

SEQ ID NO: 59083 - DNA, 448 bp, Zea mays
  Clone ID: MRT4577_153879C.1
ggtcctccaccacttatttctttattgactacgacatccgtggtgtatattttgttgatgttgcagaatgtagtactctctaatttttagaacttattgtagtaagtgactcaggtgttacaaatgcaagggttttcacaatatgtctccgtgttggatctgtcggcctttgggactgaatattctgacatgactgctgatcttgtgcctcaagaccggattgtggaattttcaatctggtcgagctagcctatcaagtactgaaatttgtggtgcccccaagctgagtgatgtggtattctatatagaaattgtgggcgtggagtggggctaagcacgcgcagggggggggcgagggggaattgtggcggcgcaatggtaccgagccctcttttggctgctgaatcgtgattgtcgttcataacagcttggagacagaacatagaac

SEQ ID NO: 59084 - DNA, 285 bp, Zea mays
  Clone ID: MRT4577_15387C.1
aaaaacaggcactccttcaatggaagggaagaatgaattccaccggctaactaactaacttttgaacagctcccgattttactttcccgacacggacatggctctaaaaccaccccttaacaacggctggcaccagttaaagagccaccaccatatctccttgtgccttgtccccactaccccatcttttacaccattacatccaactctatggcctcatcatatatatcactccttgagccttctgctgccttttcatccgatgtcaaggccccatcatatatg

SEQ ID NO: 59085 - DNA, 209 bp, Zea mays
  Clone ID: MRT4577_153880C.1
ttcgttcggatccatctaactctaacctggggggtgactcttgcagctgcacccttcactcaaacttaggctgttagctctaggctttacctagccgacccactccttgggggaggcatcagccttctgattgccaccaatggccactggcgaggggcaaacccccaccggtatgggagcccggggagccccaatggaggggacccccg

SEQ ID NO: 59086 - DNA, 476 bp, Zea mays
  unsure (1)..(476): unsure at all n locations
  Clone ID: MRT4577_153881C.1
ccaccatcgaccttcacctctggctgcgtggcggtgcattnataaaaagcagccgcattggcgagcagcaccatggccctctcctccacggccttcgccggcaaggccgtgaacgtgccgtcgtcgtccgccttcgtctattttcctttgacgatgcgcatgacggcgggggggggggagccagcggcggcgtccgggagcccgtggtacggccccggccgcgtgctgtccctgggcccnctgtccggcgtgcctcccttctaccttactgtcgtgttccctggcgttttctgctgtcactccnnctttcttttctctgtccccttcactttttcctttttcccttctctctttgttttcctctccctcttttcccttcttttctctcttctctgtttctttccctttcttctctccctcttctttcttcttttctcccttttccctttggttctttgccttcttccttttctttt

SEQ ID NO: 59087 - DNA, 760 bp, Zea mays
  Clone ID: MRT4577_153883C.1
ggtctttaggcaccgccgccgcgtctcggctggaccgacaggccggccgatccgtctcctcctcctcctcctcctgcgggtcggcttcggggacgatggcggcgagggcggctgatgagaacagaaggccgggggtggggaggcccgcgccatgcgtccgagacatgggaagccggcgcgcgctcacggacatcaagaacctcgtcggggttgccccgaacccctgcgccgtcgccaagaagcccgtgctgcagaagagtagaagggacgaaaagaagacagcgttgccaagcagccggccgatgacaaggaaattcgtcgcctccttggcgagcaaagagcaacctgaatgtcagccgaccagagctgatcaacggaaggaagcaatcggcgatggcaccgttgatatcgacgtggaactcgacgagccggtcgaagatagtgatagtgacatcgacatgggtgatgagacagagaacaaggacattatgaaccaagatgaatcgctcatggatattgatagtgcagactcggggaacccgcttgcagcaacagaatatgttgaagagctttacaagttttacagagaaaatgaggctaagagttgtgtaaaccctgattacatgtccagtcagcaagatataaattcaaagatgagagcaattctgattgactggctgattgaggttcactacaagtttgaactgatggatgagacgctatttcttacggtaaacgtaatagatagattcttggaaag

SEQ ID NO: 59088 - DNA, 310 bp, Zea mays
  Clone ID: MRT4577_153885C.1
aaaaaaaaaatcccgggggtttttttgggggggcaaattccaatccccccccggggtgagggggggggccaaggcctcttcgattgtttttttttcccccggggcaaacaagatccctaagccggggtgaattctttcccgggggcgggccccccaaagggaacccaaagcccgtccccgggaaagggtgtcactgatcacaaacagcccccccccggactgggggggggacaccccccccctcttctcctaaaaagtttgcccccgaaaaccgggtaccctttgccccaagttttaaagggccccaagt

SEQ ID NO: 59089 - DNA, 226 bp, Zea mays
  unsure (1)..(226): unsure at all n locations
  Clone ID: MRT4577_153886C.1
aaatacatctacattgctggatttttccttacagtgtcgcctgattctatccagctagttgctgagcatgctgcagcaaataacaaggtggtcctgatgaacctctctgctcccctcaaccgtgaggacatccgggaagccccagagaaagtccccccggaagccgaccacaacttcggcaacgaaacagatgcaaagaactnttccaaagactagaggagggaga

SEQ ID NO: 59090 - DNA, 302 bp, Zea mays
  Clone ID: MRT4577_153887C.1
gactagttctagatcgcaggcggtcacttgcgatctagaactagtgacagaaggacatacacattgctagatgatttaaaaaatgtactaaacttctgtaactaatacagatcggtatgtactgtaacagggtccaagctgaacaaaaatgaactggaaaatacttagtgacgggaatatgacattaagaaatgctttctgcaatacaggaaatatgatatctggttaaagactatttggctcaatactaatactctgactcttaaattatacgagtgcgactttatgaataggtattcctg

SEQ ID NO: 59091 - DNA, 460 bp, Zea mays
  Clone ID: MRT4577_153888C.1
gtggacttcagcttcgactaccgcgcggccactcagttctggcggaacaaggtcctggaggtggccaaggacttccccgagtacaccttcgccgtggccgatgaggaggacttcgccacggagttgaaggacctggggctaagcgagagcggggaggaggtgaacgcggccatcctggatgagggcggccgcaggtttgccatggagcccgatgacttcgacgccgacgccctgcgcgacttcgtcaccgctttcaagaaaggaaaactgaagccagtcatcaaatcccagccagtgcccaagaacaacaagggacccgtcaaggtcgtggtggggaagacctttgactccatcgtgatggaccctaagaaggacgtcctcatcgagttctacgcgccctggtgcgggcactgcaagcagctagagcccgtgtacaacagcctggccaagaagtacaagg

SEQ ID NO: 59092 - DNA, 615 bp, Zea mays
  unsure (1)..(615): unsure at all n locations
  Clone ID: MRT4577_153889C.1
cattgggaccctcgaggccggccggacttatcttctatagacgtggacaggttgtccctcttcctcgatattcttcatactgatcgattggtttagcacatgagtcggtggctacacgattacagcacgaaacaactgtggtgtcaccgtgggggcatgaggcatcccggtctgggcatgctacgccgctgaacccatggctcgacgtggacctgtcaaaacgcactcccngcaccactccaagggaggactctgggcccgcactcggctgctccttcagcggtccggcggggccgatggcatatgcaagactggggacgaggctaattctgcatgctgtacctgcactccccggcgacagctagcgcagttcaccattcggcggcgtcgggaaccacgactactactatatgtcggtgatccacggctacaacctaggccatgcgacttctcgcgcaggactacgagtgatccaggggggcagataatccatctgcatcgacgcataatatcattctaacgaccctaagacgcattcgacgcatacgagatagaaactaccaagactgctacatgatgtgatctagataggtcatcatgtctacatatctatac

SEQ ID NO: 59093 - DNA, 143 bp, Zea mays
  Clone ID: MRT4577_15388C.1
gcaattattacccatgaaacactaagcacacagaaaatggaattccgtacaggttccaaaccttattacagagacgtgccttctcctgtcggggctgggctaacacgaacaaaattcttacaggagatagaaagggggagaca

SEQ ID NO: 59094 - DNA, 363 bp, Zea mays
  Clone ID: MRT4577_153890C.1
ggagagggaatcctttgcggagaaacttagcagggttgtttaaaactaagcttgctcttagtcttagggcctagtttgtttaccccatggattatataatctggattatttttggaggattatataatctggattatataatctgagtagtcctgtttgtttacccagattatttgagttgttaataggattcttttgtatgaggaagacaagaatgccctctatatttgtactaggttgaaactcatatatatataaaaaataattcaattgacattggcaaatattgcattagcaatattatcacggaaggcattcatgtcaccttcttcatccccaaattgactagttctaggcgcaaaa

SEQ ID NO: 59095 - DNA, 665 bp, Zea mays
  Clone ID: MRT4577_153891C.1
gcgccatggtcgccgcccgcgaccgcgacgactggatcaacagcgtcgtggccgggctaggcaccggcgcgctcttccgcgccgctaacgggccgcgctcggcggtcgtcgccggggccgttggtggggttcttgctggcgccgccgccgctgccaagcaggttgggaagagatacctccccgccctctaaatctgattgcggtacttgtctctgccctgccatgccgtgatcaagggaaatcatttcgtcgcgtggatgttatttcttcgttctcgttaattatttgggaagagtcatgttcttctcgacattcctatatattgttgacatccatatgctggtactatatatgtcaaagaacgatctgatctcaccagatcacgaaatttttggtccacattgcaatgtaacattagacgctagctggtatcgacacaataatactgctttttccattatgctggagaacccatgacattgtgaaatgtaatgctgagtgtagtgtagttttgctagattgtcgctgttttcctatatctctttaaagacgaaattcttcgcctgcccgatgtatgtaaaaaaagacatgccttgatctcagtgagatgttttatacgacaaattgttgtacttctcgaaaaaaaaaaaaaaaaaaggccccta

SEQ ID NO: 59096 - DNA, 267 bp, Zea mays
  Clone ID: MRT4577_153892C.1
cacggctggagataaggattgcttagcgctgaaaatatccagagagcagatgacttgctgcgcatagaagaagaacgcacggctgaagataaggattgctgagcgctgccgatgattgctgagcgctgccgacgcgttttccacgggctgcgcgacgattggagaaggcgagcagagagagatgagcgccggactggagcttggtcgctggagaaaaagatcagccggcgactgcaaaaaaaatcttaggcggatgaggatgaacga

SEQ ID NO: 59097 - DNA, 299 bp, Zea mays
  Clone ID: MRT4577_153893C.1
tccggccggatttcgggtcggcgacgcgtcctgtgtctactgattgcaaacacacgtataatttacattgtcatttccgctcacatcacgtatagtgtattgtaaaggatggcctggcgttcctcctccccgacgacgagagtaaacttctgctgtagtgtatcacctcttcaagaggatcaagcgttgatccgactactgactccggaggagctaggaggccagcgatggcgtggacgacgacctccgtgcctctgggaatggcgctgacaaccattgtaccgtccacccggactgca

SEQ ID NO: 59098 - DNA, 740 bp, Zea mays
  unsure (1)..(740): unsure at all n locations
  Clone ID: MRT4577_153894C.1
tgtgcccatgcggtttcaacagaaaggtaaaagcaaaacaggcggagaattgaataggaacttgggatcctgagcaaacaaagactgaaaagtaagtcgaagtggattttcccccttccattcaagtcttcctgagatcttttgtttgccctgttttttgtctgatgaaagactgaaactcatgtattttcgtgggctttcaaggaactcatgtgaatgaagattctttccctgccactgccagtgaccattaaagaaaggaatatgtagagtcaggaattggtaatctatctgtgtttgtgtagttcttttccctgcatatgaccttgatgttttcagtttttaaaatgatgctattgtactgttttgttactgacatcattttacctttataatgtttattacttgtcagttattctgataaatccatatccagcattatctttgaaaaaggtaaatcagagagggagaagagaaccatggaagggaagaggttcatctgatattttgggttaagtggtgacacggctgcagtctgcagaaataacgatgtctggttaattgatgatccagttgtttcttcaggctcttggagaatcagttctgatgggtgcagnttataatcgcacatgaagggtagtataccttgacagcatagaatcatcaatcaggaagcgaagacaacagctaattaagatggtgagcaatctcaggcttatggttcttaaactatgtgtttt

SEQ ID NO: 59099 - DNA, 479 bp, Zea mays
  Clone ID: MRT4577_153895C.1
cactgaccctggatttggaaattcataaccgcaaggggctggcgtaaattttttcccctgggagaaaacccggaaatttcggcccggtcccggggggggttccagcttgccctaaaggggggtccgttaaaacttgggcaaaacatgggaataggtggttcctggggaaaaatgggagcccctcaaaatgccacccaacttacaatccgggagcttaaattgctaaccccggggggcctaagaaaggagctaacccacattaattggggaaccctccatggcccctttacaggcgggaaaccttttgggccccctggtttaattaatttgcccaaccgcggggggaggcggtttgtttttttggccccacgggggctttttttttcaccaatgagacggccaacaggtttgtgcccttaaccgactggcccttagatagttggaaaagggggccaaactcgtttgccccataggggaaa

SEQ ID NO: 59100 - DNA, 143 bp, Zea mays
  unsure (1)..(143): unsure at all n locations
  Clone ID: MRT4577_153896C.1
gggaaccaaatttagatatatgcaagggttgggcaaccatagtaacattcgtcaaagtcatgagccgccaataaccggtttgatgtattgcatttagtataatgggtctnacgatataaagggggggggggggtttaaattat

SEQ ID NO: 59101 - DNA, 325 bp, Zea mays
  unsure (1)..(325): unsure at all n locations
  Clone ID: MRT4577_153897C.1
aagtccctaagcaatttgtactgttaatgggtttatggcacgtttnatgactacacaaacaaacaacattaccaaaagtggatattaatccgatattttgctatatttttctttctaaaactagcactacccatgatatacccctcgccttcatttctcgtgcggtactcaatacattgatgagtgatgcatacctttttatttctcacacacacaccgtagtccatagttactctaggtacaaccccctaacaaatgagtattttaagagaatcttaagcttttgcagctacaacctctttcaagacaaaaattgcaagtgttc

SEQ ID NO: 59102 - DNA, 591 bp, Zea mays
  Clone ID: MRT4577_153898C.1
gacgatgtggggacgacgtaccgctccagagttttgctgtgcttaccgacgcggaggaggagaatcgagggtgtgatgcataagcgtaactacggaaggacactcacatatcgaaggcgagtaccagcactacagtcgacacatgcatctgctgatatccatgatgcgacatctgaactagtaaaagccgacttttgttgacatctattatttgtgtcggtctctgtgctcaacgtattgccacatatatgcatgactcggattcatctaatgtacctgtcagggcagacagttcgaaaggacaatatactgcacaatatggcatcccgctggcgcgcgctctagcatgcatgatatagtgcccatatccatctcatctggaggccgatcaagcatgactgtacagggcccaacaacgcctagactgagaaaaccctcacgtcaccgaacgtagtcgtactgcggcacaaccgcctttaccctgctggcgcccaaccgaataggcccgcaccgcatcgcccttttcaacagctgcgcaaactgagaggaggacggacgcgctctgccttgccacattaagcgcagcctgag

SEQ ID NO: 59103 - DNA, 440 bp, Zea mays
  Clone ID: MRT4577_153899C.1
ttcgcaagcacccctgcgtaagctcggaattcggttcgaggcggaaccgctcgccaattttttagcgatcgcccgggctatgctggggtcgccctgccttctggtaataacatgagcccccagggattgggagacacacaccaaacaaggcagtcaaatctccggaactggtatcacacatgtcatccaccacactcggatcgcgctgggggcccttgatttcaccaagcatcatctgaaaccggtggaagaacgaggccaccaggaggggaagcataaggaaatggtgaagttggagactgcaccatctagtggaaggaaaggggttaaagacatgtaggggcagcaacaccaggtgctcggacaaggaacattcaaagggccgaccttggttcagaagaaagccctgtcagcaaatgctgggcacatgccattgcata

SEQ ID NO: 59104 - DNA, 243 bp, Zea mays
  Clone ID: MRT4577_15389C.1
cacacactagcaacagaacaagaacactagactccaagcacgggcaggaaaaggggggggggttcataggggcgatggacattctgcacgagctgctaccggaaccattttacaagattgcgcacaagcttctatagaagaactatgggggcggtaccattcaccaagggcgagttcggactgtgagaaccgaaatgttgaaccagatatggtcctacaggcaatagcagctggcaaatgacc

SEQ ID NO: 59105 - DNA, 445 bp, Zea mays
  Clone ID: MRT4577_1538C.1
gaaacccggaaaatcaattgaacatttttggggagctttgaaacccaaaaatcctttgaacatttttggaaaaaaaattgttgcagggtaaaaaaaaaaattcccttggggggaagttataatcaaagccccgttttttggggataaacaaactcccccaccaaaaaagtaaaccccgtcaagggaaaccggtttttaatttttttttccccatggaagcggaaacatggttttataaatttttaacgccttttgttttggcggacggggtttccttttttttttggtaaaccaaaaaaccttttttttgctcctttaaataatcccgctaatttggggtccaaaataaattttcctttttttttttaattttgaccccgggactttctacgggagcctaagaaattttgggattttcacctttttttgttttcgcattggcatt

SEQ ID NO: 59106 - DNA, 572 bp, Zea mays
  Clone ID: MRT4577_153900C.1
ccccgcgtccgcaccgaacccactcccgaacagcagctgatcgatcactctagcagttagatgattctttagctgctctagctctagcctttagccctagctagtggctaggcactcggtcgtgtagtcatcagccttctgatcgtcacccatggccactgccgaggtccagaccgcgaccgaggtggcgaccgaggaagcgacggaggtggagaccccggttgcgaccgccgttgcgcccgaggaggctgccgccgacgccgaggccaaggtggaggagccagatgccgaggcggatgacgagccagatgccgacgctgatgccgaggcggtccccgtggcggcggaggaagagacgcaaaaggaggaagagatggaaaaggaggcggagccggaggcggagccggaggcggatgaagaggtgaaggaggaagcggaagaggcagatgtcgagacagaagcagaagaaggatgagatgaggctgatgctgatgctgatgttgaggatcccgatgaggatgaggcggtcgttgaggaggccgataaggatgaggtggacgatgaggtggtcg

SEQ ID NO: 59107 - DNA, 400 bp, Zea mays
  Clone ID: MRT4577_153901C.1
ccggccggggtgattgattctctcctgctccttctttcttccatctctcctgtctctcttctctctctctctctgtctgtctgactggcaaagggcactgacgagccgcggaggagtctatgcagtgctgtcacaaggcgccggaggagccggtgaagcgagaatgaatcgccgccgccgaccatctgactacgctacatgaagaaacaagactccgggtacccccttactgccgaaattccactaccacgtcaagacgagatcgaacaactcagtgtagatgaggaggcccatcctgtacttccccaccaccaaaagggttacaaaggcaaccgttagttcgaggccactgcaaggaactatggagttagggcataaagagcctgctaaagtttctttg

SEQ ID NO: 59108 - DNA, 477 bp, Zea mays
  Clone ID: MRT4577_153902C.1
tcccatcccaccagctaatcccccattcctccgagatcgagcgaccatgtcgcgtcgtgaccaacggcgataacggctcggcaaaggcgtcgccgagcgtcaccgcaagggtctccgtgacaacatccagtgcatcacgaagccgtcgatgacggaggctggacgaggaggggcggcgagaagcgcatctcggggctcatctacgacgagacccgcggagagctcaagatcttcctccagaacgtcatccgcgacgccgtaacctacacggagcacgcccgccgcaagatcgccaccgccatgcacgtcggctacgccctccagcgccagggtcgccccctctacggattcctgcgactgataggcgctaccgccgctgccggccgtggcaaaagtcttgggtcgcggtccataaatctataggattctgcatgacgcgcttaggttcgcagtattataatcactagtgcttactgc

SEQ ID NO: 59109 - DNA, 256 bp, Zea mays
  Clone ID: MRT4577_153903C.1
tcgctcccagtcccacctaaccgaggcaaaaccggcccttcgcacttccgcagaacgagcactcgtgaaccaaatatttggcacaagttagctttgcctgtttcttgcgtgtacatccctcaaggtttctccgccacacgcgcttcgggttcgcgggagcttgccagatgaatggtcaaaccccgatggtgctcgccgcagtagcattgaggccgtgctgcaaccgcctcatctcgtccgcctcggccgccgcggc

SEQ ID NO: 59110 - DNA, 324 bp, Zea mays
  Clone ID: MRT4577_153904C.1
attcggctcgagccaagtccgaaccgaattttttatggctcgtctctaaccaacttctggtggcgaccttccagcttttgaaacatgtcctgcaccttaagcacatcatgcatagaaacaagagaagcattcagcaactgataacactcatggttacatccctgctcgagatggacatggagaactacgcaactaccacttatgggctgttgtaccatcaagtgctgatacgggcacggaaatggcatcgatatttgagcctgctgttgtggcagactcgaatgttgcttctgccacatagcataaacgttttgtggcaagaaa

SEQ ID NO: 59111 - DNA, 309 bp, Zea mays
  Clone ID: MRT4577_153905C.1
cttgttttgactgtgacattctcgagtatgtctccatggaactcactctcggtcatatcatgtgaactttggtcccaaatatccatcttttcagtagcgttaattatgctctgtttccaactgcatttcctttccaattgaattaaagtgtggcctcgtttttagtcatttaaaattgtgttctaagtaattgctgcctctattatggcacttcaattttgcactgtcttttgagattcaagagaaatttctattcttttttttgcatccaattgtgcctgaacttttaggatatgtagatgctgccag

SEQ ID NO: 59112 - DNA, 682 bp, Zea mays
  Clone ID: MRT4577_153906C.1
cctgccgggaacaggccaattgacttcgttcgcaacagcgggacaaagggaagcaacagcgagggaaaaccccattcctcgtctctgctcctctaatcaccatcgcccccctctctctccgatcactgcatctcttctccgcctggtcggcggtcggacggcgcaatggacattaaggtgtgtggggtatgtggcagtggtagcaactctgctcttattgtgaagtgtgttcggtgcaatgattatgaacaccgttattgtatgaaggtggtggcacgggtatctccacaggaatggtattgtgccaaatgccaagagcataccaacagaggcccgaaacctagtcaaggtgggcaaacggagctccaaaagccatgtcatggtcgtgatatgacgagcgagagggaaacttcgaagttgcacctcagtcaaagcagcgtagtgcatcaaataataagtcccaaatctctgaacagatttgaaaatgctaaagtgaagttcatctcttctgaagaagtggcattattgagtagagagaggccaccatctgttacatcaagatttactttgtcgcagccaagcaaggcatcatctcctccaactacaaaacacttgtccaatatgaattgtgtatccccaagcagagtgataaaaatgtgcaagccctgaaaccatgtgctga

SEQ ID NO: 59113 - DNA, 440 bp, Zea mays
  Clone ID: MRT4577_153907C.1
cggactcgtgcgcccacgcgtgcgtgcagccctgttgtgagactagacacggaacgaggatgtgtccacagctaagatggaaaaccagtcagaggaggacccttacactgccccaactgacaaacaattcgaaataccttcctataatagagcacaggtctgatgtagagagccatgaatcgacgcactcagggaaaacttccagctatatctgcaaccaaaacgacttgatcgagggcatatggaaaggacaggagttccggacctagcgggaaaaggagggaaacggatactcaatttaaagtgagtaaacagagaaccaggctcgcacacagagacccctatagaagactatggaaagcccaattcgatgaaagtcgtatgtacggcttggagggagacctaatctatcatgcaagaacaccctacaatatggggcc

SEQ ID NO: 59114 - DNA, 417 bp, Zea mays
  Clone ID: MRT4577_153908C.1
cgacccactcatccgctgactcgtcttgtcaatctctttctggacttgtactttctgtgtatcatcacggtgtatgtaacttttcaatcataccctcactaaatctcaactttctccttctgcgatcagttctagcaatccttcatcagtatagttatatctgtcattgcacacattctatacaccacaagttcttttacttcattctttcttgatgtaacattctcattgaaccaaactatatactgctaatcaaagttcatccacatataataattagtttccccaacatgtacatcacttaaatttatctcattaaacctttcacaaaaccaaaccttaaatttctaccttctttttctataacattaattataaattatctatcattctattaaacatatttcattcatttct

SEQ ID NO: 59115 - DNA, 1351 bp, Zea mays
  Clone ID: MRT4577_153909C.1
tggggtaccctcgggccggccgggccgtaggaatagggatgaagagccggcaaaaaaaaaaaactaatttgtttgcttttgcagcgatcgagacgacgctgtggtcgatcgagtggggcatcgccgagctggtcccccacatgaacctcaacgacggcaagctcgccggcttcgacatccccgccgagtccaagatcctcgtcaatgcctggttcctcgccaacgaccccaagaggtgggtgcgccccgacgagttccggcccgagcgcttcctggaggaggagaagtccgtggaggcccacggcaacgacttccgattcgtgccctttggggtcggccgccggagctgccctgggatcatcctcgcgctgcctatcatcggcatcaccctgggccggctggtgcagaacttccagctgctgccgccgccggggctggacaagatcgacaccacggagaagcccggccagttcagcaaccagatcgccaagcatgccaccatcgtctgcaagcccctcgaggcctagaaatcaatgcgtgtttcctgcacgcgcccccgcagatgaagcactatgtattttctcttttttttgtgtgttgggttttttttactaagacgtccggtatttcttgttcgtaaaatgcacttagtcaaatggatcgagattatgttgatcattaaacaccaaaaaaaaaaatcacttagtcaaacgggtcgggatccaaaaaaaaaaaaaaaaaaaaaaaaaaaaaaaaaaaaaaaaaaaaaaaaaaaaaaaaaaaaaaaaaaaaaaaaaaaaaaaaaaaaaaaaaaaaaaaaaattaaaaaaaaaaaaaaaaagggggccgtttaaaagaaccaaatttaacttcccggggattgaaaggaaaaattttttttaaggggcaaccaaaataaaattaatgggccgggttttaaaaacgtgggaatgggaaaaacctggggttaaccaaattaaatggcttggaaaaaaatccccttttcccaagtggggaaaaaaaaaaaaaggccccaaccaatggcctttccaaaaagttgccaaccctaaagggaaaagggaacccccctttaacgggcaaataaagcggggggggggggggggtaaccccaaggggaaccgttaaatttgcaagggcctaaggccccgttcttttggtttttttccttttttttttggcaaggttggggggttttccccgaaaagtttaaaagggggggctcctttaagggtcccaattaagggtttaagggcccctcaccccaaaaaaatttgtttggggggagggttaacgaaggggccaatccccttaaaaaagggtttttcccctt

SEQ ID NO: 59116 - DNA, 487 bp, Zea mays
  unsure (1)..(487): unsure at all n locations
  Clone ID: MRT4577_15390C.1
gnaaatcgcaaagacgtgctatttcatcatgaacaagctactgatggtccttctggctttggctgtgtgccttgttagcgccaacgcttttgtcaaacgggacgctccggccgcaccagccgctgagcaaaacccccttaaggatattcagaaaactctagaagactttggcaaagctatttcagataacgtgcaacaagtcctgaacccagatgcgatcaaggagaaaatcgctgaagcaaaccaaaaactcaaggaagtgatggacaacttaaaaccagcgccgaaacagcctgcagcagcctaagaatactctgattcttcttcaagcaataatggaatctacactgtattattttcacgttatagttaaaaaccatgaaatcaaaacgtgttcacagaccatgacaccatcgtaaatctgtattacactatcacataaacattttgtacttttattgaaatagattttttataccatannana

SEQ ID NO: 59117 - DNA, 303 bp, Zea mays
  Clone ID: MRT4577_153910C.1
cacgtcacagagaataagtaacacgcttcactgtcaactagttatatgcccgtacgttacaacgagggacatttgtgcacgtataagttattagtgatattatcagaatcaactcaacaatcataacaaatattaaagtctgccaaaaaaaaaaaaaaaaaaaaaaaaaaaaaaaaaaaaaaaaaaagggagtaaaaaataaaaagatcaaaaattccggaccatgacaagcaaaaatctgggctattgtgtaagggaaacctaaattcactggcgcggggttgcaaaatacaagagtctgga

SEQ ID NO: 59118 - DNA, 1884 bp, Zea mays
  Clone ID: MRT4577_153911C.1
aattcggcacgaggtgcacagagactgtaccggggcaggggcggcgcagaaacagagccacacaccgacacaccccacctacgctacgcgcgtgctgggcgagtgatggacctcgccctcctggagaaggccctgctggggctgttcgctgcggcggtgctggccatcgccgtggcgaagctgacgggcaggcggtaccgccttccaccgggcccccggggcgcccccgtggtggggaactggctgcaggtgggggacgacctgaaccaccgcaacctgatggcgctggcgcggcggttcggcgacatattcctgctgcgcatgggcgtgcgcaacctggtggtggtgtcgaccccggagctggcgaaggaggtgctgcacacgcagggcgtggagttcgggtcgcgcacccgcaacgtggtgttcgacatcttcacgggggaggggcaggacatggtgttcacggtgtacggcgagcactggcgcaagatgcggcgcatcatgaccgtgcccttcttcacgggcaaggtggtggcgcggaaccgcgccgggtgggaggaggaggcccgcctggtggtggaggacgtggcgcgggaccccgccgccgccgccgcgggcgtcgtcctccgccgccgcctccagcggatgatgtacaacgacatgttccgcatcatgttcgaccgccgcttcgacagcgacgacgacccgctgttcaacaagctcaaggcgctcaacgcggagcgcagccgcctgtcgcagagcttcgactacaactacggcgacttcatccccgtgctccgacccttcctccgcgggtacctcaaccgctgccacgacctcaagacccgccgcatgaaggtcttcgaggatagcttcgtccaggagcgcaagaaggtgatggctgagacgggtgagatccggtgcgccatggaccacatcctcgaggcggagaggaagggcgagatcaaccacgacaacgtcctctacatcgtcgagaacatcaacgtcgcagcgatcgagacgacgctgtggtcgatcgagtggggcatcgcggagctggtgaaccacccggccatccagtccaagctccgggaggagctgggctcggtcctgggcggcgccggcgtgcccgtgacggagccggacctcgagcgcctcccctacctccaggccgtcgtcaaggagacgctgcgcctgcgcatggccatcccgctgctggtcccgcacatgaacctcaacgacggcaagctcgccggctacgacatccccgccgagtccaagatcctcgtcaacgcctggttcctcgccaacgaccccaagaggtgggtgcgccccgacgagttccgccccgagcgcttcctggaggaggacaagtccgtggaggcccacggcaacgacttccgcttcgtcccgttcggggtcggccgccggagctgccccgggatcatcctcgcgctgcccatcatcggcatcaccctcgccagcctcgtgcagaacttccagctgctgccgccgcccggcctcgacaagatcgataccacggagaagcctggccagttcagcaaccagatcgccaagcacgccaccatcgtctgcaagcccctcaaggcctagaaatcacctgcacgcgcctcccgccacatcaagcactattgtaattttgtgcgtcttctctgttatgtgttgtgtccttgaaaacttctccaaaagttatagtgtcataaacttcaatttaatcaactctgttgcacaaggctttgtttccggattgtgaatttagccaaggcccagacgattaaaagacttcggttctgttttttttatagggtatttgtttggagcttcattcaccaccggcttaataaaaaaacaatatcaaaatcg

SEQ ID NO: 59119 - DNA, 350 bp, Zea mays
  Clone ID: MRT4577_153912C.1
gcatggaataagcatgtaactatatatatatgcatatacatagagaaaaacgtacagttcgtagctatgtctagtgcatctcatcgaagacagatattatttgtaagtatatgtggtctggcctgatctgctcatgcatggttaacttaaacaaacagtcttattacttaattaatctcatggggcagggtgcaagttttggaaggccttgggacgagtacttgaaagatctcacttccaatgtctttgatggatcgatcgacatggtcagatccaaagtacttaccccccagagcgggcgggaaacatttttttactccaatgccttgaacgacaaggtcagatccaaa

SEQ ID NO: 59120 - DNA, 1995 bp, Zea mays
  Clone ID: MRT4577_153913C.1
gccacgcgtacgcccacgcgtccgcccacgcgtccgtccacgcgtccggccacgggtccgggaaaaaaacgctataaaatccccggcattccccagggcggccgggatcgcctccacgaacaaaccacacaccccacctaccccggccggaccggcaggcagcacagcatggacctcgccctcctagagaaggccctgctgggcctgttcgccgcggctgtggtggccatcgccgtggccaagctgaccggcaagcggtaccgcctcccaccggggcccccgggcgcccccgtggtgggaaactggctgcaggtgggcgacgacctgaaccaccgcaacctgatggccatggcgaagcggttcggcgacatcttcctgctgcgcatgggcgtgcgcaacctggtggtggtgtcgaccccggagctggccaaggaggtgctccacacgcagggcgtggagttcggctcccgcacccgcaacgtggtgttcgacatcttcacgggcaaggggcaggacatggtgttcacggtgtacggcgaccactggcgcaagatgcggcgcatcatgaccgtccccttcttcaccaacaaggtggtggcccagaaccgcgccgggtgggaggaggaggcccggctggtggtggaggacgtgaggaaggaccccgaggccgcggccggcggcgtcgtgctccgccgccgcctccagctgatgatgtacaacgacatgttccgcatcatgttcgaccgccggttcgacagcgagcacgacccgctcttcaacaagctcaaggcgctcaacgcggagcgcagccgcctgtcgcagagcttcgagtacaactacggcgacttcatccccgtgctccgccccttcctccgcggctacctcaaccgctgccacgacctcaagacgcgccgcatgaaggtcttcgaggacaacttcgtacaggagcgcaagaaggtgatggctcagactggtgagatccggtgcgccatggatcacatcctcgaggccgagaggaagggcgagatcaaccacgacaacgtcctctacatcgtcgagaacatcaacgtcgcagcgatcgagacgacgctgtggtcgatcgagtggggcatcgccgagctggtgaaccacccggccatccagcacaagctccgggaggagctcgcctcggtgctgggcgccggcgtgcctgtgacggagccggacctcgagcgcctcccctaccttcaggccatcgtcaaggagacgctccgcctgcgcatggccatcccgctgctggtcccccacatgaacctcaacgacggcaagctcgccggctacgacatccccgccgagtccaagatcctcgtcaatgcctggttcctcgccaacgaccccaagaggtgggtgcgccccgacgagttccggcccgagcgcttcctggaggaggagaagtccgtggaggcccacggcaacgacttccgattcgtgccctttggggtcggccgccggagctgccctgggatcatcctcgcgctgcctatcatcggcatcaccctgggccggctggtgcagaacttccagctgctgccccccccggggctggacaagatcgacaccacggagaagcccggccagttcagcaaccagatcgccaagcatgccaccatcgtctgcaagcccctcgaggcctagaaatcaatgcgtgtttcctgcacgcgcccccgcagatgaagcactatgtattttctctttttttttgtgtgttgtgttttttttactaagaggagatgtatttcttgttcgtaaaatgcacttagtcaaatggatcgagattatgttgatcattaaacaccaaaatcacttaagccccgtttgaatcattggaattgaattccattctaataatagtaatttaggtatatatcaattaagataattcggttttatacaaaatatatttgtatactactaaaaaaaaaaaaaaaaaagcggccacccaaaatatatttatat

SEQ ID NO: 59121 - DNA, 1058 bp, Zea mays
  Clone ID: MRT4577_153914C.1
cggtactgctagttggatctgctttgttgtgtttaacctcggccaaaggcttgtgggtgttcggatcaatgcctttctgccaaagcttctttttgacccttgagttctagatattcttaatctcgttatcagttcttctaggccacctagttgtaacttgggaccacctattcattgatgtgtcaacagtgccaaacgcaaagtatgtctatggaccaaggttgaggccttagagcatctccaacaatgccttaaactagtgcctcaaattgaaatatagggctctacacaggaaaaaccactccaacagtgcctcaattcaacaaattttgtcaaaaaactatagggcaccctctcaagtgactcaaatatactacaccgtaatgggctgccctataatctagatttggggctttactgttggagcggggtgttttgttggtgccctaaattctataaaatatacttattttcaaattatagggtatttttataggtcacgttgttggagatgctctaacagttctcgacgattatttgctgcagacattattgttttctttttctttttttccttttatttactcgattcaaggactgccagtggccaaagggcactgccaccttcttttgcttttactattattattacttcgaacatggctagaatacaatagtacagcttaatccatgaaaggtatggggatggattgttctcggctattgatcgattaatcctgcagcacgtcctttgctgactattgtgtttcaatggagaaggatggtagagatttttttggattggttaactaaccgttctcgatgattatttgctgcggacgctgttgttttctttttctttttccttttatttactcaattcaaggactgccagtggccaaagggctctggcaccttcttttgcttttacgattattattacttcgaacatggctagaatacaatggttcagcttaatcaatgaaaggtatggggatggattgttctcagcagtttgttgtacgatgctaaggctcaaacgaagaaccacgacaccc

SEQ ID NO: 59122 - DNA, 266 bp, Zea mays
  Clone ID: MRT4577_153915C.1
ttcacgctgacgatcactcttcctgtcacactctttgataccctctccaccactcatttcagggaggattcgatcacgcgtactgacgaccacatacaggtacacgttctaaaacccatccgaccacgactacgcaagactacaacagatgaataggtctgttataaaatctacttaaagcaattgttagtgataggtgctccaacctctatgaaaaaatgcactatcggtacacaccattctaggcgcaactatgctactatcac

SEQ ID NO: 59123 - DNA, 507 bp, Zea mays
  Clone ID: MRT4577_153916C.1
agaaaatttagagaagtacttaatcacctactaacctgtttaaaaatgataaacccctctgtataccccattaagatagagtttgccatttaattcaccttgtgcttaaagttaaagaaaatagaaaaggtaatttaaataaaggaccagggagcacccacatttttgttagtttacttattcagtatagttcactagaaaatttattatacccttgtttagtacaaaataaatgggataccttttattttaagaaaacaagaaaaacttagaaaaaccctagaaaaataaccccaatgagaaaacactccaaaccttgggataactaatgttttgttattaagaacataggaaaaatataaaatatgttgtttgacatttttcaaataacaagatagtagtaagtgcctttttgacatgaaactttagaaatccacaactaaagatccagtaggcctttttctatgatttttacacagaggcctaatatcatctatgtatttggac

SEQ ID NO: 59124 - DNA, 505 bp, Zea mays
  Clone ID: MRT4577_153917C.1
aaaacaaagggacccttccttttggggggaagggatatataaggggggccaaaattaaattaccacggggccgggaattaaaaaactaaaggaggggaacacattttaacacatttttaaattttgggacaaaactagaaaaaaaagaatgaaaaaaggggggggggcaaaaaggaaagaagaagaaaaaaaatgggggggtacctcgctggggcaaaaaaaagggggggggggggggggaaatctttttaacttttaaaaaaaaacaaatcaccgggcattactaaggacgatggatgaacgggaacgtacttttttaaccttggggggtaaccatataataataagggcaggtatgtgcatgcatgacaatgctgggttggctgctccaaacgatcgatccttcacggccagagggagtagccgtcaaactttttgccatgggggggggggccgggctttccaatcgcgcccccgtgcttgccgccggggccgtggatggggg

SEQ ID NO: 59125 - DNA, 494 bp, Zea mays
  Clone ID: MRT4577_153918C.1
gcgttttccccgcgtccctcccgcatacgggtaatcagttactgaaccattccgttataacttggcctgttaaaactacttccctgagcccagattagacacttttggctgtggttgtaaatgatcgagatgctcttcttggggattgaccgaagtggcaaagccacctctaccctaggagggcagaaggactactcatttactaccgagttgcacccggacaggcggacattgaggatcgtcaaccaggacaaaacctgccggatgaggcacacccccaacttgacaacctgacttgtagcactgctgagcaacatgcgggccatccggtgcatgcgatactactccgatgggcggatactggggttataggagcctgccgacttcgtccatgtgtacagagtggatgaggactacaaaaaacccgctgagaacaaattatttggagaggtgtccgggatcacgctgatcccactcgacgagagcctgttgat

SEQ ID NO: 59126 - DNA, 494 bp, Zea mays
  unsure (1)..(494): unsure at all n locations
  Clone ID: MRT4577_153919C.1
cccacagcagtccgaaaaaacagaaggcctcaaaaaggaattctggcaagtctagtttgaggtccttgattctaacgaagttatatggaaaggattgccagaaagagaagatgcttccggttgcaccaaagctactccgcactatgtcgcgctgggtcaggatagaaagaacaccggcnagacggcgaagccactgcgagcggcgaaggggctgcaaacagcactaagtcgtcgacgcaaaaagcgggcgagaagacgaacccgcaccaagctacagcnagcgacccagaaggccgaggcgccgacacaagcgccgcacttctcctaaagatagacgacgtccgtacgaagcgaaagaagagccaccgtagcatttcgatggacgggattcttcacaaggtcccctatgggaagaaggcgtccggagatgtgatcagtgaaggtctcccccgatcagcctctgccacgtacgatagggacggcgcgaaacctta

SEQ ID NO: 59127 - DNA, 429 bp, Zea mays
  Clone ID: MRT4577_15391C.1
gttctagatcgcgacggccgccctttttttttttttttttttttttttttggaagtcgaaggcatgtatctgatacttttagcaggcttccagcttaatttacagaggatccagatgaaagcgcaaaaaaaaaaaaaaaaaaggtgctaacatacaacaactctcagtttgcgcaaccgatgcaagatcgaagtagactgactaggttcataacacaggggagctgctccggttcgatcgatgccacggatcgacgacgacgacgacgacatgtagatgctacaaacacgctcacacaaacttactagtagcagagcaggcgcgcggctagctagtcgaggcaggtgccgcagatgccgtagccgccgctgcattcgggcccggtgccgtcgcagagccccgacgcgccgacgaacgctgggctcccgc

SEQ ID NO: 59128 - DNA, 328 bp, Zea mays
  Clone ID: MRT4577_153920C.1
catactcactgcccaaccactcacattcccgttattactacgactaacaaccgagaggggcaactgggtcattctacaagacgtactgccagccaactgcacaccacacgcactgtacacttcccacttaccattatactatacttcgaactcccttccattcatcctactctgtggcctatgaaccttacggacccagctaactaagcttatctctatcgcatgactaagcatgcaccggtaaccacatatactactgacacttctgacacctagtctatgtcatgctttcgtactactttaagaggcaattctaatcatgtatgcc

SEQ ID NO: 59129 - DNA, 264 bp, Zea mays
  Clone ID: MRT4577_153921C.1
gccggccgggttccggtagtatcaaataccccagatcgtttatttgccatcttagacctgtcgctacatcgcatttgctatggtccggttcaaatacagttattgcatgagcaaaacagtctcggttactcattggaaggagttgagggagtaatattatggcgtgttctctgtgttgagaaataatcttgaccgcaatggcattaagcacatgaatatagcaaagtcttcttttcgcaaaaaaaaaaaaaaaaaaggccccta

SEQ ID NO: 59130 - DNA, 599 bp, Zea mays
  Clone ID: MRT4577_153922C.1
ccccaccctgcccaggaggctcagggatggctttccaggacaggaagatgtcacccaagcgcatagctaaaagaaggtcccccccagcagatgccatccccaaaagcaagaaggtgaaggacacgagggccgctgcctcccgccgcgttcctggcgcccgctcctgccaaggtgcctgcgggccgagccctcctgaccagaaaacccgaccagtctcacacaggtcccacagcacagaacccggcttggtgctgacactaggccagggcgacgtgggccagctggggctgggtgagaatgtgatggagaggaagaagccggccctggtatccattccggaggatgttgtgcaggctgaggctgggggcatgcacaccgtgtgtctaagcaaaagtggccaggtctattccttcggctgcaatgatgagggtgccctgggaagggacacatcagtggagggctcggagatggtccctgggaaagtggagctgcaagagaaggtggtacaggtgtcagcaggagacagtcacacagcagccctcaccgatgatggccgtgtcttcctctggggctccttccgggacaataacggtgtgatt

SEQ ID NO: 59131 - DNA, 662 bp, Zea mays
  Clone ID: MRT4577_153923C.1
cctcgaggccggccgggaccaagctggagtacggtaggggtagagggaatttccggtgcagcggagaaaggattgagatcggaaagaacaccaacggagaaggactctgttgggccgacactgacagaagccatacgcaactctcactcagagagctcggccgctcccctccgcctttagattgccccgtcattctatactttcatcatctctccagagcccaccagctagctgctcgacccaatatcggactcctcccaccccgatcctctacccgacgtagaccccaatggagaccgacaccgcgtacgtgacgacatgctccacctccagctcctcgggactcatgaagcggcggctcacttccccggagaccggcgcctgccgacgagcgcgccgaacatcggtctgctgggtgcgcgccactgtcgacgatacgaggctaccacgtcctaaaggagcccgacatgtacatacatcgtatggagggagtcttcaaccatacatgagctgtgtgataacgacaagtgctgcacggccaacttccccttcaaggtggagttcgagatctgcgtctaggatgagaccaaggccgatcgggtcttcacgcacctccgagaggacgagatacagttcttgctattatcacagacagctgcaag

SEQ ID NO: 59132 - DNA, 548 bp, Zea mays
  Clone ID: MRT4577_153924C.1
gggagaaccaaggttccaaggatggtttatgtctatacttgtacccagtataccaggaacgggctgaaacgaagataaggactcccaacggccaacaccaaagtctacaatacactaccaacattacgcttctataatcttgacacgccacaacaagaccacgggtgtaccagtatatagcacaaactaaccatagcttacgcaaacccgataccgctatctttatctctaactggcttaagacgcagctacatcgggcagcctaatacacataaatgctcccttactgaagctacctgcggaagctaaacgggtggtggtgaaccaacctacgaagccgacctaaaccattaatcaccgtgggcagagccattcttttaacagatcatcttggactgatgggcactgaacaatgaccacccagctcagaaccttccttcggatctcttgcgaccaccagcggacgaacatacacctgatctacatgattagatcgcacacttgtgcggatactgttccgatctgaacctcagatactacctgccttc

SEQ ID NO: 59133 - DNA, 307 bp, Zea mays
  Clone ID: MRT4577_153925C.1
cacctctactcgccgggccgcgcgcccgcgcgtgtctgctcaaccgtagcgctcgcatcccctttcttcctcgttgttctagcaccaccggccgggcttctccctcgttgagtgcccttgcctacagccccgacgtgccactgctctggccctgccttgttgtgttcatggatatggacagcatcgacatcttcattgtggcgcgtcactgtgatctccccacgccatgccatacacgcccgccaccacgtcttactccagctgcagagcaacaacacgctcgccattccctaatcagcctcaccgt

SEQ ID NO: 59134 - DNA, 546 bp, Zea mays
  Clone ID: MRT4577_153926C.1
gtcgacccagcgtccgttgctagcgccgtgtccgtacatgcggcgggtggggctgccagacaccaccggctcatgctaccgcctgcggtctgatatgccggctccgttctatctgccgccgcagcaacagtcgtaggcatggcaataccccactcaaccaccgtatttttgcccgtgccagcaggtcggatcctggggggggggcagtgttagcagcccgttcctgggccagtgcgttgagttactgaggcaccagtgcagcccggcggcgacgccctacggttcgccacagtgccaggcgctgcagcagcagtgctgtcaccagatcaggcaggtggagccgttgcaccggtaccaggcgacatacggtgtggttctgcaatccttcctgcagcatcagccgcagggcgagcttgaagcgctggatggctgaccatggcgcgcaacatgtgacggctgatgtgcggtctgcagctgcaggatgcaggtctctgccacttgcaacgtatctggcggcggtgtctactactgaggaaactatgttct

SEQ ID NO: 59135 - DNA, 335 bp, Zea mays
  unsure (1)..(335): unsure at all n locations
  Clone ID: MRT4577_153927C.1
agctgccaacaaaaacctggctcagggttctatggtctggttaaatagcgggagcaaacaaagggaacaacaggggtaccaacacctaatccaaaggtagaacggacactaacacggagacagaagcgaacggttacacgatactatagattgataagacaactcggccgaagacggatgggtccacacatgagttcaatgattcggcgaaatctcagattgagtgaacaaaaccacattcgcacatagagntgaacacgaaacacctttcctttgcactttaacccattcaaaatgcaaggggctgccggcagagggaaactaaaatatgttgg

SEQ ID NO: 59136 - DNA, 539 bp, Zea mays
  Clone ID: MRT4577_153928C.1
aaaaattggaggaccatttaattcatcatccccccaaatccacaactaaaacaacgttattgcccatccgcctaatcatttacttatccaaccaaacagaaaagtctaattgggttgacttgggggggccaaccccaggaaacttccccccggtttcaagggcctcccggaaggcgtgaacaacctccgggtttttgggctaaggtggccccccctaaaaaaaggggttgggggtttcctaaacccttggaaacaaacaaggccccgacctttccttgaagaaggttttcccccaattgggtctaaatgcacggaatgcttgggggccctcaaaagcacgctaagttggccttgcccgaagccagaaaaggtttttgttggagaccactgtggcttaggtggggcccaactttggacccggggtaaaaccatccaccgttacagggaagcctttttttctgagggcaccatcccctctggattgggctccaaaggcccttttttttgcttaaaaggaacccccaatagttggggttagg

SEQ ID NO: 59137 - DNA, 452 bp, Zea mays
  Clone ID: MRT4577_153929C.1
gacggctgacctgattgggagcacgccgctgccgttggagttgacgccccggcctggagccaccgtcatcgaggggggattgccgcgttcgccgccgctcgcggttacggttggcctcgcactcgctagtcgctactgatggttccaagagcaaaggcccatgttgtttgggatccagtaggcccaatcaagccgttgactccgaggagagccgctgccgatgtcctcgcctcttgccgacaccttcacccactcccagcaggccaggccagcacacattggcgcttctcgccggagaagggtgggcggaggatgccctgcctggcccctgccaattgacggccacatggcttcttctagcagttgcaggcaagtagataaacctaccacgacgagcaaacgcagatctgtagcctagtacctcgtcttcactacttctcgttcggggtggt

SEQ ID NO: 59138 - DNA, 511 bp, Zea mays
  Clone ID: MRT4577_15392C.1
acccattcacgagggttcaatatgctgctgccctcctccagtgccagcgcctacgctgtacccgaggggcccatcaccacagactacacctacacatccgcgtttgtgaggaacgattcgtgcccgatacataggccgatgtttgcattgcttcaagacatgagcaatgcggacaagggccgaccagctgcgctctgcaacacacaggccatcaacctaaccttgacgtcagctatcaatacaatgcactcgtgagagatgcctctcaggcgggacgaccacactgaagacatacaaagacagcacattcgttgcagtgtgaagaatcccgcataattgacttgaccgacagaacgatcctggatgtataaggcctaaccactgctacttgacaagctcatacatctgaatgcacacgttatcatgctgcgctgatcttcatagcagctgaatagtcaaacactcggaaacctcagcttgatgcacagtaataggcgacgatcatcgctgc

SEQ ID NO: 59139 - DNA, 849 bp, Zea mays
  Clone ID: MRT4577_153930C.1
tcgcacctcccgcagcaggcagccaggcactggcgtcctggtcgaaacaaccccaccacctccggcacaagcacacgaagccttcgcattcctgtccggcggaaccgctgaaggaagggagccgaacgagcaagcaagccaccaacgaaggttgctagggccggagtggatggggttcatgctgcgggtgaggctcgcctccttcttcgtcggcgcggctgccgccgccgcgggcgggggctacttcctctacaaggactacaagctcgccaacgactctctggccctcaaggtgaaatgtctccaagactcaactgacactcgctacgaagcccttgaaaagcgactcgctgctttggaaggtctgcaaagccctgaggctgcaccggatgtggatacgccatctgattagtctgttcgctacgagactttgatttacgtctgttttcgtttgccccagttgtcttctcctttgaaagcaagtacctgaccaacaacaaaataatctaggatgcttcttttgtactgcaaatgtctgaggctgagattctcccctacatttcatgccagaaaagcacatgaacatcagaactctgattactcaggcatactgagaatggccaaatgggcgtgaacccaaaacccagtttgagacaataatgctgcaatggtttttgccgcgccaaaaaaaaaaaaaaaattaccgaacttgtccatgctgtatatgtatgacaatggcccaaatgggcaaacatactacgtgttatttatgcggtggatagggcctaggcatgctactccctccacgtttaatataaaatgttgagggaagctaattggctcaaaatc

SEQ ID NO: 59140 - DNA, 953 bp, Zea mays
  unsure (1)..(953): unsure at all n locations
  Clone ID: MRT4577_153931C.1
actttacctaagtaaatgaccaaacctatcaccaaaaaggaaattgtgtacacaaaatggaagaaaaaacacaggacgaaatacgcgagaaattccaggacacagcggcggtcacgcgttttctgacggctgacctgattgggagcacgccgctgccgttggagttgacgccccggcctggagccaccgtcatcgaggggggattgccgcgttcggcgccgctcgcggtgacggtcggcctcgcactcgctactggtggtggtggaagcctcgcactcgctatcgctagtcgctactgatggttccaagagcaaaggcccatgttgtttgggatccagtaggcccaatcaagccgttgactccgaggagagccgctgccgatgtcctcgcctcttgccgacaccttcacccactcccagcagtccagcacacattggtgacgcttctcgccggagaagggtgggcggaggatgccctgccaattgacggccacatggcttcttctagcagttgcaggcaagtagataaacctaccacgacgagcaaacgcagatctgtagcctagtacctcgtcttcactacttctcgttcggggtggtcgaatggcagacccagtgaccattgccgcagtgggctggggcatcgctgctgtaggctggctcgtctcgcccatcatcaccaggcttctcaacaaagccttttcctacctcggtgtcgacggagcgaagaagctgaaagagctcgagactaaagttttacagctggagctgttgatggaagcggntgaggagagtcctcgcagaaaccagctggagagattgtttcaggatctcaggtctgccttctacgaggttgaagacatcctggacgatgtcgagtactgcagtctgggaagggcagccttatctttatctcaccccggtgacagttggattcccagagcatgccttcta

SEQ ID NO: 59141 - DNA, 3383 bp, Zea mays
  unsure (1)..(3383): unsure at all n locations
  Clone ID: MRT4577_153933C.1
gcgttttctgacggctngacctgatgggagcacgccgctgccgttggagttgacgccccggccctggaccaccgtcatcgaggggggattgccgcgttcggcgccgctcgcggtgacggtcggcctcgcactcgctactggtggtggtggaagcctcgcactcgctatcgctagtcggtactgatggttccaagagcaaaggcccatgttgtttgggatccagtaggcccaatcaagccgttgactccgaggagagccgcttccgatgtcctcgcctcttgccgacaccttcacccactcccagcaggccagcacacattggcgacgcttctcgccggagaagggtgggcggaggatgccctgcctggcccctgccaattgacggccacatggcttcttctagcaggtaaacggtgctacttcaaatggcccacctcttagggtgtcaaaaatggagctcagtaaaatcctgtttaaaatggaaaatattgtgactgaagcacacaaaattttgcagcttttgaacttgccaagcgcggcagtaatgttgacaagagacaaattgttgctgagaattcacgcggtgcagtcactactgtggcccctccacgtttagtaattggccgcgaaaaggatcgcgtcaaggtcatatctatgcttcgtgagacacttgatgatggtcaacgggatcgcagcggtgctaaaccatactctacaattggcatttatggcgttcctgggtctggtaaatctaccctcgcaccagtatgtttgcgcccatgaggaagacaatatccactttgacattatcatctgggtccatgtgtcgcagaaatttagtgtgcaagccgttttgagggagacgatcgagcaggttacagggaagccaggcccccagtttgctggtgctaccgccctacaaaagagattgaaggcggagattcgagaaaaaacgtttcctcttggtacttgatgatgtctggtacagtaagaatggaaatcgtcacgatgatttacagcagatactctccccattgaatgttgccaaggcaggaagcaagatcttagccactagcagaacattggatgcactgctagctttgggtgctacgagacgcattccgatacgtgacctggatgacggggccttccttaacctgttcatgcattacgcacttgattttgcgagcattgatgaacgagaccgaggagagtttcagatggtcggagctgagattgcgaaaaagctcaagcgatcacctctagctgccagaacagtgggaagacagttatgtataagaccaaacatggagttttggaggaatactcgggatcgggaccttctggacgagacaatgggagctctgtggtggagctaccagcatctagatgagcaggtcaggcgatgcttttcttattgcagtatttttcccaggaggcgttggctggaccctgagtacttagtcaggttgtgggtggcagaaggatttgtcacagccagccgcaatacaggggaggaactggaggctgttggtcgaggctactttgatgagttagtgtcagcctcatttctgcaaccagtagatggtgacaaggaacgctatacgatccatgatctgttgcatgacttggtaagtaaagtagctggaagtgactgcttcagagctgacaatggctgggaaggagaatttcctcaggatgtccgtcatctttgggttgagaactgtaaattagacttgattgcccacaagattaccagactgaaaaagctacgcaccctgttcatttctgctggcgagaatggcacgccagttgaggaaaaagccttgttggaaaatattttcacgggtgtgacgacattgcgggtgctccagataacaccctggacagcaggaactctctcgttcccagcatctgttgggcggctaaagcatctacgctatctttctgtcggtaggcatattggcggtactaaggtgattctgccaagtacggttgttttgggactgtaccatctgcagcttttggattgcccttctgtagccttctcctcctgcgaagatattgttaagggcctgttcggttgtaccggaatgagccaggattcattccagctcatcaaaatctatataaattagagaagtaatccagctaggaattaatccggggctccaatccggaacaaccgaacagggcctaagctggttagcttgaggcacctactgtgctcatcaggatctctgaatgtaccaaacataggcaggattgtgtcactccgaactcttcgatgcttcagggtaaagaagaaggcaggctacgagttgtggcagctgaagcacctcaacaagcttgagaagaagctagtgatccgcggccttcagaacgctggacgcaagggagaggctccagaagccaatctagctgccaaggaacggctcacaaccctagcccttgagtgggacagtgatgcgctgctgagctgcggcgcggacctccaagcagaggtactggagggcctctgccctccgttgcattgcacctcgaaaaactgcggctctgttggtacggcggctcgaggtacccagactggattgttggcgtgcgatgcctttgcctctaccggtgcagccgactaggcgcctttcatggagagaacatatctaatgcacatggaagattggtacacatggtgtacatattaaatcatcatcactcattttagatctaacgtctctaattgtttggtatattttgctaaagataccctccaacatggtggtgtgtagtggtggaaggtgttatttgtaaattgaatgatcaactatagacgttagatttaaaataagtggtggtgatttaatatgtgcaccatgtgcactaatcctctatgtgcaccagatatgcgcaaaaggatacagcacgttcgcacagtaatcatcggatgggaatcacttcccagagcagagctattagatcacttcgagagcgagcctgtggtgccggagaaagagaaggagatcgccgcccttgttaaaaagttgctcgtgatgcttggccttctactactttgcatgttcagtgtgattgcaaggttgcttgtgggctctttcctgctcccagctccgctggtcgtcgtaattttgctgcttgtggtatggataattttgacactctagaggcctgtgaaatcggttatgcctggtgccgttaaacacggacactactctctatcaattttcttctcttctctatggatattatgtttgcttgcctatatctactcgaccagtctgagaaaagatactatgtagttgtttgtatggaaaaaatgttgtataagataaaaaacgaatataaagctatgacccttttttttggatgtg

SEQ ID NO: 59142 - DNA, 301 bp, Zea mays
  Clone ID: MRT4577_153934C.1
cggaatactcggggcggccggcctatcctttgtttatttttaaatttaaaaacacccggcggccggcattaaacaccgaacccacacaggaaaaagaacatgacagttgttaaaacagaatttaaacccgaaaagaaagagaggtgcaaacaaaatagggcaagatcttccagaaaaggggggacccctgccaaaacaactcatttaatcggggacccaagatgaggaaactaacacccacccccaaaacctcccccttgccaacctagacaaaggaggccgcaaaggggcatcccccctt

SEQ ID NO: 59143 - DNA, 782 bp, Zea mays
  Clone ID: MRT4577_153935C.1
cccacgcgtcggcggggccgtgggcggacgtaccggcttgaccaaccaggcgcaccggcctcgccggcgatgccctcctccacctccgccggcggcggcgccattcccgccggcccaccgtcgacgctctctccgaacgcggctccctacaccttcctcgcgcgtcagtcccgcgccccacccggacgcctccaagatggtgatgctccaaggttgattgataataactttgtgttgtatggagaggacaacagttcttattcggtgccactggcagcacaatcaggaatgaagcagagtgacactgtttactcaagcagctcgcatggaacacaccaaggtcagccaagctccgcacgtggaattcctgtcggtgtttatccatctccaacgtcctcaattgcgatagtttcagagccatcagtgaccataggttctgatttcaaccagcaccttgttccattgacctcaggtaagggaagcagacagccaagggtgacgatcagaagccctccaaataagacttcagaaactaacaacaccatttttggttctgttagcaaattggctataaggaaaaatgatgagtccaacaaagagactgggaaacatgtctccttcagcaggaacttacaactcggtagtcctgctcatggaaatggcaattcaaatggcgccatggctctttcgaagagctaaatcctgattttggcgtgaagcctcttgtcttgtctgcatgcactagcccatgtgttacaatggctgatgatttgaaccctgat

SEQ ID NO: 59144 - DNA, 509 bp, Zea mays
  Clone ID: MRT4577_153936C.1
ccggccgggacttaccaactggaaactcatagtttacagtagcaatttgatcatttgaacatgaagctatctcaattcctcagcgtcgctgcggtgtgcggctttgcagctgcaagccctatcccagacaatgccatcgcggagcgcgagaatttatatcccagaccttacactctgaagatggggggtgatgcgtttaaaaagcgcgagaatttatatggcagaccctatactctaaagatgaaggacgatgcgcttgagaaacgtgagaacttatataccagaccatatactctgaggatggagggagatgcgtttaagaaacgtgatccccaaaacacgtacggaaaggcttataccttgaagatgaaggatgatggatttgagaaacgtgatgagtaaggcagggtcttgtatttcacaatctcttgatgagggtagcaaatcagtgcccaatctcaaatctatatctgtttctgggcaaaaaaaaaaaaaaaaaacccgcggcc

SEQ ID NO: 59145 - DNA, 238 bp, Zea mays
  Clone ID: MRT4577_153937C.1
actgcagggtctctagaagaaagttaagaagatttcaaataaatcagttgaaacaggcaaaattgtcatctttaaagtgctcaaacatgtacacacatacatttgcatctcatccaaatacatgtccataatatactaccacatctactacatcattattacacacactatcactatcatacaatcttatactttacctcattatgcccaccattccatcctactaaatccacaccta

SEQ ID NO: 59146 - DNA, 456 bp, Zea mays
  Clone ID: MRT4577_153938C.1
gttatagcacttctttctttgaagactgaataggggggggttgttattgacaaggattcgaagtctatgcaaccactttccaataagaaagaaaatgatgaagttttcatcaaactgggatctgacaaggatgctttgaagaagaaagaaaatgctgaacgtgatgagcgtgctaagaagtctgtgagcatcaacgagttcctaaaaccagctgaaggagagaggtactatggcggccgcggtcgtggcaggggccgcggggatcgtggcggtttcaggggtggatatggtgagggccatcgctctgcagctccaccagcttcagaaatcaaagaccatatccaattccccactcttggtcggaagtgaaatgcatgtactgcctgcaatattaagctatgtttgcggccaactctgaattctgtctatcccgaaatcactgtgcaagtgctgatc

SEQ ID NO: 59147 - DNA, 392 bp, Zea mays
  Clone ID: MRT4577_153939C.1
cttggaacctttgggctgatttatgtgcctggctctgcgtagtcgtcggcgaaagctccaggggtatgatacgctgacttgatgcgatccgaagagcgtgtcagacgctaacagctatggatatgttagtcgcggtccccgtcaatattgacacctactacgcatgcgcgatatggtcattaatcatcaataaggcgcctatgtctaagacagctacgcattcgaatacacgtgcgaatgatcccgataatccggtgctctgacgggaacgacggatagagtgtccttcggagttgagctcagatggtaccgatatgacgtatactaaggtgtctatgggtctatgtcggattcgatgaacaatagtcgccgttatacaactagagccactg

SEQ ID NO: 59148 - DNA, 960 bp, Zea mays
  Clone ID: MRT4577_15393C.1
ctcgaggccggccgggaaccacaactcttcgattctttcctcccaatacgcacatttcattcctgcaaacatgggcttcaccgacctcgtttccgatgcgggcttgaccctcctcaacagctatgtgaggacgcgctcctacattgttggctactccccatcgcaggccgatgtcaaggtcttccagcaaatcaaggagattcctgcccccgagaagtacccatacgcatggcgctggtacaaccacatcctcaccttccagggtgagttcgactcgctccctggcgacccaaccaaggagttcactgcctacggccccgagtcttcagagctgcccctgaaccccgccaaggcccctgagaaggaggctgaggatgacgaggacatcgacttgttcggcagtgacgacgaggaggaggatgccgaggccgccaggatcaaggaggaacgtctggccgagtacaacaagaagaaggccggcaagaccaagcctgctgccaagtccattgtcacccttgacgttaagccatgggatgacgagacaaacatggacgagctcaaggccaacgttctctccattgagaaggacggtcttgtctggggtgcctccaagttggttgctgtcggtttcggtatcaagaagctccagatcaacttggtcgtcgaggacgagaaggtctcgctagacgagctccagcaacagattgaggagtttgaggaccacgttcagtccaccgacattgttgccatgcagaagttgtagacgactgccgctaggtgctttgatgactatttgacgaagagtatgcatgatcatgacggtagggtttgggctcggttcacggtttgatgtctttatgagcagtcgctagacgagagccaaaataacgacatggtagagataccacttcccactgcgggacaaggaaaaaaaagaaaaaaaaaaaaaaaaaagcggcc

SEQ ID NO: 59149 - DNA, 722 bp, Zea mays
  unsure (1)..(722): unsure at all n locations
  Clone ID: MRT4577_153940C.1
gctcccagctgttaatcgttgtttccctcttgaactgggacaaagattgtcaaagaattaccagaacaaatcaaatgctatttgctgcacatttaattatgatacattcatacgcacgtacatgtctcagcaggaccatctgaaaatcaacaaatcgctgtcaacccccaaaacagaacacgctcctcaaaagctgaagcagaggaagccgagcagcacgcccgcgagcagcgtggccaacgccggcgcgcgtgccctgagcgccgaactcggggcagcaccgggcggcggcgtgccggcgcccggggccgagctcttgacggggcacgcgtagtcgcactcggcagggtcgaccacccggtacacgcccttgctggtgagcaggtagacgtccttggcgttgtcctcgccgaaggagaagatgtagcccagcgacggcagcgagctcccggcggcgaagtcgcacgggatgggcgagctcttggagcagccgaacgccatcgtcgacacgttgtacacgccgctgccatccggcgtctcggtccccgcccacatcgactccgggtacaggtcggcgtacaggtacctgccgttgaggcatgggtccgtcatggagcggtagacgtagccgccggtgatngaggcggagccgacgttgctgttgacggagctgtgggcgtagcccatgacgggggcgatggcgtcgatggagtcggcggagg

SEQ ID NO: 59150 - DNA, 593 bp, Zea mays
  Clone ID: MRT4577_153941C.1
atgcaaataaaaaagggtatgagagtagtcaaaactctaaacaccctaccttgagcaaaaaaaacaccaacatgaaacaagcaagaaaactatatgaactacattatcggagcatggaccattaataaaagttgtagaacactaaattacttacaaaagttagtaaggatgatataccataaaaattatgcaaaatacccaaataggtcacacaagtgggaggatcaatggaaaaacgagacttctgctaactaagttttgagcccctctaactagacactacatgttcactgggatctaggcctcaaacctaataccctcaattaacaaaattgtgcttaagtaccttatctaacccctgatgaaatgtgggcccaaggccatactagtggacaagacaaaacattagtttttcctcggaaccgagcatgctgacggtccatatttccagaccccaagtctcttacaccagtgaccaaaatccttgacggttcatggggtaagtcctatcctctatcaccactattattattagatgaaactatgtattaactgttggatgaattacttttgtagaaagttagacatggatg

SEQ ID NO: 59151 - DNA, 361 bp, Zea mays
  Clone ID: MRT4577_153942C.1
acttttacaccacgggggggagcaatacttatttgatatccataatatcctgaacacgacactcggatccccacataaaaaaccaaacctaaatattcatgacacgccactgttacttaccagcaccataaatataaggtctgtactcccatccaacacaattaacataaggatacaatctagctcatatcataagcattttcaactgatctgagccgcctcaatctcagttttctctcactacgtattctgagcctcaacatactattccaaaattttaagtttcgacacttcttattgatcatcactcttatcttccaaattatccattcccataccttccatcccaccaataccaccc

SEQ ID NO: 59152 - DNA, 593 bp, Zea mays
  Clone ID: MRT4577_153943C.1
aatagaagcgagcgagcgagcagcagtaggcagcggcgcgggcgaggagcagaccagcacccagcagccctcgtcggggggcggtagttgcagcttcaccaggcggcgcctttacccggatcatctgcctctgacgctccccaaaaccctatagcttttcttcatcccacgcacctctcactagcggtgtcttcggaatgagaaaacccaattcttcaaccctacaggagccaacaggtaatcacaactggaatcataactatatcaaccttgataatacaacaaacatcacgcctattacatcagtacaacgttggggcctatatcgccacaaaaaataacgggacaacaactacaacaactttagtgataaggaaacacttgcgtgccctgactcatcagccaatcagcagagatcttccattcaaacaactagatgcattgaaatctgcttctaatatgcgacgacaacaactaccatacaggcagatacctgctgtctacccccagcaatttctaccattcaaccaactgggagcattgaactctcctgcttattaacagcagtaacaactactaccattcagacagat

SEQ ID NO: 59153 - DNA, 1601 bp, Zea mays
  Clone ID: MRT4577_153944C.1
attgggtacctcgaggccggccgggacggacagtagcaaaagccccccacaaaaccctaccacatcccagcgctggcatctcacggggaggactagtagtatgctcgccgccgcctggaggctgtcgcagcgagccgtcacgtctcctctcctaggcatcgggcgatcccaaatccgaaaccctttctccaccatggcgtctctctcgccggcagccgcctcgccgaagaggctgagggtctactcgtctgccgcggccgacggtgacggcgcggggagcggcaagcgcgtggggacccacaacggaagcttccactgcgatgaggcgctcggctgcttcctcatccgcctcacctcccagttcgccggcgccgacgtcgtccgcacccgcgattcccagatccttgatacattggatgctgttcttgatgttgggggtgtctatgatcccagtcggcatcgctatgatcatcaccagaagggcttcagtgaggtttttggacatggattcaacacaaaacttagcagtgctggacttgtgtacaagcacttcggcaaggagataattgctaaggagcttggggttaatgaggatcatgaagatgttcactgtttgtatctcgcgatatataaaagctttgttgaggcacttgatgcgattgacaatggaatcaatcaatatgacacagatcaaccgccaaagtatgtgaacaatacacacttgtcttcacgcgttggacgctttaatctggactggactgatccagaccagtcacttgcattaatctgaacgcggcatttgaacaccagttagtactagctgagaatgcggcatttgaacaggcaatggtactagctggaagtgaatttatggagagcgttcgcttccatgttaaatcatggttaccggcaaggtctattgtcctggagtgtttgttatcaaaaggaaacattgatccaagtggagaaatcatggttttggatagattctgcccgtggaaacttcatttatttgagcttgaagaggagctgaagactgatcctctgaccaagtatgtgctgtatcaggatgagaggagcaagagttggcgagtccaagcagtcgcagttgctcctgacaggttcgagagccgaaaggctctgccagagaagtggaggggcatgagagacgacgaactttcagcagaaaccggcatccctggctgtgtgtttgtccacatgagtggcttcattgggggcaacaagacctacgagggagcattggaaatggcgagagctgctctgaaattctgattcaaccaaagcatattacccgtgttaccattatatcagtaaacacatcagtaacacatgatgcagttgcgctttctccaatgttatcgttgactcgagccgtggttaactgcgactgattcttgcactgatcttctgttatcctcgtcttacagaagaggtcgattgacccttttcattctttcgtgggatctggtattgtttagaatgtgacggtttatctgaaaaaaaatgatggaactttttgtcctcaagccaaaaaaaaaaaaaaaaaaaaaaaaaagaaaaaaaaaaaaaaaaaagcggcc

SEQ ID NO: 59154 - DNA, 956 bp, Zea mays
  Clone ID: MRT4577_153945C.1
aggtcagggctttcaactcgcattgcatacacatcagtgaggaagaatacatggttgcatgagtgctaaatagctagacatatacttaatatactccagtatggattatatgatgcgcttgagactgatccaacactcagattcaaaaactgaaaacctcttgctaatcataagaggacgatagcaaaacttcttaattaatttacatcaatctacaagactacaagtacgacgccgggtccacagcctcgttccggccacctgccgccgccggcatgagcgcgagcaccagcagcaccgccagcattgcgaccggcacgagcagcagcgccaacggcggcgccgggagcggcggcaggacgagcgggagcaccaccagcagcacggtgacgagggcgagcaggaggcacgactccctggagaagtacttggcgcagaagcccctcggcgtgcttgggtcgtcatcgtcgtgcttgtgccggccgccgtgagcagcagtcctcccgaccggcggcggcggtgtctgcggcgatgacggcattcacctgtgcccaagccgctccaccggcgatggcggcgctgcaggtctgccgcccctagcccctctcacctgtcgcttcgtccttccctcccgaacgctttcaagctggcgatgccggtgaggccaaggcgaggagaagcgcatctttctttatccagctgcaaacagcaacagcaagtcggaactagctagctagctgtttcaggagaagaagctgttttgcggcggcggcggcggcggccggctacgaagtgatctatctactatggtcatcagcgcaggacactgcaggggaggagacgagctgagagaaggaagaagcgcgggggtgatggtgatcgaggaggcggcggccaggtacatgcactgcatccggccgggcagataaatacaaggcccggtcgtcctagtctcc

SEQ ID NO: 59155 - DNA, 530 bp, Zea mays
  unsure (1)..(530): unsure at all n locations
  Clone ID: MRT4577_153946C.1
ccttctanacggacgggggggggggggggggggggaaaaaaaaannnngggggggggggggnnnnnnnnnnnnnnnncnnnnttttttttttttttttaaccccccgggaaacaaaaacccccccttttgcccaaacttttttttttttttttttcaacccccacttttttttgttgttggggtttncaatncaacctgaaacaaaataccccccttccttttgcagctttaatcaatccacgttccttcccccttttcggtcccaaagacaattaattttctttcctttccccttggccttttttgcccgggcccaattttgtggctttccccccttcctttttttttcctgggtcttttttttggtcagcggggttttttagccgcccctttcctgtgaccatggcctctcccaaaaacccctactttgaaaacttggcggggcggccctttttttcctcctttacctttagctccgcgaaggcctttgggttcttccgccaccccctggggtgttcaatcttccccc

SEQ ID NO: 59156 - DNA, 431 bp, Zea mays
  unsure (1)..(431): unsure at all n locations
  Clone ID: MRT4577_153947C.1
cgggtcgaccccgcgtccgttgttcccctccgtctctctgttcggcgcggtggtgctggctcntntgcttggtggtctgctcatgtctgcttcgtgttcncctctgtctgtcttcctngctttcngctgcatgtcctcatccccgctttttgttggcgggctttcttctggttccgttgcttccagtctctggggcggttgtcggggttgtggtcctgttgttgttgctgtgcctttccttgctcgtgcgtctgggtggtccgggggttttggctttgtgccttacacgtcttctgtggcggcttcggctgccgtctctgccatggttggtcttgctctggttggtcggtgcttgcgggttcttcctgctcgcgtgcggcctggtggctttctctgtttcggtggttctggtggtggcggctttggtggtg

SEQ ID NO: 59157 - DNA, 403 bp, Zea mays
  Clone ID: MRT4577_153948C.1
gttttctttgggcgaactaatcatggggtaatgggggattgggaataggaaatttagcaagtctgtgtgttccaagtcagactgttcagcaaacatggtgttggtattgtgttctttgcaagcctgtgtgaaaaagttcctgtttagggctacctagtttggaaacttaggttgcaaattttttctcggaaataatgttgtattgctctggggcatgttagcttgtagccgtgttgcatgataagaaggaactcaatgacatggacttgtgctgccaagattccaagaatgtgtttatggaagagctgatgctttgaggtcttctagctggctctaaatactctcaacaatgtctgatcggtccagtggagttaggttttgtttcaagctccctagttatttt

SEQ ID NO: 59158 - DNA, 342 bp, Zea mays
  Clone ID: MRT4577_153949C.1
gagggaaataaaatcaaaggtggtcaaattatgggaagggtctccaaaatgggacagggggaaaaaaaaaaaaaaggggatgccaagcacactcaccaccattaggtaacggccgaaatccacccccgggttgcgagggggcaggggtccccccttttttcaaaaaagaaaaagaaaaaaaagaaaagaccccccccttttatttgtaaaaaaactttgcaaaaacacaccacttttctggaagccaagcttattttatttgggccatccacaattttattttgggacaaccttttttactggatccatacacctacaagcatttttatataaaacctggtg

SEQ ID NO: 59159 - DNA, 456 bp, Zea mays
  Clone ID: MRT4577_15394C.1
gccaggcctcctttttcgggggccgcccttttttttttttttttttttttttttttttttttttttttttttttttttttttttttttttttttttttttttttttggggccaaaaagcaagcttaaattgttttgagcaaaatttttttgggttccattcacttcctttgtttgaaacatagggggggtttggcccttcttagggccgggtgcccaagcttttttttcccagccaacaattaattaattcatgggccccttaccctttaagagaggtgggcttctttttttcgcagcttaatcctaccctggcaatttcatgatttttaatcatgcatccccttttgagacgagaccctttggaaaacaattttttggtgtgttagttctcacccccctttttatgttgaccgttggaatttattgaaacctgactttcatttggggaacttttc

SEQ ID NO: 59160 - DNA, 397 bp, Zea mays
  Clone ID: MRT4577_153950C.1
ggagagagaactgtgagcaccataccaggatccgatccttgtgaacagagagtaggggtagtcaccaccgaagaattacgattgttggttgcgccgggagcctgcgtcgcggaatcaggggtcgaaagcagtatcctgttgattcgcatgtcggtgaccgtgtggaagccattgccggtgacggacgccacgccagtacatgccccgtcaacgccgtttctcacctatgccggtggtcagggtccatggaatagtggcgaagatgaagccggtgtccccgtgaatcactcgcttgatgaatcgaggaaccgtggagccgccaccgttggcgcacccgtgggacgaccctgacgcggcaaccagtgtcaccgtgggatgggggcatctgtgtcgacgt

SEQ ID NO: 59161 - DNA, 340 bp, Zea mays
  Clone ID: MRT4577_153951C.1
cacgggggcggggagtcgagaccactgccccatacaaagaattaatggttttggcgacgtgcttcagacagagcaccatgtacctcgcccctgctgtgagggggggcggggtcgtcgtctgtaccagcggcggtatcctgatgctgccttccatccggatcgttccccacagcgtatggcaccgccctgatcgccccgcgtatcttggaccgttctcccatcatacccgtcgtacctgaccggccagttccccttctactacgactgtgaccccgccggtcctctcgtgccgaccctccacaccttctctccgtaaccggggagcttgtaggtgatccac

SEQ ID NO: 59162 - DNA, 415 bp, Zea mays
  Clone ID: MRT4577_153952C.1
ggacctttgggctgctttatgtgcttgtttatgtgcttgtttatgtgcttgttcctgtgcctgtcataagacaatagaaatccgcgacccgcaacccgacactaagtccgcggacgggtgaatttctagtggatcctagcgtcgaagacgccagcagtactctaggcttccgttataatatccgcccaaagttccgccgtgagtacggccgcgtccgccgggaagacgaacacgccgaagtcgcaacactccgcgggtaagacgacccggtggccgaggaaaccggaactgtctccatagaagcgatgatgactgcctcgccggtggccgatgaaaggctaggctcgtacgaagacctcgacgatgaccatactgacgacttaacctccctctcggaactcgacctaatcgacga

SEQ ID NO: 59163 - DNA, 813 bp, Zea mays
  Clone ID: MRT4577_153953C.1
gggtacctcgaggccggccgggaagctcggcgttttttaatggaacactagcctgaacgaaggatactacgtttgttcgtgtgtggttgcgttgccgagatcgatcgacagacagggtagcagctagcccagacacacatattggtctggctggccatggtggggctggggtttccgaggagcaaggaggcggcccgtagccacgcggtgtcgttcctcctcggcgcggcgctgcccactgccctcctcttcttcctcgcgtccgaccgcctcggcgacggcttgtccaccatctcgcacagctgggggaacgggccggcgggcgacgacgaagcaaaccagcatgccatgttcaagggcctagccgagctgctgccgagagttgccatggacgacaggacggtgatcatcacgtcggtgaacgaggcgtgggcgcggcccggctccctgctggacctctacctcgacagcttcaggaacggccaggacaccgcgcacctcctcggccacctcctcgtggtcgcgctcgacgcccgcggcttccgccgctgccaggccgtgcaccctcactgctacctcctcctcaacgtcacgtcgtccgtggacatgagctccgccaagccgttcatgagcacggactacctggagctcgtctggaccaagctcgtcttccagcagcgcgtgctggagctcggctacaacttcccttttcacggactgcgacatggtatggttccgcaacccgttccagcactttccccgtgtacgcccgacattgagctgctcgtcggacaacttcaaggcgtccccgcg

SEQ ID NO: 59164 - DNA, 431 bp, Zea mays
  Clone ID: MRT4577_153954C.1
cgggaggaggcccgcaccgatgcacgatctgccggagggggttcgccacgggccaggcgctcggcgggcacaagcgctgccactactgggacggcgcgtcggcgtccgtctccctgtccgcgtccggtacggggtcgtcgggcgtcacactgaggaattttgacctcaacctgatgcccgtggcggagaacgcagggatgaagaggtgggtcgaggaggaggaggtgcagagtccactgccgatcaagaagcgcaggatcttggattagctctcgcgctactaccagcggttgagacctgtgtgcccacagcctcggttcgtgtaaaaaggaagattgattgtttcatcgattatttgattcgttctttacttctttcacactaataaaatatttgattgttgtatcaaaaacctacctccgcggacccat

SEQ ID NO: 59165 - DNA, 338 bp, Zea mays
  Clone ID: MRT4577_153955C.1
caaatacaccgaggccaccaccggggccgagatgaacccctagcgccgccgccatctcaatcatcctctcgcgcgcgcgtgcgtcaatccgacagcagctacagtcatggcgcagccgctcgtcgtgaataaggacgactacctcgacgaggaagagtactactcgccattcctgagcatagataagggcgccgtgctgcaagaggcccgcgtcttccacgaccctcagcttgacactcgtcgatgctgccatgttatcaccaaactcctgtacctgctcaaccagggtgccacctttaccaaggttgaggctacagaggtcttctttgcaacaacca

SEQ ID NO: 59166 - DNA, 653 bp, Zea mays
  Clone ID: MRT4577_153956C.1
gtgcatccacccgtccagcccccgcacctcagccccggagcaatcgccgcatccaccgccccgcagccgcatctccgcaccaatggcatccacctcccgccccaccctgccctttgccttggccctcctctatgacccaactgcagccggcgccatcgccgctggcgttgagctgcccatatccaggtccaccctgccgatccccttcgccgtcgcagaggcagcgggagtgcccccacccaccgcagacccctcctcctcttcctccaccccagccaaactgcttggcacatcgatcgatctgccggcgttcctctacccgtccaccaagagcatcgagccccggaacttcaagcaggctcaggcctttgtgcgcttccagacgtacaggccggagctcggcccgctgccggagccctcgcccgacgaccgcccaacaagcgccatcgtctacccggccagcttcggtcaggccgactccctcgactccctgctcgcctcccacgtctacgacaaggagggcgtggtggcagtcatcaagaggcacgaaggccccatccgcatcatcctccaccagatccagatctcatctgcgccggaggtcctcaccctgatcggcgccaaggtggatatcggctgggccttctctcccg

SEQ ID NO: 59167 - DNA, 154 bp, Zea mays
  Clone ID: MRT4577_153957C.1
ctcgtgcgggatgcgaggtgcgcacatgtgcttgggcacgagatggtccggcgcgttgctggttcctgccgtccgtcccaggtgatggatcagaggtctattcctctaggtgatatatatatatatatatatatatatatatatatatatattt

SEQ ID NO: 59168 - DNA, 224 bp, Zea mays
  Clone ID: MRT4577_153958C.1
cgggttggggttctcacgtgcgccgacccggtactgcacactgtgtcgtgtgccagcgaaccgccaacagctccagggaaggggtggcctaatggcgccccgaacctcctccattgagtcgatagctggcaacacaaaccaaccgaagtgtggaagtgcacaagggaagaacttaggctgagggagcgagcaaaggcggctcggactcgagcgcaatacccatg

SEQ ID NO: 59169 - DNA, 272 bp, Zea mays
  Clone ID: MRT4577_153959C.1
ttttctgtggggaaacaagtgaagctgctcttcagcatagacactatctttatcccatcattttagtaaaaactaggtttgtctcacttctgaggtgtcttattaatgtacttcatctgagaatttgttgatcttaatgttcgagctatataagaactgccattataaaaaatgggataatagatgattttatcagtatacctgtggaatatgtacaaactggatctatagatattttgaactggaccaggtgggtattgaagtaacccatc

SEQ ID NO: 59170 - DNA, 203 bp, Zea mays
  unsure (1)..(203): unsure at all n locations
  Clone ID: MRT4577_15395C.1
tacgctgcacangctcctgctgntatctcatatctctcaagccccttcggcttccgccatcgtcaacgtcgtcacacagccgcctccacacagctgctgcaacctgcccacccatggccgttcgtcggcggggggataataatctcatcagcgatttggagcagcaatggcgtaacggcggcgggcctgcgtgtgtgtttggt

SEQ ID NO: 59171 - DNA, 349 bp, Zea mays
  Clone ID: MRT4577_153960C.1
tttctcttttttttttttttttttttttttttgttttgtttttttttggaatttttccatgcccccccattagccatgcaataaaaacaaaagggggttaaaaaaggaaaggaacggatcggaaaaaagtagggcccatggatgaataagacccttcaaagcattgtaatttgtaaaacctgggatttgaagactgttaatcaaggatttctttcaagcatatgctcattacaaaatcctactcgagacgaaaacgtttaggggagggcgagccactttcaagtgtgaaccataaccttgcttgggggggtgtactaactttataggtgaacgaactttttcaaaatcc

SEQ ID NO: 59172 - DNA, 604 bp, Zea mays
  unsure (1)..(604): unsure at all n locations
  Clone ID: MRT4577_153961C.1
ggcagtcgaacaccttcagacaggacagtgaagaaggaagatagtgatgacagcctagttgactatggagaaggggtgaatggccagttcaatgaagacggctcctttattggacaatacagtggtaagaaagagaaagaaccagctgaaggaaacgaaagctcggaggcaccttctcctgtcaatgccatgaattcctttgtttgatctgtaagctcttggccgatatcccatctctctagaactttcatcttcagcacttgtttgtctgccttctcatactaggcacacagancagaaagtatgggttctgctgtatgttaatattatgagagcagtttcaaacaaggacgtgactcggtccaatgatttgttaatgtgaactgcagtgcaaagtacatcctttttcatccaaaataggtattcttgttcagaactgataaaaaaaaattacagcatcatcaactgatcaccttatttgctcttcaggatacagttcaatgtgatgcatgaaaaatgctacacacgtaaaggaatacctgtgtaccttattaaaaacctggtttgataactntgtttatactgtcctcagctgaacccctga

SEQ ID NO: 59173 - DNA, 485 bp, Zea mays
  Clone ID: MRT4577_153962C.1
tcgtagtacgacccaagactctatactgagtcgtattacacgacccacggaacacggtatcgaccacgcgggcctgagcatgtcaggggtcgtctttgcttcaagcgcttcatttagcgctttttggtgcaacaaccaccggacttgttcaaactgtgtacaaggaaagccaggcatatccagaaaggacaaactactgacagcctggtgattatcgcccccacttagtactacacgaaaaagtctcttgcaagatatacatatctcggatgacttaccctaccccagggagttcgcctcaagattcgcatgcgaaacttaagtcctcgccagcagggtcaggagtcaactctatcaagacaaactcactttctgcacatggaggacagagcgacaacatggacctgatattttccagattgcagaacgagctcctgcgctcacaggagacctatgctgatcttgggtttttaaagcagggatta

SEQ ID NO: 59174 - DNA, 649 bp, Zea mays
  Clone ID: MRT4577_153963C.1
cttttcaacaggcttacacagacctgtactccatctccttctccgccatccaaaaccctagcttggcgagtgggggtggaggcgcggctgctcgtcacgacatcgagtttcagcgccgcccgcgagatccccggatttcgttctctacccctgagagctgcggcaatggctgggaaaggcgggtcgaccaacttagaaaaggagcagatgtttgggatggcggagaaggagatggagtacagggttgatcttttcaacaggcttacacagacctgttttaacaagtgcattgaaaaaaggtataaagaagctgagctcaatatgggcgagaacagttgcattgatcgatgtgtttcaaagtattggcaggtgactaatttagttggtcagatgcttggaaaccggcctcaaatgtgaactgagaagcactcgttccattttgtagcagaattctattgctctgtttcttctttttggttggttgtagaatgccgcacctgttctaagtacaccaatacagcaacagacatgctactgcgtggaccgctttctctctgaatcatgaactgtaataatttgatacagctctagggcaattctgtttcgaaagctcgtcctgtttcgtagtaaaattctggatttgtgttcc

SEQ ID NO: 59175 - DNA, 645 bp, Zea mays
  Clone ID: MRT4577_153964C.1
tagtcataaatctggtgctgtgatactgtaattggtccagctcatataacttgtgagttttacaaagaacattagcaatccaagagaaattgagaaactatgcagaatcaacattctgagcataccatttcctcccaccagacttcagttacgtaaacagttgagaatatcaagacatgcatgtgttgaagagtgaagtcaacagagaaacttcaagtctgactttgagttgtacactaacttcgcatcactccagtgtgaatggagagaatcatactccctgcttcttgctagactcagatagactaggcaattcagaactcccagtcgccaaatagaacacacatcacatgtgaatgatatgacatatgaacatgtatgcttttcttgaagtgctagtgccatcacatcaagcccatccatcgtgaataaacactacagataatacttgaaccatctgaagaaagcattctgatgtgggaaagagagatgaatacattacgaggtatgatcacctcaacgtctgtcatttttcctcttcctagtttggctttctgccattttttcctagacactaacttactctttggctttaacttcaactctggagaaaacttgaaatttgggtccctcatgcgtgcctgt

SEQ ID NO: 59176 - DNA, 767 bp, Zea mays
  unsure (1)..(767): unsure at all n locations
  Clone ID: MRT4577_153965C.1
ccnggccggggaaaaaaaataaaaaaaaaaaaaaaaaaacatgtgagaaggcgcgcaccagctcctcacctgtgtttgcttccgccgccggcaaggaagaagagagcaaaaccctagctagagttggcgagtgggggtggaggcgcggctgctcgtcacgacatcgagtttcagcgccgcccgcgagatccccggatttcgttctctacccctgagagctgcggcaatggctgggaaaggcgggtcgaccaacttagaaaaggagcagatgtttgggatggcggagaaggagatggagtacagggttgatcttttcaacaggcttacacagacctgttttaacaagtgcattgaaaaaaggtataaagaagctgagctcaatatgggcgagaacagttgcattgatcgatgtgtttcaaagtattggcaggtgactaatttagttggtcagatgcttggaaaccggcctcaaatgtgaactgagaagcactcgttccattttgtagcagaattctattgctctgtttcttctttttggttggttgtagaatgccgcacctgttctaagtacaccaatacagcaacagacatgctactgcgtggaccgctttaaagaaaaaaaatcagtgatgcgcattctctctgaatcatgaacaggggacatgtaataatttgatacagctctagggcaattctgtttcgaaagctcgtcctgtttcgtagtaaaattctggatttgtgttaaaaaaaaaaaaaaaaaagcggcc

SEQ ID NO: 59177 - DNA, 330 bp, Zea mays
  Clone ID: MRT4577_153966C.1
tgtgcttctgatgtaggccgttacgcagctagaattcgcctcgagcctgtgcaacatcttgacatgattcccgcagctatgcgaaggtgatgaacgtttccagatacggacggttgttctaaattggtaagcttgaacctggcttttgcacaccagttgggaatgatatcttaatcatggatacaaaatttggcgatgacctaataatgaccattaaggcgtcaatagtgccattctgagatgtatttctattgctgaagtgcggagagaaaaaaaagaattaaaaaagcatgatgattttgccccccccaaaaaaaaaatgaacagggg

SEQ ID NO: 59178 - DNA, 384 bp, Zea mays
  Clone ID: MRT4577_153967C.1
atgtgaagacatagatgtcgggatggttccacactagcttctactttggttacaccttgatgttctgtcttggattgggaatactgtgcggagctgatggatatttgggctgcactctatttatgaggaggacctacagagctattacatgcgactaagcttggactatgatgttagcatgtctggtcacattctggggcaccagacttaccttgagcttctgattgacttctgaaattacacattgaggtctgttctcacttgagttactctttggatgtatgttggactatctatcacgacgtgtggaactgcccatgataactgatacctatcttgagaagtagtaagagcactgccaagtacatggaaggtattttgctg

SEQ ID NO: 59179 - DNA, 307 bp, Zea mays
  Clone ID: MRT4577_153968C.1
gggacaagctaggtgggaccactacacaagaaacgacgagggggagactatacaaaggcgggcataaaaagacggggcaggggttgacctttttgtcgttaaacagggacaaatacttgacccccggagggctggggtttgccagggcctggggggccctggggacaaaacccgggggagcctttttggggaagggcccccccccctaggggtagggggggggggtttagggcccctagggccacatttgggggtttttgccgggggccttgaccccctccaacaccttggggggccccaagaaccc

SEQ ID NO: 59180 - DNA, 626 bp, Zea mays
  Clone ID: MRT4577_153969C.1
gtgcattgatattctttgatgacattttaatatacagccccacttttgactctcacttgactcatttgtcctcggtattacatttgcttcggaaggaccagtggaaggtgaagttatccaagtgtgaattcgctcaaaccagcattgcctatctcggccatataattagtgcccaaggtgtttccacagatcccgacaagataactgtcgtgcaacaatggcctacaccggcaaacagcaaggagctacgcagttttctgggccttgctggtttttatcgtaagtttgtgcggcattttggcatgatatctcgtcctctgactgatctgttgaagaagaatgtgctgtttatttggactgtggaacaccaacaggcgtttgagttacttaaacaggccttaagctcagcaccagtcctggctttgccagactttgcaattcccttctgtatttatactgatgcctgcaacactggcgtgggcgccgttctcatgcagcgtggacatcccctggcctttctaagcaaatcactgggacccaagaatcagggactgtctacgtatgagaaggaaacttggcaattctgatcgcaataacacagtggcgttcctacttacaattggctg

SEQ ID NO: 59181 - DNA, 298 bp, Zea mays
  unsure (1)..(298): unsure at all n locations
  Clone ID: MRT4577_15396C.1
tctaggcnccaaacacacacccaatacagataaaaaacttgccccaaaaaactacatgaccacctaaccacaccggtatataacccccggagtcagcaacctagctatgatctgtccattggaatttcaactggaaagcattcggtccttttgtttaatggtattttatggtttttgtaattatatttggtgggtaacaggtgaagtgtgctgtgcgatgaagcaaacatgaaaaatgtcttagatataatctaatatgttccctgttagaaacaacaccaaagttatttgtgctaaa

SEQ ID NO: 59182 - DNA, 384 bp, Zea mays
  Clone ID: MRT4577_153970C.1
gctacagctcctcgggtcaaccacggaggggcaaggtgcaccatgactgtgacgctgggagccgtcagtcgatgaggcgataactgtcctgatgaggttgaaaccgatcgattcctctatattgctcgatgaaatgtgcgagaccactgcagaggggagagacgtggcgcacatcaacgctttttttttggtgaaagagaccatgccgagacgaccagatacggcgaggcagtctagggctccgacagaaggtactgtcagagcgtgtttgtccagatagccgatcatgactagggatcagctgttcaagatcgagagcgggatcgctaaggggctcagcgcagccatcgcgatgcattgcccaatcgctcgtgaaaagctgat

SEQ ID NO: 59183 - DNA, 286 bp, Zea mays
  Clone ID: MRT4577_153971C.1
ctggggctgggaaaaaacaaaaaggggcacgggcaccctcgtaccaaacataattgggaaactaagcggaccaaaccacgaccggtggtaaacaagagggctggcccctttaacttagagttcacactccagtgggggtttgacccatttgccattacaggcaaaccgctcaagagctcattatttttaaccacactgcgaccgaaaaattcttactacacacgcggcacccattgggggccccccggatccggaacaaccacagactgtccaggcttttttataa

SEQ ID NO: 59184 - DNA, 283 bp, Zea mays
  Clone ID: MRT4577_153972C.1
ctggtgttgttacatttgttttcttttttttcatttgttttttatctttcttcataaaaagaaacccttgagtttaaggacatacaggttgggaggtttacaaaaacctgaaaaggggtggggaccgtggttttcttgggcgccttttgtaaactttctaaaagggggggggtttgtttagatcctttttaaaacaaccccgaccaccccccggatgggtcccggttgcaaaagggggagggcccccttagagaaatcccggggggggaatagcctacggggc

SEQ ID NO: 59185 - DNA, 1015 bp, Zea mays
  Clone ID: MRT4577_153973C.1
cggcgggaaagaccttccggagacaaccctctccaacccgactagtcggactcgcagctccgccccatgtccaggaccaagcatgtaagtcgcggcggcgtcggcgaggcccgtactgcgcgtgagtgccatctgcggctccctccctcgaggccggccgggccgggcaccagcaccagcacggcgaccaaccctctcccaacccgactagtcggactcgcagctccgccccaaagtccaggtcgaagcatggaagtcgcggcggcgtcggcgaggcccgtcctgcgcgtggctgccatctgcggctccctccgcaaggcctccttcaaccgcggcctcctccgcgccgccgcggaggtgtgcgaggactccatcccggggctccgcatcgacgagctcgacatctccgacctgcccatcatcaacaccgacctcgagaccggcagcggcagcggcaccgtcttcccgcccgccgtcgaggccttccgcgccaaggtctgccaggccgactgcttcctctagaggaaagaactgttgggcagacaaagctgctgcgatcgtgagtgcaggcggcggctttggaggagggaggtcgcagtaccatctccgtcaggtcggggttttcctggatctccatttcatcaacaagccagaactgtgcgtccaagcgtttcagcagccacccaagtttgacagcgatggaaatctggtcgatgctgaaatcagagagcggctcaagaaagtgctcctatcccttcaggccttcacgctcaggcttcagaaggaggactgaatcaactcggtaccattgtagtacgtgcttccctgagaagcgtttattgctcttggaagtttgtaacgcgttgctgggtggcctggaagtttgtaataaatccaagaagtgttctcgctgaatatttaagatttgatcgcatctatatataataaagattgtgttctagcgtttttgcgtttcacttgcgttcccaaaaaaaaagaaaagaaaagagggggg

SEQ ID NO: 59186 - DNA, 411 bp, Zea mays
  Clone ID: MRT4577_153974C.1
gggaaaaaaaaaaacactttgcaaaaacaggttggggagccctggaacgggcaacacccccccaggaatcagaaaggaagctcccccatgccggggggacccccctgggggagatggggatgagagtaacaaccaccggaaaagcccacaaaaaccaacaccaatttggtccaccgacaaactaagggggccccgtttaggggggtcctcccaggcccaaacaggaaaaaagccttgcccccctacacctgggtggggaacttgccgttgccccccaaggggtcccgtggcttggtgggcgggggattggccaactccacgggagggggcacctttttgggggcccccacccccgggggggggggggggggcttttcctttcccgccggggcgggggggccctttgttttc

SEQ ID NO: 59187 - DNA, 1223 bp, Zea mays
  Clone ID: MRT4577_153975C.1
gatatatcccaaaaaagaaaaaaaaaaaaaaacccgggtaccggcccaccccccccccgaggagaaggacccgccaccagcacggcgaccaaccctctcccaacccgactagtcggactcgcagctccgccccaaagtccaggtcgaagcatggaagtcgcggcggcgtcggcgaggcccgtcctgcgcgtggctgccatctgcggctccctccgcaaggcctccttcaaccgcggccgcctccgcgccgcctcggggcgggccgggaccagcaccagcacggcgaccaaccctctcccaacccgactagtcggactcgcagctccgccccaaagtccaggtcgaagcatggaagtcgcggcggcgtcggcgaggcccgtcctgcgcgtggctgccatctgcggctccctccgcaaggcctccttcaaccgcggcctcctccgcgccgccgcggaggtgtgcgaggactccatcccggggctccgcatcgacgagctcgacatctccgacctgcccatcatcaacaccgacctcgagaccggcagcggcagcggcaccgtcttcccgcccgccgtcgaggccttccgcgccaaggtctgccaggccgactgcttcctcttcggcgcgcccgagtacaactactccatcgccacccccctgaagaacgcgcttgactgggcctctagaggaaagaactgttgggcagacaaagctgctgcgatcgtgagtgcaggcggcggctttggaggagggaggtcgcagtaccatctccgtcaggtcggggttttcctggatctccatttcatcaacaagccagaactgtgcgtccaagcgtttcagcagccacccaagtttgacagcgatggaaatctggtcgatgctgaaatcagagagcggctcaagaaagtgctcctatcccttcaggccttcacgctcaggcttcagaaggaggactgaatcaactcggtaccattgtagtacgtgcttccctgagaagcgtttattgctcttggaagtttgtaacgcgttgctgggtggcctggaagtttgtaataaatccaagaagtgttctcgctgaatatttaagatttgatcgcatctatatataataaagattgtgttctagcgtttttgcgtttcccagtaaaaaagaatcgattccagtagttgtctcgtcttagcaatttttttttgaataaaaaaaaaaaaaaaaaaaagcggcc

SEQ ID NO: 59188 - DNA, 843 bp, Zea mays
  Clone ID: MRT4577_153976C.1
ctcgaggccggccgggaccagcaccagcacggcgaccaaccctctcccaacccgactagtcggactcgcagctccgccccaagtccaggtcgaagcatggaagtcgcggcggcgtcggcgaggcccgtcctgcgcgtggctgccatctgcggctccctccgcaaggcctccttcaaccgcggcctcctccgcgccgccgcggaggtgtgcgaggactccatcccggggctccgcatcgacgagctcgacatctccgacctgcccatcatcaactccgacctcgaggccttccgcgcccgagtacaactactccatcgccacccccctgaagaatgcacttgactgggcctctagaggaaagaactgttgggcagacaaacctgctgcgatcgtgagtgcaggcggtggctttggaggagggaggtcgcagtaccatctccgtcaggtcggggttttcctggatctccatttcatcaacaagccagaactgtgcgtccaagccttccagcagccacccaagtttgacagcgatggaaatctggtcgatgctgaaatcagagagcggctcaagaaagtgctcctatcccttcaggccttcacgctcaggcttcagaaggaggactgaatcaactcggtaccattgtagtacgtgcttccctgagaagcgtttattgctcttggaagtttgtaacgcgttgctgggtggcctggaagtttgtaataaatccaagaagtgttctcgctgaatatttaagatttgatcgcatctatatataataaagattgtgttctagcgtttttggtttaaaaaaaaaaaaaaagggcggccgccaccgccgtgga

SEQ ID NO: 59189 - DNA, 824 bp, Zea mays
  Clone ID: MRT4577_153977C.1
ccggccgggatgtgctcaccgttttattcccattccatccagcgagcttgattgttgctttgcctttgcgctttgcttgtttactcctactacaatagcctctcgccgccgctggctctgctacccgcgttcttcgctgcatctggttcttctcggactccgccgctccccccgcagacgcaagaaactgctggccatggagcccccatccgcccaggcgatgtccgcgactgacgacttccaggacaaggccgtcgacgagtgttgctcttgctgctacgattgctgctccagcatcctggacttcctgtgctgctcgtcctgatcgatcgatgcctgccctttcgacggccccgtggaatttctcagggaaccggaggccttaccgtggcccactgatcttggattctagatgccgtgggattcgtgtgttctttaggtccttcggtgacgatgtttgtaatccggattcgaatcatcgatcgattcgctgtttggaattcttatgggtgacgtgcggtcgcacttgacgcacgcttcattgcagattttatttacaggagttcttttttttttttccgcaaaccatttggttctgcgtttcttgtgcactgaacactgagaagtgagaagtcctcattgcactagcaagttagcaaagttacgtgacctacttgctgatatcatcgagacctcggtagaagtagcaaaagcgggcacagattaatacaaaagaataggcctatatacatcctgcgttttggtgtttggctgtttgctatcatgatggatcgtgatattggaaagctgaattggacccccat

SEQ ID NO: 59190 - DNA, 200 bp, Zea mays
  Clone ID: MRT4577_153978C.1
gtgtgggggccaaacttgacggaaccgataaattgtttttttgagtccgccttatttccccttatagtacaatatggggcccctgggcatacatatcttgactagggggaaacaactttttgctttagtgaaccactggaaaacccaaacagggttactcgcttttggtgtcacgttgcctaaacctttgtgctttcacc

SEQ ID NO: 59191 - DNA, 1206 bp, Zea mays
  Clone ID: MRT4577_15397C.1
gaccgcaaaaagtgggggtcaaaattcctaatctcaacaagtaatcacaattccacagtccacacccaactagacaagacaaaacatgtcctatcagaaataaggattcaagcctacatcacagcaagttctaacaagctatattggcacattacaagaacaaatctttcaggaagatgtcaagtttttagaaacatctgcagcatatccacttatatcaggcacataacctttttctatcatgcctgagtttattatttcataagtgatcctatttggaactagacctttctctaacatctcattcagtaccacattagcctcgtccatcttccccatcttgcagaagtacttgagaaacacattgtatgtgaccacatttgcccgcttcttacgtttctccatcctaagcctaatttcatgggcaccctgagcgtcccccttctcacagaacccatttataatggtattgtacgtcatatgttctggctccaaaccaacctccaccatctcatccaagagctttactgctttccggacctcacccttgcaacacagcgcaccaatgagcacattataagtgacaacatctgctttcacacctttctccttcatctcattgagaagccctgaaacacttctccaatccctactagtggtaaaccctgttatcaagcaattataagttttaacatttggactaatccccttccctgccatagcgtccttggctgccgctgcctccttcatttttccaagccgccggtatccatcgaccaaggtattgtaagtaatcacattgggtttcatgcccctctgtgcaatgccatcaacccaaccctcagcttccaccatcatgcctttcttgcaaaacccattcagcacaatgttcatggtagacaatatgcatgccaaccccagctcctccatctcttccaccagcttgatgctgtcctccaccttcccctctctgcagagccctgaaacaagtgaattgtatgtcaccacattcgcaggaatcccctgctgtctcatctcctggaagaccttgattgcagctgtaatgttgggctccttacaatacccattaatcagcacattgaatgtgaccacgtcaggagaaattccagcttggatcatctctttcaacagcgcatcgacatggtacatttttccaacttgtccgcgtttgcagtaaccgtcgat

SEQ ID NO: 59192 - DNA, 221 bp, Zea mays
  Clone ID: MRT4577_153980C.1
cctttctttttttttttatatcaggcaaggcagattcaaacttccatgaacggagattttcatgacatccaaagaaaatccagcaaattgacaatgtacagtctgtgacggcgggacctcaaagggatcaaagatctcaacagggctgaaacatgaaggaggggcatatttcccatggttgttaaaacggaagcatttgctcaagagttgcctgagcagaa

SEQ ID NO: 59193 - DNA, 309 bp, Zea mays
  Clone ID: MRT4577_153981C.1
ggggatcttaaatatacactttttttttttcagctacaaatatgacgggaatacaaatgacattacctgcggggggttttttttttggaaggaatattctgggggagaggctgggacccaccccgcccgcgggatcttgctaaaaataaaacaaaacaagccaccgggattgtgcgagcagtttccggcgcggcggtcttccccattttgttcaaagaaagaatagtcacaccctttggcgggggtggggaaaatttggggctgaaacactgctaggggccaacgtccttaggttggaatggacccccc

SEQ ID NO: 59194 - DNA, 736 bp, Zea mays
  Clone ID: MRT4577_153982C.1
cattgggtacctcgaggccggccgggaacccactcggcgttgcggaatccacctgcaactgcaagcccacgaaatcgagccgagccccgacgccaccaaatcgtgtggcctcggagatcgagcagggtctggaagaaccaggggagagaccgtcagaagaggaggaccagcagcaggcaggcggtggtggcgaagtcgtcggcgtcggcggccggggtatctacgatgataacccggtcgaagctggtggagcaactgcgcgactaccagatccgatcccagcacaagtaaatcccccgcccgtctccattcccctgaacctgaaaccccaaccggtaactccgcctagtaataatggggtagtcacggtcgcggtgtgctcagatctcgtgggcctggacgcgggtggtgctagatttggttccattagtctgtggttaggttttgtgtcggaacttcagtgggtcgagttgcattagttgtagctaatggtggttttgccgattgaattctgtttctcttcgcgcatgcattgttagttcatagtgtagaactgtagctaatccaatacagtcggtggctattgatctttcttagagcagtgtttgtgctagtgattattttgtcgatcttgccgtgttctctatcgtgatatgtgatgttaacctcgggggagtattggtacttgacatgcccatactcaagcactgaactgtcaatttccacttctgccact

SEQ ID NO: 59195 - DNA, 263 bp, Zea mays
  Clone ID: MRT4577_153983C.1
gtgcttttcttcttttgcgaagcgccctaacagcgacctaacaccattggcggccgagagatcatccctccttgcgcttctagcgctttttgcgagcgcaacacatgcgcccattattgcacaatgctatacttgctccatgacccacaattccacagttcctcccaccagagtcttcaatggcctattaacaccccaatgtgcaagcattataggctacaacaggcgattggggctggcggttaacaccaaccaatggccca

SEQ ID NO: 59196 - DNA, 1241 bp, Zea mays
  Clone ID: MRT4577_153984C.1
agcacaccgccttcgccgcggacgacgcgatcatcgccgccgccgccgccatcacgtcgcagcccggccggcggttcacgtcgtacccgccggcgagggcgcgcggcggctgcaggctggccccggcggcggcggcgcgccaggccacggacgatcccggcgccgctgtgtcctggccagaactagtcgtgccgcggcacgccgacttcgacgactggatggagaagcacccgtcggcattggccgcgttcgagtcggtgctggccgccgccaaaggcaagaagatcgtcatgttcctcgactacgacggcaccctgtcgccgatcgtcagggaccccgacagcgccgtcatgtccgaggagatgcgggacgcggtgagaggcgtggccgagcacttcccgacggcgatcgtgagcgggaggtgtagagacaaggtgttcaacttcgtgaagctggcggagctgtactacgccgggagccacggcatggacatcaagggccccacagcacagtccaagcacaccaaggcaaaggccggagccgttctatgccaacctgcgagggcgttcctgccggtcattgaggaggtgtaccgcgcgctgacggcgagcacggcgccgatccccggcgcgacggtggagaacaacaagttctgcctctccgtccacttccgctgcgtccaggaggagaaatggcgcgctctggaggagcaggtccggtcggtgctcaaggagtacccggacctccgcctcaccaagggcaggaaggtcctcgagatccggccgtccatcaagtgggacaagggcaacgccctgcagttcttgctcgagtctctcggttttgctggcagtaacagtgtcttcccgatatatatcggagacgatagcaccgacgaggacgcgttcaaggtcctgcgcaacttggggcaagggatcgggatcctggtgagcaagattccgaaggagacccgcgcatcctactccttgcgtgaaccttctgaggtggaggagttcctgcgcaagttggtcagctggtccaaggagagcaggcaacgggactagtcatggtccagtcagcaggcgatggaaagctttgcctagaagcggtcgacagggccggctctcgtttttttaagggccatagaccaacctcgatgtttaggcctctgatttttttattgtcaataactgtaataaaatagagggaaaataataaaaataatttaatggtaaattactgcg

SEQ ID NO: 59197 - DNA, 518 bp, Zea mays
  Clone ID: MRT4577_153985C.1
tgggacctcgagccggccaaaaagcgctatgcgccataccaaccatgagcgacctgttatcctacatttccaaggtcatgtgcatcaaggcaagatcggaggcaacacaagccggcgaggacagcggctgcccagcggacgagtgccgcgtctgcctgtccaagattcggctcggcgaggctacccgccgactgccgtgtcgccatgtgttccaccgggactgcgtcgaccggtggctctcgtcctgcaagcgaacctgtccgctgtgccgagtttatgtggccgatgggaacaagcagccggtggcggcaaagcacaccagccgtgaagcacaggcactcgccgacgaccttgttatctggttctccaccgtgcttgttcccggtttctgatgccaaattccttcgtctgttcgttcgtttgaaaaagcttgattgctgattactgaaaataagaagttcgagcaaatatatgttatcgaaatttatggtaacaaaaaaaaaaaaaaaaaagcggcc

SEQ ID NO: 59198 - DNA, 559 bp, Zea mays
  Clone ID: MRT4577_153986C.1
ggccctaggggccctttttttttttttttttgaatagtttaacaatttattaaaatttttttttttttttttttttttttttttttttttttttttttttttttttttttttttttttaaacaacaaaattccgcgaatagtttaaattcaaacccaacatttattcatgattaagccatatggggccccacaaaagttttgggaaacaaaaacccaacggggccatgaaaccagctcagtcacgactcccgacacaaaccatacaaatactctgaaagacagcaccctcccggggcaaggggaaaaaccctaaaaaacccaaaaacaggaggagcttcaacgactggggggttaaaaacccccgcgaaaacggagccccagggggggggggccccccttcgggaaattggaccccgcaagggggccaccatcctccaggtggttgccgggaaaaaacaaaccctggtggtctgggggaatcccccccttggccgggatcttagccttcccggtggcgaggggggcaaagctctccacccccaggggtatggccttgcc

SEQ ID NO: 59199 - DNA, 881 bp, Zea mays
  Clone ID: MRT4577_153987C.1
ccggccgggaggcctttgtgtgcatcacctgctttatccttattgctttgtggaaaagaaacattgcagtgtaggtgcaccagctgctaatgtggatctctcaccccacaccaagactagcacccactcctcttcggcaagagaataatattgtgatccccggtgaccacggaaccacacccccagagaaagcattctacatattctcatatacactcattagcacatagcgctaggcgccataccaaccatgagcgacctgttatcctacatttccaaggtcatgtgcatcaaggcaagatcggaggcaacacaagccggcgaggacggcggctgcccagcggacgagtgccgcgtctgcctgtccaagattcggctcggcgaggctacccgccgactgccgtgtcgccatgtgttccaccgggactgcgtcgaccggtggctctcgtcctgcaagcgaacctgtccgctgtgccgagtttatgtggccgatgggaacaagcagccggtggcggcaaagcacaccagccgtgaagcacaggcactcgccgacgaccttgttatctggttctccaccgtgcttgttcccggtttctgatgccaaattccttcgtctgttcgttcgtttgaaaaagcttgattggtgtgtattttttttattgcatgcatgatacatgtacgtacctacgttactgttaattgtccttagaacagtttctagaaaatctgtgtgtatgtagcatcttgttgcatgaactgattggaacttctgtgtttgcagctgattactgaaaataagaagttcgagcaaatatatgttatcgaaatttatggtcgttactgttaaaaaaaaaaaaaaaaaaaaaaaggcccctagggcc

SEQ ID NO: 59200 - DNA, 181 bp, Zea mays
  unsure (1)..(181): unsure at all n locations
  Clone ID: MRT4577_153988C.1
ggggggggggggggggggaaagaaattagtgggngcaggggcgacaacacacagccatagtattacagtaactaatactnnaatacctgaatttacagcgcgatannnatggggatgattgcgcnntctaataggcccgtcgnnccaagatgatagtccgccactgggtgtgatatgagct

SEQ ID NO: 59201 - DNA, 884 bp, Zea mays
  unsure (1)..(884): unsure at all n locations
  Clone ID: MRT4577_153989C.1
cattgggtacctcgaggccggccggggtcctcgtgcatacccntttctttacctatacatacatatcctacctaacctactttcttcggctacgcggtttgggaggcattggcttctggaacattgttactcatcttacataacgtgtcacgcgactatactgtgacgagactggactgcggtctccttcgaacaccttgaactgccacgcagtcgatcttaccccatcccactcgcaacagacctcacaaccatgtccatccggcgtggatccgcctcttcaggcgccatgcgatcaaattcaattgctgcagatgccgatctggctcgcatgggctacaagtcagagttgcctcgccatctgtccatgctgtcagttctcggcctgtcatttgccattatggctgtgccatacggtctttcgacgaccatgtacatcactttgaccgatggccagagtgtgacgattctctggggctgggtgctgatcagtctgatctcggtcagcatcgctgcgagtttggcggagatctgtgctgtgtatcctactggctggaggtgtttactactggtctgcaatgatgtcgacgcctgaatgggcacctatagccnagttgggtttggtggctggtttaatctcgtcggcaactggacagtaacgctttctatcaaactttggtggtgcacaactcatcttaagtgcctattcattaatggcgggaagacttcgcaccgactgcctggcaaaagttctctggcttctgggcgatcatgctcgtcacattcctgatcaancgtgnttcggatctaagtacttggacctcatncacagctttgcatttatgaacctgggcgcgagtggtgtcatcatcctcatcactctg

SEQ ID NO: 59202 - DNA, 240 bp, Zea mays
  Clone ID: MRT4577_15398C.1
gcgggacgatcgacgacgaaaccctaggccatggcttggcgcggcgccgcctcccgatccattatcgtccacgccagccgccgtcatgaagagtaagccccgcaggaggagatcccgccggaagtgtcgcaaggcgcacttcacggcgcggtcctccgtctgccgcgtgttcatgcccacgccgctatcgacacagctccgccacaagtacaatgcgcgttccatccctatccgcaagga

SEQ ID NO: 59203 - DNA, 391 bp, Zea mays
  Clone ID: MRT4577_153990C.1
ctacacaacctcccatccgagaaggccgcgcccgtctacaaccacagcggcgccacgatcaacggcggctacgccaggagcggcaacgccggcctggcggcgttcaacaagatggggagctacttccacaacagtaacggcaacggcggggaggtgaagagctactccaacaagtccgccgagaccctcgccctcctcgacatcttcgctgacaaggatgacgcctgagccttccttgccgtcccctcgccgccagtgcccatccattaatacacagacaataaaatgtggctggagggacagaccacctttgtttgatatgataaagggctatgtatgaggcacgcgtcccattatttttgtttttattataagactagacctcgttcct

SEQ ID NO: 59204 - DNA, 1879 bp, Zea mays
  unsure (1)..(1879): unsure at all n locations
  Clone ID: MRT4577_153991C.1
gccggcctactcgcgagcgcgtcgccaccttgcacacttgcacttggttggagctcctctaccttttccatcgctctgctctgctccgcgtctccgtccgccccggcaaaagcaaaacacagccatggaggggtacgaccgcgagttctggcagttcagcgaccagctgcgcctgcagacgaccgccttctccggcctctccctcggcgactccatctggtctccggccaccggcgccggcgggcggcgcaacaacaacaccgacctactcgcggcctccgcgtcggcagccgacgccggcaagcacaacggcgtgggcctcagcctgaatgatggagggcccggactcattggctccgggaagctcgccttcggcggcagcaaggccggccgctacaacaacctcccatccgagaaggccgcgcccgtctacaaccacagcggcgccacgatcaacggcggctacgccaggagcgacaacgccggcctggcggcgttcaacaagatggggagctacttccacaacagtaacggcaacggcggcggcggcggggaggtgaagagctacttcaacaagtccgccggacgggcggcgagcaacaacagccacgggcacgccggcggcggcaagaagggcggcggcggcgggaagcacggcaagaacgagggcaacggcggcgcggtggcggccacggacaagcggttcaagacgctgccggcgtcggaggcgctgccgcggggcgaggccatcggcggctacatcttcgtctgcaacaacgacaccatggacgagaacctcaggagggagctgttcgggctgccgtcgaggtacagggactcggtgcgggccatccgcccggggctgcccctcttcctctacaactactccacccaccagctgcacggcatcttcaaggccgccagcttcggcgggaccaacatcgacccgacggcgtgggaggacaagaagtgccccggcgagtcgcgcttccctgcacaggtgcgagtggcaacgcggaagatctacgatccactggaggaggacgccttccgccccatccttcaccactacgacgggcccaagtttcggctcgagctctccgtcgccgagaccctcgccctcctcgacatcttcgctgacaaggatgacgcctgagccttccttgccgccccctcgccgccagtgccaatccattaatgcacagacaataaaatggctggagggacagaccaaactatccacctttgtttgatatgataaagggctatgtatgaggcacgcgtcccattatttttgtttttattataagactagacctcgttccgtaagatacatgtatcaatattatataaaaacaaaccatcagttcttgtgctgcactaaaaaaaaaaaaaaaaaaggcactagtccaatagtgatgagtgttatatatttatgcaatcgttccagtccacttgtctttgttactattatgggttaggtgtcggggcccgcctcccttgggtttcacttaaaaggactataaccatctttgcagacgactagccctcatttttttggtaagatgtctgtattatttttattccgcttccaccgccttggttctctgccttctccgtgttcttttctttcctttcttatttatttttcactcgctttggcttctttcccttgttcttgtcctgctcgtggtacccggctgttttgccttgctcttcacttccgccactctctttacgctaccgtcgctcnccctcgcatcccgctaccgcccgcccccacccccccccgccgccccatccacccaaaggcaggtctactattccccttcttctcgatatcttcgcttatatcgggttctttcatggtcatattaaa

SEQ ID NO: 59205 - DNA, 259 bp, Zea mays
  unsure (1)..(259): unsure at all n locations
  Clone ID: MRT4577_153992C.1
ctcgcantacactctgactacgacagtgacgtacagactacaggacattacaggctacaagacatcccgatacagaccacctactacgataaatacataccgaccttacgcctaccaaaccgacgtgcgctaccaagcctacctccaagaaagcgagacttctgcataagaacaacaaatcaaaagcgtgatcagctcggtgccaacaaaacctcaacaaccaagtttcatgtctgatctcgacgtccagcttccatct

SEQ ID NO: 59206 - DNA, 232 bp, Zea mays
  Clone ID: MRT4577_153993C.1
tgtagaagtgaagacaatcataggagcagagacaactgatgtcaatattctagtttattttttccagttttttttccccattcttaataacattgatagttactgaattctgtgttctactttacgtagcagtgcatactaaaatactttggtatattgtaaaagttctgaataaatcagttgctttataattcaccatctaaataaactataccatattgactcagcctgt

SEQ ID NO: 59207 - DNA, 182 bp, Zea mays
  Clone ID: MRT4577_153994C.1
gtggctgcaggctctttgggaacagtgatcctcaggacagcttaatgcctcctgatgcagtcaccccgccgccgcccacctcccaacctaactggcttactctctgcctcttccccgccggaggaagttctcaaattcatctgagcaacactgagaccagcggacggccctgtactaggcct

SEQ ID NO: 59208 - DNA, 364 bp, Zea mays
  Clone ID: MRT4577_153995C.1
gggccccgaagttgacaactcaacacagatcaacatccaagtaacgcgattataccttacctgcctaggcgcacaaaacctgagctgcaaggtgacaggttagcttaaacaaacattaagacccgggcccaccgaggaaaaaattggaacccattccaaactaaatatggacatgctataggggccactccatggtggaggggttgaacagggacctaaaaaaagcccgggaggacaaattaatgggacatggcgcccttgctgttggtccccaaaaaactcgactctcactaaaactcgctgcaaataaggaggggctatacgcttcaccttcccatcctagttacccttgccagccaggttg

SEQ ID NO: 59209 - DNA, 315 bp, Zea mays
  Clone ID: MRT4577_153996C.1
gtggctggtcaaggaccgggaccacctcaatactacgcctctagctcaacgtctacaatgcgctcggacttccctacgtctggcacgctgcctgacaatcatatactactgcccaacgctgctggacctgtcggccatctacaaggacgcacagatgttcaagcagcacgctaagcatcaagctgctgctgcagctcaaggcggcgcacccaccagaggacgcagcagcgcggatgagagcacgaccgcgggcgcgcacaacagctgagcctcagccgcccgtcggtggttgggactggggagggtctgtggtgc

SEQ ID NO: 59210 - DNA, 1956 bp, Zea mays
  Clone ID: MRT4577_153997C.1
aagtactctcgagactagttctccgcggaagaagcgcgagtttgagaagcagcgggtggacgaccgcaagcagcaccagatgatgcgccagacacaagccaccattctgcagaagacacagcaggttcgctccgccctgctgctgccgcggacccgccgccgcctcctccgccctccggggggggcgcggccagtgctgattctgagcagtacaacaaacttgagagacccgtacgtgatgaatgtgaatctcgggccgtgatgaaaagttttagtgtaagtggttcagacccttcaaaacccgagaacttttgctcatatgaggccgctgccccccatgaaggataaggaccgatataccaaatacaggataacttcatggaataataactatattcctaaaatggggaacccataggaatttttaaataccactttacaacatacattgtaacatgtgctaaccaggatggttcaagacatttacgtctcctgaccaagatggtctagtgggggaccattgccaagccatgcagatgagatgatgatgtagaagattaagggagaaccctactgaattaatgttgctatagctgctcatagcacaacacagatctccactaaatactgatgcacccaaactgctcccgtgctgagaagcaagcaagggaaaggcgatattgaagagcgggctaggaatgctttcctagacaatttttaatgatatgagagaaacagatcaaagccattgaagaatccttcagagcagccaagtcaaggcctgttcaccagactaaacgtggcatgcaagctgaatgggttatgcctttgctacctgattttgataggtacgaggagccgtttgttatggtgaattttgatggcgatccaactgctgattctgagcagtacaacaaacttgagagacctgtacgtgatgaatgtgaatcccgggctgtgatgaaaagttttagtgtcagtggttcagacccttcaaaacaggagaagtttttggcatacatggccccagcaccccatgagctcgccagagacttggatgatgaaaacgatgatatccagtattcctggctaagagaatatcactgggaagtgagaggagatgataaagatgatcctacaacataccttgtcacatttgataaggaggagggtgcaaaatatttgcctctccctactaagctagttttgcagaagaagaaggcgaaggaggggaggtctggggatgaaattgagcattttccagtaccttcccttattactgtgagcaaaacagctcatggtggtaccatggagcgcggagaatcttctggcatgcatgtgaattcaaagccacgaagatctcatgttgatgatgatcttgatgagcatccaaagcgtactcgggtagaagatattgaccaatatagtgaagaatattctgagtgatgaactgataaatcataattatcttgcaccaacgaatttgatcagtacatgtgaagccgtcaaggcataagtggttttatggtgcatggtgatgcagtgaaagagaatacctggcagtgggaggacatcatggcttggccagtttcttaagggcagagtatgtgaagcaaagctgagtgtaaccagacttcaagactttgatctctgtagtgatcatagaaagtatcacattgttgtaaagaagttttgcctttaaagtcttggagcggttctcaactgtttgttttgataatatatagaccccccattttgaaaaaaaaaaaaaaaaaggcccctccaaaaaaaaaaaaaaaaaaaaaaaaaaaaaaaaaaaaaaaaaaaaaaaaaaaaaaaaaaaaaagaaaaaaaaaaaaaaaaaaaaaaaaaaaaagaaaaaaaaaaaaaaaagaaaaaaaaaaaaaaaaaaaaaaaaggaaggggggggggcggtttaaaaagaacaaaatttta

SEQ ID NO: 59211 - DNA, 485 bp, Zea mays
  unsure (1)..(485): unsure at all n locations
  Clone ID: MRT4577_153998C.1
aaggccggccggggaaaaaaaaaaaaaaaaaaaaaaaaaaaaaaaaaaaaaaaaaaaaaaaaaaaaaaaaaaaaaaaaaaaaaaaaaaaaaaaaaaaaaaaaaaaaaaaaaaacccgggttttctcaaaggggggtgggtttcccccccccctcgggttggggttcgggaggttctccggggttcggtttcgggggggggcgaatcaaaatggcggcgtcgaatgttaaaaaccgttgtttcttcgggggcctcccttgggccaggaaaaaccactccctccaaaacgctttaagaacctagggggaggccctcaagtccaaaatcttcctcaatcggaaaacgaaaaggccccggggtttcggtttcgtcaccttctccacggaggagggaatgggaaaccccatcaagggattaaacggaaaggagttgaacggccgaaaaatcaccgtaaagaaggcccagtcccgcgncgcccgtgaaggc

SEQ ID NO: 59212 - DNA, 118 bp, Zea mays
  Clone ID: MRT4577_153999C.1
gtgtgtgtagctcatggcaaaatttgtattgtgtcatatctcagtttatcagcagcttttgagtacaaatcacacgattaattacctgagacgtcatggagctatctctaaccatatc

SEQ ID NO: 59213 - DNA, 503 bp, Zea mays
  Clone ID: MRT4577_15399C.1
agaagaaatcgagcgggccattctgtctatgctagggctacagcttttttaaacgccaactaataagccgtttgtttggaactgacaggacttaacaataagtggcatgcctatatgtaagatcccctcccacaactagcattgacttatactgagctaccagccaataagcttcgcctagtgataatgttacgcttcactggaacttgaagctgctatagccgccatcataggcggtcagcatacacatacctgaccggcatatcgtaggattgccttagcatgcactgcggagcagtgtgcccgacacccttgacggttccataagtgaggctgagagactctgaccttgaaactgctcgatcttggactgccacgaacaatgggctccactcatgctccttagagaaatgaagacacctgatccacccttgcgtgccgatcaaatgcacgaccttatgatgctcatcggcgcaaactaaactcgtgtcgccctcggtggt

SEQ ID NO: 59214 - DNA, 595 bp, Zea mays
  Clone ID: MRT4577_1539C.1
tcacctcctggcttacttcaccttggggcgggggggggggggccgatcagggctgctctcacccctaacctgtgcaacatatgcggggagggaagcagcagaacaagctccccttacctgcggctatcgactgaggataaagcggggactgttggggaatcataggccggaacaagagggggggggtaggaagagatcaagaaatcaatttcttcgcccgccttcacccctgctcacgtacccgctcctaaccctacgatcattctatctttactctgttcttatccgactctaattgagtgtatgcctatcagatatgaggcgtgaacaccttcaaaagcttctctactacattagcgtatatagaacacttcttcgactttagcttggatgcaagaattagtgtttgtgccgcctttatatacactaacaataatgactgcgataaacagacaggtattgagagaatgtggaaggaacataagaagactaaagagaaagccagagacccccggtccatatgctgctgacgaattctgcacctctagattgcataaacatagctgacatgattctgctaatacggtccatcttg

SEQ ID NO: 59215 - DNA, 260 bp, Zea mays
  Clone ID: MRT4577_153C.1
gccagtcatacgaccgatccctagtcgattcgtgcctttccacacggatatgctcacacgggcccgtgaaggtttgatccaggccgagcggaccgcggtggcggcggcggatatagcttgcacaaaagacgagatcacatacaatgaaccactggatctgatacgactcagtctcgacgagcgcatctacgtaaatctacgactctaccgccagctgcgcgacaagcctcatgcgaatgatcaacatttaaacatgatac

SEQ ID NO: 59216 - DNA, 670 bp, Zea mays
  Clone ID: MRT4577_154000C.1
ctttttaattcccgccctccttcgctcgcactcgcacactactggaggggggcagggcagagcagagcaaattcgccgcaggcatggtgcttgtaggggagatgctggcctcggccgtcataaaggaagttgttcgcaggctgcctgcgctgctccaggctcccgtcaaaggtccggcaaagatgatccggagcttcagggaggacctcgacgagatgaaaatgacgctcgagtccatcaaggcaaccatggcggaagcagagaagcggtctatcaacgacgagaccgcgcggctgtggctcaaacggctcaagagggcagcctatgatatctctgatatgtttgatgagttcgaacacggcagcgcaccgggcaagaagctgcagggccctagttggttcgagataatgtttagccgtgacatggctaagaaaatgaagaaaatgaataaaaggctgaaagaaatagcggagcaatggaaaaattacggccgtgtatcatgtgagcccaaaaatgatgctgctgaggaacatgaaacaacttcaagttcttcaatcagcggtggttggtggtcgtagagctgagaaacaagcagtcattaatatactgcttagctccaataacacataccctcaagaaactattagtcactgtactgttatccatggac

SEQ ID NO: 59217 - DNA, 619 bp, Zea mays
  Clone ID: MRT4577_154001C.1
aaggagtaagcagttatgaatgaatgcagcgagagtagtagtagtagctccatttggcgggagcattgaatgtctggtacactacacgtccgtacgtacgacgacggcattcttgcgttgttttgtgtccagtcaccctcgctctgcaaaataccttctgacatcctcgagtaattgactagcttagaggcgtagagctgcccctgctgcatttaactggtgaaatagctggatcgtagccttcaacctctagtgtagctgctgtttcttcgcgtcacctcatgtgcatatagtcgcctccaccaccatccctcctccggccgaaaggacacggccggtcatccgcctgcaactgataaagatcacatagtgggccggtaatccccgcccgtcgtgctgtttttcaagaactgtccaccgttgatctgctgctgctgcacatgaccagacactacaccgtgcccgacgcccatggccggcgagtaggcgaagccatagcctccacctccgttcatgcccaccctcgccgcagctccattctcaccctcgaagctcatgggcagcatctgcacggaggcaaagttgtcttgctgcatgaacggcccagctccggtgatcg

SEQ ID NO: 59218 - DNA, 313 bp, Zea mays
  Clone ID: MRT4577_154002C.1
ttcttctactctttgggtgggccatgcctttccacatgcccagtggtctgggtgggatactgatcatgatgactgggcacgaggacatggaggccacctggtgtgcgctagctgaacgcgtggtacagataatatcggcatccaccaaaacaatccccaagccagagactccgaccatctacttacagctgcccgctgacttgcatgccaagatttttcagagagctgctgagggcgctcgctagtgtattgatgctaccaatgttgctgtgacctcattaacagaagaaggcatgttatatgtcatggatac

SEQ ID NO: 59219 - DNA, 163 bp, Zea mays
  Clone ID: MRT4577_154003C.1
ccacgcgtcgtggtatcccgttagtataattgttctacgtgcactcggagacccgagacatctgcggagagacatcctgcgcagccgcccccctcatccttgctgccgaccagccgactctgacaagctttactgcggcgggcttctacgcgatctacatgaa

SEQ ID NO: 59220 - DNA, 507 bp, Zea mays
  Clone ID: MRT4577_154004C.1
gggcccggggggaaaaaaaaaaaataaaaagggggggggttaaaagggggtttggcccaaaaacaaaaaccgggtaaaaaataaacggagaaaaaaaaaaacgggagggccaaagccaaaaaataaagggggctttgacccaaaagggaaaacgagggagggaggtttttaaaaaaaaaaaaaaaacccccccccccaaatttgggtatgcacccccccctttaattaaagggcactttgggcccccgggcttgggtttccaattgtggaaaaaggggcacccccccttgttgccggaaaaaccccacgggacccaaaagcacgtgttgaaaaatttgttgaaaaaaaaaaaaacggttttttgcaccgggggttgccccacccccgggaaaactgggggaaaaactggaagtttttgagggcgccccgcccccccaaatagttttaaaacgggaggggccccccttttttttttttttttccaaaccaattttttggaccttaaaa

SEQ ID NO: 59221 - DNA, 219 bp, Zea mays
  Clone ID: MRT4577_154005C.1
catccagtcactcaagattacgtgtccacctccatataataaagtttgcacctattcatggacatttggcgttcacctatcttagaccggggtgcatgctttccaaaattgagtttgaacaacactagtcgagattccatagcctaaccctgacaaacgaatatgacatttcaacacttcggtcaggggtaaccctcaagtcagctgatgcctgctgat

SEQ ID NO: 59222 - DNA, 343 bp, Zea mays
  Clone ID: MRT4577_154006C.1
tactccaacctcctctctatcttcactgctgaagcaaaatcaactggcgggacaccatcttacatttctccttacgtccttgctataaaggaatatcattgaaaggtcacctatcttttctcatgtctagttactctttatgtaatccttgttctttcctattccctttaatgacccctaccaacctaataatttcctcaagacacttactctgattatcaccatccactactcttttccttattttttccaattctcaatgaactgcatgcatctactgtctcagatctttatcgcgaaaccttatcaacgtataaccatcccagatatcaataaccaccca

SEQ ID NO: 59223 - DNA, 805 bp, Zea mays
  Clone ID: MRT4577_154007C.1
ccggccggattattcaccgagatgtcaagccaacaaacattctagtcaacacacgaggccaagtcaaaatctgcgattttggcgtcagtgacaaccttgtcgccagtatagcccgaaccaacatcggttgtcagagttacatggcacccgaaagaatttcaggtggtgggtacgcacaagcagggaactctgacggatcctacagtgttcagagtcgacgtctggagtctgggcttaacggttattgagtgtgccaaaggtgcatatccttacccgccagaggtgacctctactattttcagtcaactcagtgctattgtcgagggcgaaccacccgctatgccagaggagggttactcggatacagccacggattttggtaggagctgccttcacaagatccccaagcagcggccaacctacgcaatgctgttgaagcatccctggctcatcgatttcacaaaaccacagaccatcacagaagaggctgaggatggtgatgaggctgacaaggtcgcggaagctgtcggcaaaatcgctctcaactcaacaacggaggacgcagaagtggccgactgggtaaatggcgttttgcagaaggagagagacggtctgaaggtgtgcggtcccctaaggccagcattacacaccgcaccactcgacagcgtcagccctatctcaagcccaaatgacgcctagaggccgaaatatgggggatgaatgaagtttcgcatcttccatcggagtctggctaggcgcgaaaacagtcaacagagcaggtatctagttggctacggaaccaaga

SEQ ID NO: 59224 - DNA, 747 bp, Zea mays
  Clone ID: MRT4577_154008C.1
gaaacgagattattactctgcttttaagaaagcatataaaggttcagatacagactgaccacactcaacacacacttcggatgagcccagtttagcgaggagaacaccacgacaacatagctgaaaccaaaagcctaacaccaagatccttcctgaacacgcgcactgaaacgcagcagcactctgacccaaaacagaaccctggccacaggcaagacaccaggcagcagcgacatcacacagaagcttccctttgctcagagcattccttcagactgatcatcgccatttctctttgctcagagcattcctttgctgcaggagctccttcttaggagtagtcgtgccctcagctagtcttgtatctttttctggaatacgcaggagagagaattccaagccgtcctgtctccgatgcaaggaaaagatgcccatggaacaaatcatagcgattcagtgatacatttaatccaaccgaaggtgcccgtgccacaatcaattcgaacaagaatgcaaaatatgaattgatctcctcattggcaaagcgcctcccatacggtgttcttgtgagatggcatttattcttctgggaaccctcaacatctggcaccggcagcattgttgggtcgagcgcgcggtggatggcaccgggatcgcctccggagtcgacggccagccgcgccaggtccaagatcggggccggcggccacatcaccatctcgtccgcctcagccgcccccgcatcgc

SEQ ID NO: 59225 - DNA, 1132 bp, Zea mays
  Clone ID: MRT4577_154009C.1
actcaccacctccaactacccgagaccatcgacgagcatctttctgcatctgcaatggctgccgctaccgtgtccgtcccccgcatcaagctgggctcccaggggctagaggtctccgcgcagggcctcggctgcatgggcatgtccgccttctacggtccgcccaaacccgagcctgacatgatcaagctcatccaccacgccgtcgccgccggggtcaccctccttgacacctccgacatgtacggcccgcacaccaacgagatcctgctaggcaaggcgcttcaaggcggtgtaaaggagaaggtcgagctggccaccaagtttgccgtctccttcgccgacggcaagcgcgagatccgcggtgacccggcgtatgtacgggcagcctgcgaggccagcctcaagcggctcggcatcgactgcatcgacctctactaccagcaccgcatcgacaagaaggtgcccatcgaggtcacgcatatgcctagacttcaaccagagaatattgtcaagaatgctaagatattcgagcatgtgaatgcaatggcagctaaaaaaggatgcacaccatcacagctagcattggcatgggttcaccatcagggaaacgatgtttgccccatacctggaacaacaaaaatcgagaacttcaaccagaacgtgggggcgcttttctgtgaagttgacaccagatgagatggccgaactcgagtcctgtgctgctgcaggtaaaatcttgggtgaccgttatcctcaaatggccaacacctggaaggactctgagaccccgccattgtcttcttggaaatctgagtagccaatctggtgtctcttcaattctgccaccgtcacattggtgtatctccaaattgtcggactgcagaagatactcaggtgcactttgcaaaagcgtccatatgatgtgcttgccttttgcaagctatgatgtttggtacttggtgacttggtgtgtattgcatgcctcaatttgtatcaagagtatttacccatgagtatagcttgaaggttaaaaccactggttcgacgaataaccatgtgcatttgtatcgagagtatttaccatgagtagcaaactgaattttgtaataatagtcaaaagtgtgattgt

SEQ ID NO: 59226 - DNA, 411 bp, Zea mays
  Clone ID: MRT4577_15400C.1
atcgggcaaagacaaaatatgattgatgtgatcataatgtggtcattaatgcaggagcaggtgctgaaggtaatgatactatcatacgctgaatgaatgagcctggtgtgggactaccaaggttacccctgcttagaacatgacagatcactatcgcacacagtgggtacatgccaatgttacatggcatatcaagcctactagtgaccttccaaaccacaaaggtgtcctatgtgggaacaaagacctgaacaatgcccattaaaaaatactgggcacatgtggaaacgtccccatgttcaaggatggacaaagttgagatcctgctaccagatcacttgcgataagacatttgactagtctggcgaacacgtggtgttgcacattacaaacataaactacgagaccatt

SEQ ID NO: 59227 - DNA, 447 bp, Zea mays
  Clone ID: MRT4577_154010C.1
gggaaaaaagtttttttttttacaaagggctttgtcctggttaaaaaaaaatgggttggaactttcctaatagttaacaagctccttttttgtttaaaaaaatcctaaggattttttttccatcccaaggccggccggaaaactttgcccatgcttgtttggccctactgaaccttcggacaggccggggcaaatggggtcaacatggaacaaaggcttgggtaaaaagtttgttttaaccccgggtctttttccaagggggggggcccctggccgttttttatttcgcagctcatgttttcaaaatttgggttcagggggggggggacccccacctctttggggaaaaacccctggggggggcccttgcacatgttgacccaaatccccacgcagccgttgttttccaggtcccggccttttttgatgccccccccgttgggttgg

SEQ ID NO: 59228 - DNA, 260 bp, Zea mays
  unsure (1)..(260): unsure at all n locations
  Clone ID: MRT4577_154011C.1
cgacggtatgacgcggtagagcctgctgttatattgaagcctaaattatgaatgctattacatcgaaggtgcatgtaatgaggtttataatangcaaaaaaaaactcaataataagtagggtgtagctgacccaataactagggatctcggtcacgtcctgaagctgaaggccatcagccgccgtcggctacccataccgacgaccactgatcctggcgcgcgtcagaaggaatcgctggtcatctacaccactgacaga

SEQ ID NO: 59229 - DNA, 1769 bp, Zea mays
  unsure (1)..(1769): unsure at all n locations
  Clone ID: MRT4577_154012C.1
gcagagggcctcgcacagtcgcactctttattatagccacggccggccggtggacgacagcaccacaccacctccaactacccgagaccatcgacgagcatcttcctgcatctgcaatggctgccgctaccgtgtccgtcccccgcatcaagctgggctcccaggggctagaggtctccgcgcagggcctcggctgcatgggcatgtccgccttctacggtccgcccaaacccgagcctgacatgatcaagctcatccaccacgccgtcgccgccggggtcaccctccttgacacctccgacatgtacggcccgcacaccaacgagatcctgctaggcaaggcgcttcaaggcggtgtaaaggagaaggtcgagctggccaccaagtttgccgtctccttcgccgacggcaagcgcgagatccgcggtgacccggcgtatgtacgggcagcctgcgaggccagcctcaagcggctcggcatcgactgcatcgacctctactaccagcaccgcatcgacaagaaggtgcccatcgaggtcacgattggtgaactcaagaagctagtggaagaaggaaaggttaagtacattgggttatccgaagcatctgcatcaacaatccgaagagctcacgcagtccatcctatcactgcagtacagcttgaatggtcattatggtctagagatgcggaagaagatataattcccacttgcagagaacttggaattggaattgtagcttacagtccactaggcagagggtttttttgtagtggagcaaaactagttgactcactgtcagagcaggacttccgcaagcatatgcctagacttcaaccagagaatattgtcaagaatgctaagatattcgagcatgtgaatgcaatggcagctaaaaaaggatgcacaccatcacagctagcattggcatgggttcaccatcagggaaacgatgtttgccccatacctggaacaacaaaaatcgagaacttcaaccagaacgtgggggcgctttctgtgaagttgacaccagatgagatggccgaactcgagtcctgtgctgctgcaggtgaaatcttgggtgaccgttatcctcaaatggccaacacctggaaggactctgagaccccgccattgtcttcttggaaatctgagtagccaatctggtgtctcttcaattctgccaccgtcacattggtgtatctccaaattgtcggactgcagaagatactcaggtgcactttgcaaaagcgtccatatgatgtgcttgccttttgcaagctatgatgtttggtacttggtgtgtattgcatgcctcaatttgtatcaagagtatttacccatgagtatagcttgaaggttaaaaccactggttcgacgaataaccatatgcatttgtatcgagagtatttaccatgagtagcaaactgaattttgtaataatagtcaaaagtgtgattgtaaaatgtacttagggaatgtggtacgctatattagcgtgcaaacataagtatagacaaaaaagcaaaaaaaaaaggaccctaaggatttaccatgagtagcaaactgaattttgtaataatagtcaaaagtgtgattgtaaaatgtacttagggaatgtggtacgctatattagcgtgcaaacataagtatagccagttaagcccctccattttagtctcatttagtctctanattgcttaacggtgggactaaaatagggactaaattgttttagtctctagtcacttaaggcatgactatgagaga

SEQ ID NO: 59230 - DNA, 1716 bp, Zea mays
  Clone ID: MRT4577_154013C.1
gccaattgggtaccttggaggacagcaccacaccacctccaactacccgagaccatcgacgagcatcttcctgcatctgcaatggctgccgctaccgtgtccgtcccccgcatcaagctgggctcccaggggctagaggtctccgcgcagggcctcggctgcatgggcatgtccgccttctacggtccgcccaaacccgagcctgacatgatcaagctcatccaccacgccgtcgccgccggggtcaccctccttgacacctccgacatgtacggcccgcacaccaacgagatcctgctaggcaaggcgcttcaaggcggtgtaaaggagaaggtcgagctggccaccaagtttgccgtctccttcgccgacggcaagcgcgagatccgcggtgacccggcgtatgtacgggcagcctgcgaggccagcctcaagcggctcggcatcgactgcatcgacctctactaccagcaccgcatcgacaagaaggtgcccatcgaggtcacgtctgcagtagaggggtataacctcaccggagaagacaacggactggggctacgaactacgtagccggggtccgaccagttagggattcggcgcccttgacattaaacttttggattgaattggttagtgtgtccactctaacaccatgaaccatttccttttagatagttgagttggtcttctttttttcctgttgctagattggtgaactcaagaagctagtggaagaaggaaaggttaagtacattgggttatccgaagcatctgcatcaacaatccgaagagctcacgcagtccatcctatcactgcagtacagcttgaatggtcattatggtctagagatgcggaagaagatataattcccacttgcagagaacttggaattggaattgtagcttacagtccactaggcagagggtttttttgtagtggagcaaaactagttgactcactgtcagagcaggacttccgcaagcatatgcctagacttcaaccagagaatattgtcaagaatgctaagatattcgagcatgtgaatgcaatggcagctaaaaaaggatgcacaccatcacagctagcattggcatgggttcaccatcagggaaacgatgtttgccccatacctggaacaacaaaaatcgagaacttcaaccagaacgtgggggcgctttctgtgaagttgacaccagatgagatggccgaactcgagtcctgtgctgctgcaggtgaaatcttgggtgaccgttatcctcaaatggccaacacctggaaggactctgagaccccgccattgtcttcttggaaatctgagtagccaatctggtgtctcttcaattctgccaccgtcacattggtgtatctccaaattgtcggactgcagaagatactcaggtgcactttgcaaaagcgtccatatgatgtgcttgccttttgcaagctatgatgtttggtacttggtgtgtattgcatgcctcaatttgtatcaagagtatttacccatgagtatagcttgaaggttaaaaccactggttcgacgaataaccatatgcatttgtatcgagagtatttaccatgagtagcaaactgaattttgtaataatagtcaaaagtgtgattgtgaaatgtacttagggaatgtggtacgctatattagcgtgcaaacataagtaagccagttagcccaaaaaaaaaaaaaaaaaaaagcggcc

SEQ ID NO: 59231 - DNA, 226 bp, Zea mays
  unsure (1)..(226): unsure at all n locations
  Clone ID: MRT4577_154014C.1
naannntttttttttttttaactacagcacgacatcgaattcattgcataaccaaaattggcacaacaacactgatacaacctgttggctggctgataaaaatactaatcttattctacacatcctcaatgcaatgacacatgacatctatagaaccaattcacaacttactatacactttgtacctaaactttatcatatgaatataaagtccacacattttttt

SEQ ID NO: 59232 - DNA, 353 bp, Zea mays
  Clone ID: MRT4577_154015C.1
ggaggccaactatcagctaacacatatataaacctgttgattaccccatattattattgatacacaggggcagaggccaatgccggcttaaaaaaacaatgccacacgacactgtcactacaaaaaagtgcaacatgaggtccaaaaaaacatgccagcacagagcaaaggctcctaggcaatctccataaccagagaaggtgaggaaagcaagcaacccgcttccttgcacccagaccatcatgaacggggccccaaaacaccaccggacagtgccgtcagcggaatcccgaaacctccccaacacatttgccccttaaggcacaagcacaacatcctcaagatgatttttt

SEQ ID NO: 59233 - DNA, 479 bp, Zea mays
  Clone ID: MRT4577_154016C.1
atttcctgcattttgatggcctgtgcacatctggcagctcttcgtatgggtaagcagattcacgcttatgtcacccgtcaccatgaatatgaaccatctgtgtactttgtggcaaattgccttattgatatgtactcgaagtgtggtgatgttgatactgctagaaatgtatttgatagcatgcctaaaaggaatgaagtatcttggacttcaatgatgtcagggtatggaatgcatggtcgtggtaaggaggctttagacatatttgacacgatgcagaaggcaggctttgttcctgatgatatttccttcctggttcttctttacgcttgtagccattctggcatggtggatcaaggtctgaattactttgatatcatgcgcagggattatgatgtagttgccagtgcagagcattatgcttgtgttattgacttactggctcgctgtgggcgattagataaggcatggaaaacaat

SEQ ID NO: 59234 - DNA, 494 bp, Zea mays
  Clone ID: MRT4577_154017C.1
ttaaaaaaaaaaaaaaaaaaaagaaaaaaaaaaaaaaaaaaaaaaaaaaattaaaaaataaaaaaaaaaaaaaacttttggtccttggtcggatctctcctttccggctggttttgggggcgatccttccccctgggggccgcttcgccccttcttgtggggggccctatattccccttggggggggcttttccccgttgggggggggaggtttttggcgttcccccctggaaaccccttggcgtacccccccttttccccctggggcgccatccccttttggcccgctgcggtcccccttaaaaggccccccccattctcctttgcaagtggtcgccccccctttttgcgaattggaccccccctgtgggggggcttcacgcgcggggggggtgggggttccccgcggcgtgaccccccctcttgccactgccttacctccctttctttcccctttttgccgtttttttttggccgctttagggggggtttcc

SEQ ID NO: 59235 - DNA, 804 bp, Zea mays
  Clone ID: MRT4577_154018C.1
gtcattgtagaaattgttttcagatcgtccgactaatcgtgattagtcggcctgatcggtactttgggctcgattcgatcagctcacctgatcgtccatatcgtccgattagttggcgatatggagcgattaatcgggctgatgagcgatcagtcgatcaacagggtagtccattaggtgtgtttggctggcccataattaatataactagccgtccagagcccccgtctcttcttccctggagacctgtaccctggaggcctgaacaactcttcttccaggatcggcggctcccttctctcccccttctctctcccttcaacacccttctctctccctcggaggctcggacactcctacagagctcctgtcttcagagttcagacttaagttcagagctcccgtcatagtttcatatagacttgctggtgctgttttcaacttttcatgctgctgccttgttggtgaattggtgatcatttcaggtttgctgcagcatcttggtcatatagtctaatctctttattgagtttattctaagtatagtctatagtctatactctttgtgctggaaatatgcaggacgaccagatggacgattagggtcgatcaggggcgactaattgcccttatcgtcgcctaatcagctgattgcccagtcagaacgatcagctgatcaggcgatctgaaaacacttagaatcttgcaaattcatgaagttttcttcaacgaaatcaaaacacctgttcctgaattaatatagttttaacatggagctgcaatggcacaactgattgggatatt

SEQ ID NO: 59236 - DNA, 491 bp, Zea mays
  unsure (1)..(491): unsure at all n locations
  Clone ID: MRT4577_154019C.1
aacccgccgcgcaccacagcgagcgagggacccggggcggaagaagagagagaggacggcgctctcctctcggcgnccccgnnccccaacctcncgncngcngcccgccngccggccngccngcaaaaaggagnncggcagggcgncnaagcgcanccccaaggagcngaaggacccgcagaaagacccccccacancangcagngcagggggggcgggngaggacangnnncannggcaagcaacaangacgggaccaccngacagncccnangcggggggcgnnnncnnagcgaacanccancncccgccagannaccccnncaaaccnccaaaggnnncnnncaagacaaaggncnnccagcccaanancaacagcaagggaagganaggccccgacangcccaaagagcagcggagcccggcnncgacaacngcnaagggcccgcccnccancngcccccggcngaccgaccccaacccggacgacc

SEQ ID NO: 59237 - DNA, 265 bp, Zea mays
  unsure (1)..(265): unsure at all n locations
  Clone ID: MRT4577_15401C.1
cccacgcgtcctagctgcagtcaccactcccaagccagtaggcgcagtcctacgagcagtcgcacgcaagtgtcaagagacaaaacggtcgacatggctcgcacgcaatctgccgtagcggtcgccgtggtggccgcggtgctgctgctggcagcggcggcgacgacctcggaggccgccatcacctgcgngcaggtgagctccggcatcgcgcgctgcctctcctacgcccgcagcgacggggtcctgcacctccgcgtcctgc

SEQ ID NO: 59238 - DNA, 1496 bp, Zea mays
  Clone ID: MRT4577_154020C.1
cggtccggaaccccgggcgacgagagtcctgtgcccgctcgccctgcccgggggggattgggaccctcgaggccggccgggtcccccgcagatttgccaccataccccccgggcctcctctcctccgcgggctccgtctccccccctcgcgcgaacgccgggcgcacgcagccaggccaggtatccccccggccccaaccaaaccatcgcatgggagccgcgactggcccgacgaagcggagccgcgtccccagcaagaggcaggaggaggaggaggaggccatggcgcgcgctgcgggcgtggaggcgcaggcgcggcggcggccacggctggtggggtacgaggagctgccggagtacctcaaggacaacgagtacatccgcgggcactaccgcgccgagtggcccgtccgcgacgcgctcctcagcgccttcgcctggcacaacgagactctcaacgtgtggacgcatctcggcgggttcctgtttttcctggcgctcgcggtcgccggagggtggacggaggccgccgacgaagccgctccggggatcatgaggttcgtggtgacaccaccagctaacgcttcgtggggaagcgcccagcattcgggtctgccaagccacgacggcagggcgtcgcagtccggcgtgccgcggtggccgcggacggtgttcctggtgggcgccatgtcgtgcctggccatcagcgcgacggcccacctgctggcgtgccactcgcggcgcgccagcgtggtgttctggcagctcgactacgcgggcatctccgtgatgatcgtcgcctccttcgtgccgccggtgtactacgccttcctctgccacccgccggcgcgggcggcatacctgtccgccatcgcggcgctgggcgcgctcgtggtggccgcgctgctctccccgtcctgctcgtccccgcgctaccgccgcctccgcgcggcgctgttcctggccatgggcctgtcgggcgtcgtcccggcgctgcacgcgctgtggctcaactggggccacgccgcctgctacctggcgctcggcctcgaggtcgccatgggtctcgcctacgccacgggcgcatggttctacgtcagccgcgtgccggagaagtggaggcccggggtgttcgacgtcgtgggccacagccaccagatcttccacgtgctcgtgctcgtcggcgccgtcacgcactacgtcgccgtcgccgtgctcatccactggcgggagaaggtggctgccgcctgtggcgcggcgtcgtaggcggggcttgctgctcctggcttctgcagcaagccagctgaggtgtttgatcatccagagattcaatgtgccactgcgatggattcaacaagcgttcgaatcggcgaacgaagtagttgcagttgcagttgcagcatagatcggctctagagttcgacgatttgtaatttaattgatgggatgattgagtatggtggttcattaatttatgatgagatttatctgtcgac

SEQ ID NO: 59239 - DNA, 308 bp, Zea mays
  unsure (1)..(308): unsure at all n locations
  Clone ID: MRT4577_154021C.1
ggaagntgctcgtgntaggctctgagccacncttcaagctgaagggnctttngctcttccgtggccgggntgttcccncgtttgtnntggacgaggtctatgacntggngctctncgagtggancgnggtggacatctctggtgaggcccagacggagcgtgtcnatgcgntgcttgnggaccaggcgccctttgcgggcgaggccttgcttgacgcgagntgcttcaagtgagtgtgcttgcctggngncaganctgtttagcccttgantttgcctgtggnagagtttgcccttttctngtgtcga

SEQ ID NO: 59240 - DNA, 158 bp, Zea mays
  Clone ID: MRT4577_154022C.1
gtaggcttaagtttcaaaaacctgaccattttatagttgtacactctccatggatcaactatactgaaaagcttagtctactatgacctcactagtcatagagatttttgcaagtacttatgtgaactcgttatgctaggcgatggtaactgtggtac

SEQ ID NO: 59241 - DNA, 422 bp, Zea mays
  Clone ID: MRT4577_154023C.1
tgggtgacagagaaggacatccccagcctcccctacgtggacgcaatcgtcaaggagacgatgcgcctgcacccggtggcacccatgctggttccccgcctgtcgcgcgaggacacggccgtggccggctacgacatcccggccggcacgcgcgtgctcgtcagcgtctggtccatcgggcgcgaccccgcgctgtgggacgcgccggaggagttcatgccggagcggttccttggcagcaggctggacgtgaaggggcaggactacgagctgctgccgttcgggtccgggcggcggatgtgccctgggtacagcctcggcctcaaggtcatccaggtgagcctcgctaacctgctgcacggcttcgcgtggaggcctcccgacggcgtgaccatggaggagctcagcatggaggagatctt

SEQ ID NO: 59242 - DNA, 379 bp, Zea mays
  unsure (1)..(379): unsure at all n locations
  Clone ID: MRT4577_154024C.1
gnatattgtccatcctgccactcctgacctcccgccgtccgagaaattggcaccccacatttgggcctactcaaggatggccacctccagggggacatacattgacgccctactctctctggtatagggaactagcacccttaactatctctactaacgtggataccggcctaccggccgggctcccaacacctatgctgatgctgggatcacgcacctccccacgaacactttctcacactattaccagatactcaaaaccactggcatgctgaggcctgcaccaagaagaaccttctgccactggacctgagacctaataagacccctacctttccatggccagtgaccaagcacactgctctttctgtagaccatg

SEQ ID NO: 59243 - DNA, 710 bp, Zea mays
  Clone ID: MRT4577_154025C.1
cctcgaggccggccgggaagaaattccactccactgcgaaattcctactttcaatcagagccagtatcctcgcgttgttaccgaggacttcgtgtctcttcccagctaaggcaaatctcgggaaggatggcttggcatccgtccatggacagtggtgatgatgtttcctatctttagaataacagcaggaaaacttgacatcttattggctcaggacgaggagtgatgtctttcggtgcacactctcacaccttgcgcggtatagtcgacatcaagatcctaaaccatctgatcaatatccggaccccctactgcatggatgcaactccgaagactcgtgagctgaccttaatggagggactctcatctcttacaaacgaaaagatcaatttttggacattgcccaagtacctcgctgaccatgtgaatgaatttaaatcagatcgagaagtttaacatattcaacactaacaactcgtgggtgaacctctatcctatcaacagactcagaaaggctgaggcacttgagatggagattattcccaacctccaagaagccgatggtgggaaagtccttcaactcaagacctgatgtgatgcagctattcagaccttcgagcaatacatattgcaattaatgctcccctctcaatgttgctcccagatgaaggctacctctgatctgatgcttgtgcatgctgatcttaaca

SEQ ID NO: 59244 - DNA, 467 bp, Zea mays
  Clone ID: MRT4577_154026C.1
ccgcgggtgccccgccgcaatttccggggcgagccacacgcgcgctctgtgttatgacttttggtctacctgggtgcgtagtttgccaataacgcccaaagtgctagcgtcaccaagatgccgctgcctaacgacattgcaatactcaatccaccggcagagtttgagaagctaaagcacaagaggaaccgtctagaccagatccccaactgcttcttgatggatgtgaagagccagggctgttacagcataaccactgtgatcagccactcctagactgaggttgtgtgcccaggctgccaaactgttctgtgccaacctaccggagggaaggccaagctcaccgaggggtgctccatccgtcgcagaggcgagtagggactgagctactcttaatgagagaagagataaatatggagtctacgaactttctcaggagatggactgtactcagtgaggattctgat

SEQ ID NO: 59245 - DNA, 397 bp, Zea mays
  Clone ID: MRT4577_154027C.1
gctccaacttatgtcccaacagcaggacaacaagacttagcacatgcccaagctcaagggaaccttgtaaacataacgtaatttggggatattgatccccgcaaacttccaccattgacgcaggggcagaaggaatggtaaagatagtcagactgcacgaacggtaggttgtgttagctcccctatgcaattgacttcacccaaagtcagaccaggaccaagagtatctaatgaagattgcagagagatctatccagcaaccccagaaacagcttcagcagctgcagcagaaccaacagcagcaacagatccaacatccagatgcaacagagcgatacaaaaagaaagcagcccagttcttcaggacctgcaaatagaccggttcaggaaacactgt

SEQ ID NO: 59246 - DNA, 106 bp, Zea mays
  Clone ID: MRT4577_154028C.1
ctatatatagtgtacatgtgacatatgatccacaactagctggtgatggactgggggaacaacagggatgtgtccgggatcaagctgatcagggccaacgttttac

SEQ ID NO: 59247 - DNA, 420 bp, Zea mays
  Clone ID: MRT4577_154029C.1
aaaaaaaaccagtcgcatgccgcctccttatcttggacctttaaaaggccgcctttttttttttttttttttttttttttttttgggtcccaaatgttcaagctccataaatatattcattctgccctatccaaattacaagatcagatatggcattctccatttagcatctgtttgtaggacgggggtgcgccgttgcgtgttactgtaacattagactacttacaactactcaggtcgaattggcgtacgtttgacaattcggttaccttgcttcttcaaccacgggctctcatgcctcaggatcatccaacattccaggggaaatgcaccattgcaacctcaagttccagtcccaaggctcggggatttcacgatccaacgtaagagcattgcttattcgcctgttctggaaccaat

SEQ ID NO: 59248 - DNA, 274 bp, Zea mays
  Clone ID: MRT4577_15402C.1
tccctctgtcctctgtcagcctggcctgacccctaccctccagcattgctcttcctactgtacatattggagagtggggggcagggtcgggaagggacatgccaggccaggcctggggccccggggcctgacccacaccacgcagaccccgggctccagtttttaagtgatggttccatcaatacctgatccagaatgtttccgtgctacactttgtgtcctgctgcaatgtgttctgtctgtacatccactctgccctctgtaccggacactg

SEQ ID NO: 59249 - DNA, 1119 bp, Zea mays
  unsure (1)..(1119): unsure at all n locations
  Clone ID: MRT4577_154030C.1
aattcggcacgaggcgaatactgactgccgctcgagctctgccatgaaaagtcgccactatttgcgccacaagaatttcgcccgaaaatctagcactgtgaggctgtgctgcctgctggtgccgccgggcaggtcaaagagttccgttgccggtgaaactggtgtcgcacacggctctcttgtcatctagtgacgagtggatggcatgttggctgtagcctgtaggttaaggcttttgatgacaaatttgatagaaacatgcctcaaagttcaaactactgttgagaagcaaaataaccgagatttccaagtccgttcaagagtctatttccaactgcttcgtgctttcccaggtcctccatttcaccccctccgccgtgcaccggcaccagcgcgggcgcgcctcgccgcccccaccgccgtatcaacgcacgaggatgctgccgcacacgccatcccgaacctcgggggccctcaggttcaaaccgcacctccccaccaagccgccgctcctcacctcttcctccaccgccacccccgcctccgcctccacacgcggccgcctctgcgccgccgccgccgccacacgccgggacctcctcgtcctcgtcccctcgctagtcgcagcgtccaccgtcctccagtcccttcccctcgccgcctccgccgcggcagccgatgacaagccggccccaccgccgccggctcaggcgcaggcgcccgcctctccggcctcgcctccgcctccgcctccagcggacgagcctgctctgtcgagggtatacgacgccacggtcattggggagccccaggccgtcgggaaggaagcgcggcggagggtgtgggagaagctgattgcggcccgggtggtgtacctcggtgagtccgagctcgtgcccgaccgcgacgacagggtgctcgagctcgagatcgtcaggaagctcgcggccggctgcgccgaggccgggaggagcatctccctcgcgctcgaggcctttccctgcgacctccaggagcagctcaatcggttcatggatggcagaattgatggcaataccttaaggctntatacatctcactgggcaccagagcgatggcaggagtatgaaccacttctga

SEQ ID NO: 59250 - DNA, 250 bp, Zea mays
  unsure (1)..(250): unsure at all n locations
  Clone ID: MRT4577_154031C.1
cagtaatgtaaaaagcaaatgcatatggattgagcaagatactgccgaacaatgagtttgacctgatgtcaacgcggagcagncggagtgccctcactgactggcttagacaggccagatggcataacccgtggcatgaaacggaaataacgccgtatcttgtgtgacagggcaacggtgtcccagaggatcttcactacctgacattgtatgaaggaggttgattgctattatgccctcttaaatagtt

SEQ ID NO: 59251 - DNA, 280 bp, Zea mays
  Clone ID: MRT4577_154032C.1
agtcctctgagcgggcgccgctcctttttttttttttttttggtcctaccagcaaggggggaagctaaccaaacagggggttttgtctttttttccccccccaccacacagttttttgttggggggcccacaaaaggaggcgccaaaagcgggtagaccaaaaaaatttgtgagcgccaaataaaggtatctttcaaaactaaacccaatccctccgttgataattacccccgcttttccctttttgggcgtcacaaaccccttttttacccatggaagg

SEQ ID NO: 59252 - DNA, 416 bp, Zea mays
  Clone ID: MRT4577_154034C.1
aaggggggcggggggttcccttttaacttagtttttaattattctgaagatcctttctcggggggtttccctgccccaggttaccgcgaatttttgacgccccagtccgttcggtccagttttcccctttttgggcttttttagcgcctgtaccggtaagggggggaggggaattggggatggaaaatcccacgcttaaaagtactcttaaccccctttttgggggagttttccctctctttgttcccgttccgggaggcattatcctcgtttgggggtcccgggtgaatttttatgaaggaagtttttcgggcgtttccttttttttttttcctgggtgtgggggcttttcttttgcccccaaggtctgggtgagatatattaaaactgtcgccttgggcatttttggggggggg

SEQ ID NO: 59253 - DNA, 334 bp, Zea mays
  Clone ID: MRT4577_154035C.1
cgctctgaccgaaaggaaactagaaactccgcgcgttgcacgcgatcgagacattgagagagcgatggtagggcgcgccctcctgctgctgctcctagagctggctagtggtgtttcatatgcacgcctggagccgggtggtatgcgagaccgtgtacgagaactagtaccatgtgatgggtcccatgcacgaaggatgaataccaaggtgagtggcggcattccacgagcgatggttaataggactaaaccctccttcgtagtgagacagcatggaaagactccatcatcaaggagcttgataagacaaatacctcgtaggatggtacagagg

SEQ ID NO: 59254 - DNA, 297 bp, Zea mays
  Clone ID: MRT4577_154036C.1
ggaaatcggcttgcccaacatgatcaatttgtttcaaccggaattttacatacagaagaggggttacatgcatgcagtttttcaaattaaatcccggcaactaaacgtaattactggggctaattacctagccgggggcgatcgatcgatcgattttagtacaaacttttttagctgtagcaacagtagttttagttggggatcaacttttttttactacaccggggcaaggcaacttcttggggggtggaaatttgggcgcgcgattttcatttttatttacaacaaaagaccggg

SEQ ID NO: 59255 - DNA, 310 bp, Zea mays
  unsure (1)..(310): unsure at all n locations
  Clone ID: MRT4577_154037C.1
atacgcttttttttttttttttttttttttttttttttttttcncccccccaccgaaaccatcactttagcaaatcccacaaacataagttaaaaggtacccagctatgcctgggtagcattttttatgttgtttcaaaaaaggatacattccccgtttgcgaggtcgattcatcttcctatttcccagctcggggacagcaaaaccagagatcactcccatgctttaagggcaccacccctcccaattgccttgatgatagcctgcttactgttgcgcgcactgcactctttgggctccgcccggcatt

SEQ ID NO: 59256 - DNA, 632 bp, Zea mays
  unsure (1)..(632): unsure at all n locations
  Clone ID: MRT4577_154038C.1
caaccacttactctcgtgcgctctccgtgggagcgaggactcgcggccggcgcagcggcaggttctcctagatctccgggtaagcggtgaaagaagaggaggtgttggaggaattagttccgaatctttctccattacgattttcgtggcgtcgagcatcatcagtaacaaatggctgacggtgaggacattcagccccttgtttgtgacaatggaactggcatggtcaaggctggttttgctggtgacgatgcgccaagggctgttttcccaagcattgtcggacgcccccgggggcagaaggatgcgtatgttggtgacgaggcccagtccaagaggggtatcctgactttgaagtaccccatcgaacatggtattgttagcaattgggatgacatggagaagatctggcaccacaccttctataatgaactccgtgtggcgcctgaagagcaccctgtgctgctgacggaagccccactcaaccccaaagctaaccagggagaagatgacccaaatcatgtttgagaccttcaatgttcctgccatgtatgtcgccatccaggctgtgctttccctgtacgccagtgggcgtacaactggntattgtgttggactctggtgatggtgtc

SEQ ID NO: 59257 - DNA, 1740 bp, Zea mays
  Clone ID: MRT4577_154039C.1
attcggcctatcacaaccacttactctcgtgcgctctccgtgggagcgaggactcgcggccggcggcagcggcaggttctcctagatctccgggtaagcggtgaaagaagaggaggtgttggaggaattagttccgaatctttctccattacgattttcgtggcgtcgagcatcatcagtaacaaatggctgacggtgaggacattcagccccttgtttgtgacaatggaactggcatggtcaaggctggttttgctggtgacgatgcgccaagggctgttttcccaagcattgtcggacgcccccgtcacactggtgtgatggttggcatggggcagaaggatgcgtatgttggtgacgaggcccagtccaagaggggtatcctgactttgaagtaccccatcgaacatggtattgttagcaattgggatgacatggagaagatctggcaccacaccttctataatgaactccgtgtggcgcctgaagagcaccctgtgctgctgacggaagccccactcaaccccaaagctaacagggagaagatgacccaaatcatgtttgagaccttcaatgttcctgccatgtatgtcgccatccaggctgtgctttccctgtacgccagtgggcgtacaactggtattgtgttggactctggtgatggtgtcagccacaccgtgccaatctacgaaggttatgcccttcctcatgccatcctgcgtcttgaccttgctgggcgtgacctgactgacagcctgatgaagatcctcaccgagagaggttactccttcaccaccacggccgaacgggaaatcgtacgggacatcaaggaaaagcttgcatacgtggctcttgactatgatcaggagctggagaacgccaagagcagctcatctgtggagaagagctacgagctgcctgatggccaggtgatcaccattggggcggagaggttccgatgccccgaggtcctcttccagccttccttcattggtatggaagctcctggcatccatgagaccacctacaactccatcatgaaatgcgacgtggatatcaggaaggacttgtatggtaacattgttctcagtggtggcacaaccatgttccctggcatcgctgaccgtatgagcaaggagatcaccgcccttgccccgagcagcatgaaaatcaaggtggtggctccacccgagaggaaatacagtgtctggataggagggtccatccttgcctccctgagcaccttccaacagatgtggatctcaaaggctgagtacgatgagtcaggaccagcgattgttcaccggaagtgcttctaagctcaagggcccccttcgtccccattctatgtattcctttccttgagtgcttttcttataagctactatgtttgagattgccggcctttgagcaggcaatgttgttggatctgtatcttgtggatcactacaatgcatgcgttgctccatcttcttttcatgccaagtttgctgtcatacttgctagtggggaaaacaacaatgacaacagtggtgagaacagcaaccacaaaaaaagagaggatggaaattattgaagttcctaggatcgtattgtaactgtacttgtgcgagtaacattattggttctctttgtatatccatctctgagacatgcaattctttttgattggtttgctacttcaaaaaaaaaaaaaaaaaaaaaaaaaaaaaaaaaaaaaaaaaaaaaaaaaaaccccac

SEQ ID NO: 59258 - DNA, 638 bp, Zea mays
  Clone ID: MRT4577_15403C.1
ggtacccgcgcccccccccgcgagctcccccccccccccccccccccccccccccccccccccccccctcccccctcttcctttctctttttttttgggcccccccaatttttttttggttaaaaggttcctccgggttccaaccccaggggaaagccttttcccaagttttgacagttagcgggcggggggctcctcttttttaggaaaaatcattcaatttcgggccctagccgggggggttttttcccgccccggggggtttaaaaggccttttttttccccccgttttttttgaaagataagggtctatttaaccgcccaaaagggcaaaagggcaaaaggcgaaaaaaaaggcttttgggggggcctgccctgcccaaaaaacctaattaacatctggggggtctacaaagaaacaaacccccttgggggggttatgggccctccctccggggtccagcctaaaaccaaaggtgtaacagggccccccctttgttaaaaaaaacccccacaggaatttagccctttcccgatcaatgggggggctctttttcccccgggtccaaaccaagggggaggaagggaggcccaacccttcgggggggggcaaagatttgaactcaccgggccggccc

SEQ ID NO: 59259 - DNA, 1809 bp, Zea mays
  Clone ID: MRT4577_154040C.1
aggctcggccgggtttggttaggatgggtggacgtttgaagtgatgagtttttcaagcgtatagattttctatttgtcctttttaattaactttctcccagccgggatgcgcgtataaaaaccggcgaaacccttggctctcctcattcggcctatcacaaccacttactctcgtgcgctctccgtgggagcgaggactcgcggccggcggcagcggcaggttctcctagatctccggcatcatcagtaacaaatggctgacggtgaggacattcagccccttgtttgtgacaatggaactggcatggtcaaggctggttttgctggtgacgatgcgccaagggctgttttcccaagcattgtcggacgcccccgtcacactggtgtgatggttggcatggggcagaaggatgcgtatgttggtgacgaggcccagtccaagaggggtatcctgactttgaagtaccccatcgaacatggtattgttagcaattgggatgacatggagaagatctggcaccacaccttctataatgaactccgtgtggcgcctgaagagcaccctgtgctgctgacggaagccccactcaaccccaaagctaacagggagaagatgacccaaatcatgtttgagaccttcaatgttcctgccatgtatgtcgccatccaggctgtgctttccctgtacgccagtggggcgtacaactggtattgtgttggactctggtgatggtgtcagccacaccgtgccaatctacgaaggttatgcccttcctcatgccatcctgcgtcttgaccttgctgggcgtgacctgactgacagcctgatgaagatcctcaccgagagaggttactccttcaccaccacggccgaacgggaaatcgtacgggacatcaaggaaaagcttgcatacgtggctcttgactatgatcaggagctggagaacgccaagagcagctcatctgtggagaagagctacgagctgcctgatggccaggtgatcaccattggggcggagaggttccgatgccccgaggtcctcttccagccttccttcattggtatggaagctcctggcatccatgagaccacctacaactccatcatgaaatgcgacgtggatatcaggaaggacttgtatggtaacattgttctcagtggtggcacaaccatgttccctggcatcgctgaccgtatgagcaaggagatcaccgcccttgccccgagcagcatgaaaatcaaggtggtggctccacccgagaggaaatacagtgtctggataggagggtccatccttgcctccctgagcaccttccaacagatgtggatctcaaaggctgagtacgatgagtcaggaccagcgattgttcaccggaagtgcttctaagctcaagggcccccttcgtccccattctatgtattcctttccttgagtgcttttcttataagctactatgtttgagattgccggcctttgagcaggcaatgttgttggatctgtatcaaaaattgtggatcactacaatgcatgcgttgctccatcttcttttcatgccaagtttgctgtcatacttgctagtggggaaaacaacaatgacaacagtggtgagaacagcaaccacaaaaaaagagaggatggaaattattgaagttcctaggatcgtattgtaactgtacttgtgcgagtaacattattggttctctttgtatatccatctctgagacatgcaattctttttgattggtttgctacttctgtgaaaaaaaaaaaaaaaaaaagtcgagactagttctctctctcctcgtgc

SEQ ID NO: 59260 - DNA, 307 bp, Zea mays
  unsure (1)..(307): unsure at all n locations
  Clone ID: MRT4577_154041C.1
ggggggggggggggtggcgctggtgctgccggggggcgtggaggccgcgcccgggatctcgccgtcgctcaggaacttgctcctgagcatcgtgtccggaggcgtcgtgctcggcgccattgtcggcgccgtcgtcgctgtctctaactggggggggggggggcgncnctgtactcaatcaactacccgtgctcacatgcatgcagcggtgcatgttgcattgcatgctgtgcggcggctgggcgtgtgttcttcttgcgagtgtgtacagcgtgcaatctgtgaatgttttgccgtgcggatgcga

SEQ ID NO: 59261 - DNA, 395 bp, Zea mays
  Clone ID: MRT4577_154042C.1
gcccaagaggagaaaatgctaatggcaagatcttctaaggataaatttgaacatcttcaaagccagtatgtagatttgacatcagaaaacaatgctctcaaaactgaaattgaagaactgaagtccagactcatagagttgcagagaactcaagaaattgttatggttcaacatgttgaagaatgccaagtggctgaagataagatcagaactacaagggagaattcagaagttactagaagattctacctttgctgaaaatcacaagcaagagttgcttcaaaagattttgaagctagaatcagataatcaggaactcctaggacaaatgcagtccattatggaagagaaatcaaataatgctgaatctctgcatggagagataactaagcgtg

SEQ ID NO: 59262 - DNA, 3129 bp, Zea mays
  Clone ID: MRT4577_154043C.1
cccgcgtgctcgcgcgctcgcgctctctccgcgacgactgggtgtgggctaccgccgccctacgccaggtgccgaggcttcgtcgatctcttcgccggcgacgagcacccaccaggatgcaaaagctctcggggcttcggagcctcgaggggttccgatccctcgttggatccacctcgacagccatgaaggtcgcgaaccccaggccttccccggatactgggggtatttcgtatgggagcttcgccaaccttaagatcacagcagagaaattagtcaaggagcaggcttcagtgaagactgatctagaaatggcgcatgtcaaattgagaagagcaacagaacagataaacattatagagggaaaacttcaacaagctttgaatgaaaatgcaaagcttaaggtgaagcagactgaagattcgaagctctggcagggattagattcgaaactctcctcaacaaagaccttgtgtgatcaactgactgaaactcttcagcagctagctagtcagacagaacaagctgaggaagacaagaagttttttgaggagatgcttgggaagaattccaaagctctagatgaattcaactgcctgttgcgtgatttatcaacaaaactggagtatgcggaacaaaagataatttcagggagacaggagatgttgcagatcaaacaagagaaagaagagatggatcgaagttacaagggacaactgtattcaaatgatactacgataaaggaaaaagattcgctcatcaagcagttggagggttcacttgatgataataaatcccgcttgatatatcttgactcccgcttgcaatgcatggagcaagaactgaagctaaaagatgatgtttgtatcagcctgaaaggaaacctagctagcagtgaaagtgaaaagaacagcttggagcttatgaataagggacacattctggaaattaaaaaactatgccaggacaataaggatcttaatgaattgtttagcagcttcatggttaaagtaactgagctagataaagaacatgcctctatgtcaagtcatgtgtctaggctgatttcttcatttgaaagattctatgaaatggcccaagaagagaaaatgctaatggcaagatcttctaaggataaatttgaacatcttcaaagccagtatgtagatttgacatcagaaaacaatgctctcaaaactgaaattgaagaactgaagtccagactcatagagttgcagagaactcaagaaattgttatggttcaacatgttgaagaatgccaagtggctgaagataagatcagaagattagagtctgaagctgaagtttctgcctccaacataaatcagttagaaaaattagcttcagaactacaagggagaattcagaagttactagaagattctacctttgctgaaaatcacaagcaagagttgcttcaaaagattttgaagctagaatcagataatcaggaactcctaggacaaatgcagtccattatggaagagaaatcaaataatgctgaatctctgcatggagagataactaagcgtgaccagcaggttgatacacttgagaatcagatcaaccagcttcgtagtgttctggatgagaaggagcaactctacctttgttctgtacaaaaagagaagactttggaggaacagaaattacaggtcgaagcattgctttctgcaacagagtgcaaacttagtgatgcaaaaaaacagtatgatctgatgcttgaaggcgaaaagatagagctatccaagcatttgaaagagctatctctcaaaaatgaccaggcgatcaatgaaatccgtaagaaatatgaacttgaaaagattgaaattactaatgctgaaaaagaaaaggcagaaaagctcataagggaaattgaaaacaaatgcaacgaaaagatatcacagaacaagcatgattctgagaggtatttgatttgccttaaggaggaacatggcacaacggtggcgagaattcagcaggataatgagcataaagagtcaactctccgggcttatcacaaagaagaactgcagcgcattcaatctcaggctgagaatgaaatgagggagaggttgtcattgctcagaaaagagcatgaagttcaaataaaatcactaaggatgcatcatgaggaagaatgccagaggatgcaggaggaactggagcttcagaagtccaaggaggagaagcaaagagcattgttacaattacagtggaaagtaatgggagaaagtcaacgagttgatcaagaagtgaactctaagaaggaatactctgtttcgtcgattaggaggagcgacccatatggaagaaaagaacaagaggtccagttggtaagtccggagaccaatcggaaggacgtaaacttacctgggattttacaatcaccaatttcgaacatgttgagaaaggtagagaaagtgtctcaggatattcctaaacatagaaaggtaacccaccatgaatacgaagttgagacagcaaatggaagaatcacaaagcgcaggaaaactaggagcactgtcatgtttggtgaaccgaactctcagaaaccattgcataatactactgacaaagatgttaaaaaactaaaaaaggttcctacaagatcccgtgcacatcctgcaaacattggtgaattattctctgagggttccttgaatccgtatgctgacgacccttatgcttttgactagaagctcacgcctggaagtatcatttttgcaagcacgatgacgaattctggaacacacaattaccaccaccgtgttgggtcaatcctacggtttttccctggtcatccgtccatcataatgtacatgactgccgttgactcatgtatctctgaagtattgctactgcaacaaccatcacgattgtcggatatgtaggtgtagatttatgaatgaactgtacatgccataactacggagtaactgaatatcctcagataaaacgctttgtacgcgtcgtgcgatgctgttggattggaatcgtgtttgccctttcctccagatgccaaggcccggtcgagtagatgggctccggtctggaagtggggcacagcatgtggatacaggattaatgccactgggtgtttgcatc

SEQ ID NO: 59263 - DNA, 279 bp, Zea mays
  Clone ID: MRT4577_154044C.1
ggaacaaggaaacaatcagaaattcagagttcaagcgaatcaaaagcaacatttccaatccttcccccttttccaattttttttgaatgaacccaaaaagctgttagctgtttccttcaccactgaacccaagcaacagctgcatcctttaatttttctctcaatctacaattatgtcccctttctgtttccccaaaccagggctggttgccgagcaaacacagttccaggttccctttaatatggggccagggggagggggccaccccatcggaggca

SEQ ID NO: 59264 - DNA, 309 bp, Zea mays
  Clone ID: MRT4577_154045C.1
ggccattaatcccggggaaccttaacctttaccttcataagggtaaaataaggggattaaaaccccggggcgccggccaagggaccaccccaacccatagccttttttttggggcacaacaggagaacccccaacgcgaccccactgtagccacagccacagggggcgcccgggacgcgttttccacgcccgcccaccccaaaccaaaaaacacattccagccggtttacccctttttttgggcgggccgtccgggcgtagggcacggggaacccccgcttcccggggctggataagggggcccccggg

SEQ ID NO: 59265 - DNA, 224 bp, Zea mays
  unsure (1)..(224): unsure at all n locations
  Clone ID: MRT4577_154046C.1
gcggcgccgcttagttctttctcctttcgnggccaactcgttggtgcttgctctctctgtgcggtccgactggccacctgcttcccctccccgcccttgggtctcccgtcccgaagccccggctcatgcgagctgggatcttgtgccccgaccgaccctccaaaggtattccgtgggagcacagatggcccggacatcttgcttggtctccggcccgcgttccc

SEQ ID NO: 59266 - DNA, 954 bp, Zea mays
  Clone ID: MRT4577_154047C.1
tggagatcgtgcgaggctgtactacctgtacgcctccatcgtcgcctcgcaccatcaatcctgtgcggtgccagatcctccccgggtcttgtcttgtcgcaggtggaagccatgtccgccgcggacgcagccggcggcaaggaggcggcgccggcgtgcgactcctgcacgggcatgccggcggtggtgtactgccgggccgactccgcgaggctgtgcctgccgtgcgaccgccacgtgcacggcgccaacaccgtgtccactcgccacgcccgggcgccgctctgcgccgggtgccgcgcagccgctgccgctgcggcccgccacgcgcggcggcttcctctgcgccagctgccgcttgggggaggagaaggatgagcgggacggcggtggcgccgccgacagtagtagcgacgacggtggcgcggtggaagggtacgccgggtgcccctcggtcgccgatctcgcgaccatcctgggcgccggctccgcgtgggaggagccccagacgctccgcttggagagccggagctccggcggcgagctggctgacgaggtcatccgccagctggtggagctcgccaggtcggaggcggcggctcgcgctgagatggagcagcttactccatggccgtcgccggagcttgctgccattactggacagtacgccgacttcggggctctcgacgctgacaccgcctggcatgatgatgcagcagccatcgcggcagcagtagtgccttccactgaggaggagcagcaagcgtggatcgcggccggctgcgacgtcggcgcgtgccggacggaggagaaggcgcgcgagaacgacgctgctctggccgagccgtgtctgtcctcgttcgtggagatgtcagagatctgccccgccagcgtcgtcgtcaccctcagccacggcggggacgagggcgtcgacagcagcggcaagacagcccc

SEQ ID NO: 59267 - DNA, 297 bp, Zea mays
  Clone ID: MRT4577_154048C.1
tcgtccacgcgtgcgttaaagagcgggttaaaccctagcttggcgtggtgctcgggtccacatcccttgccagcttatttgatggcctaaccgctttccggcactcattggagcactcccggtagcccacctaatgacatggagaagaagcgggagcgcaccgacgcccccggagaggcgaacggcgcagaatatgctgacgacttttcggcggggccccctgtgcgcacgcttgtccggttcaaggaccccgtacccgactccgaggccgccttcgccggcgccgagggccgtgtg

SEQ ID NO: 59268 - DNA, 158 bp, Zea mays
  Clone ID: MRT4577_154049C.1
cttacattttgatacacattaactgggcatgacatcactctggcaatgatagcacgccgacttatctacgaatggaggattgcaggatacctgacggtcaacgctattcgaggaatctaaatgagcgccaagtcacaagcatcctaaagatggcatgt

SEQ ID NO: 59269 - DNA, 635 bp, Zea mays
  Clone ID: MRT4577_15404C.1
ccggccgggaaccacacatagagcgtcatttcaaataacactggtgagagcagaggatgggatccctcgctaataacatcatggtcgtgggcgccgatcgttgagaactcagagccggcgggatctgcgggaccccgaacgtgccacgccgggcccaacatcaccaccaactacaacggcaagcggctcagcgctaaggccacctggaacggtcagcccagacggagtcggatctcctgacaacggcgctgcgtgagagatcaacaacgtgaacctgccaccctacattggcatgacagtctgcttcaacggccccatcttcgaggacgggaaggtctgcgggtcatgctaccaggtgagatgcaaggaaaaacctgagtgctcggaacatgcaaacacgatgtacatcactgacatgaactaccagcctatcactccctaccacttccacttgagcggaaaggcctgtcgggtccctggaagagctcctgcatcaacgacaatattcgccacagccttatcatgtacgtcgagatcagaatggtgcgatacaagtacgccgccggggataagatgctgcatctcatcgagaagggctgcaacatcaactacctggacgagctggtgaactatga

SEQ ID NO: 59270 - DNA, 366 bp, Zea mays
  Clone ID: MRT4577_154050C.1
cggacgcgtgggcggacgcgtgggcggacgcgtgggcggacgcgtggggagccgaagagcaaggttgtgatagcagatagcggcgagctgccgatgtgacggcgagctgaactgatgttccatcccgaagcatgatgataagaagttgctggtggccgtctgtcgttctagaactgttaggccctgtttggaatcttagtatttttacggttttgaaggaatgctatggtattggatgatactatggtatagaaagtcaaaatctgtttgtttgtatcgggtaaaacgctgtttcgaatactatggtgtacctacaaggctacaaccgtagtatttttacagtattgaaaacttcacttggacttc

SEQ ID NO: 59271 - DNA, 2653 bp, Zea mays
  Clone ID: MRT4577_154051C.1
cagtccttggcggtctccttggcgatgtcctcaccgatcttcttcggggagagaccgagcgggccgatctgggggccagcgacgacgccgcgccgacctcgcctcccgtcacgcggacgaagacctccaccaccctgagaggggtccaatttgggcggcatggctgctgcggcggcggcggcgggtacaggtagggtttggtcggggagcaaggagcttgatgctggcggcggccgtcccggggccggccgggacaccaccaaaaaaccgccctagcttgctcctcgattcatcaattgcaagaggagcaagataccaccactgtagcaccacatgcaggtacgaagaaggcgacgaacatggcgaggctggccttggtagcggcggtggttctgtgcctcctgttagcgacagggccgcagggggccgtcagcgccgaggggatggtgtcgtttgacaatttgatcagctgcaaggtactgggcaactgcgacaagaacctgggccccgaggcctcccgcccagggaaacccgccaacgactacacccgcggctgcaacccgatcaccggctgtcgcggctgatcatatctctctggtcgatgtgcgcgcaatgtcaatgtcgcacgcgcgtgcaggtaccaggcctcagcgtgtggtgccgcgtgtgtgtatatattacacacatgcattatacattggtcgtcgatcgttactgtatgcatggcaactgatgtttcttgcctcgcatatctgaggtgtatactgatgtatgtggctcaacttttgatgattaatgtataagtatgacaaccaaaaaaaaaaaaaaaaaaaaaaaagcacatatacatatatatatatatataggggcgagcttagtagcccatataccttatccgatcctctctgactgaaaaaaaaaaaaaaaaaccttgcggccgagcgctcactcaagcacgctgcgaaacacatacacacacagatcgaagcggaggatgaaggtggaggtggtggagacgacgctggtgccgccgagcgaggcgacgccgcggcacgcgctgtggctgtccaacctggacctggcggtgcccaagacccacacgccgctcgtctactactacccgaggcccgccggcgccggcgccggggaggagggaaagggagagggagaagggtcgttcttcgacccggcgcgcctgcgggaggcgctgtccagggcgctggtgcccttctacccgctggcggggcggctggcggccggcccgggcggccggctcgagatcgactgcaccggcgagggcgcgctgttctgcgtcgcgcgggccgacttcaccggcgacgagatgttcgccgacttcgagccctcccccgaggcgcgccgcctgctcgtgcccttcgccgcgtccggcgacccgccctgcgtgctcgccatggtccaggtgaccttcctcaagtgcggcggcgtggccgtgggcacgggcatgcaccacgtgacgatggacggcgccggcgcgatccagttcatccgggcgtggacggcgctggcgcgcggggaggcccccgcgtggacgccgtcgcacgaccggacgctcctgcgcgcgcggtccccgccgcacgtccccgcctgcgagcacccggtctactccccggcctacctcaacggggcgccgcggcccttcgtgacgcgcgtctacgccgtgccgcccaagctgctggcgggcatccggtcgcgctgcgcgccgggcgcgtccacgtactgcgcggtcacggcgcacctgtggcgcgccatgtgcgtcgcccggggcctcccggcgggcagcgacacgcggctgcgcgtcccggccaacgtccggcagcgcctgcgcccgccgctcccggcgtcctacttcggcaacgccatcgtgcgggacctggtcaccgtgcgggtggccgacgtgctgtcgcagccgctgggcttcgtggcggagcggatcaagcgcgcggtggcccgcgtcgacgacgcccgcgtgcgctccgtcgtcgactacctggagcttgagtcggacaagggcaaccaggcggcgcgcggccagttcatgcccgagtccgacctgtgggtcgtcagctggctcggcatgcccatccacgacgccgacttcggctggggccgccccgggttcgtggcccccgcgcagatgttcggcagcggcacggcgtacgtcacgcagggacgcgacaaggacgaccccatcaacgtgctcttcgcgctcgagccagagtacctgcacaccttcgagaaggccttctacggggagtgaccgtgacccgaccacgaccagacatggcgacgagtccgatgacgatgggatgggattgtgatgccatgccgttgtggcatctcccggggtgtgcacactgttataccatatcatattgcatgtttcggaatgcaattcaatgcttactgggtgtgtgataaggtgcttcattccagctttgtactagtgtcaccaagcacattctgtcctaacatctacgtaaataacggaatgacaaactggaacatgcacggctggaaaaaaaagccatgtagatgtagctgcaaatattttttttttttttttgcaaaataataatgtgttattacatgattaagaaatagcatcttctgcact

SEQ ID NO: 59272 - DNA, 327 bp, Zea mays
  Clone ID: MRT4577_154052C.1
ccgggccgacccacgcgtcagaaaaaaaaaaaaaaaaaaaaaaaaaaaaaaaggggaaaaaacaaaaaagataaaaaattaaatatacataaaaaaaaaaataaaagggctcctatacaagtagatggggggctgatctcagggttcctgttttaacaaagcttttctgtgatgtcactgaccttcaattcattaacctccttttaatacattgccctttgtttaaaaccggcgttatcgaaaaaaccccgacttttatcactttcccctttttgcacaaattctccctttcaaaaggtgcgctctgtttcactgcgccaaaagttt

SEQ ID NO: 59273 - DNA, 408 bp, Zea mays
  unsure (1)..(408): unsure at all n locations
  Clone ID: MRT4577_154053C.1
ccaaaaccaattnaatcntctttttcaactttcaaaatataaaaatcatcccgtaatattatacaaacagtgttcgccaataatatcatccnaaatcnacaaaacttcantaaatgtnaaaactctnttnctacttntaaacatgtctaacctctnncctttaacatttccttctctaaaaaatatttcccttaaccttttttaaaattacaccctcttactttaccttaaaccatttcataacatcctcctttntcaccctatacttaatcccaacactttacttccaccttctccctttatctacacttttcccaactccctcaataaccactttaaaatccattccctatatacccctttaaacatcatacctcatcccaaaatcaattttctcctttattccca

SEQ ID NO: 59274 - DNA, 190 bp, Zea mays
  Clone ID: MRT4577_154054C.1
agcagatcagcgcgcagaaggatgatggaaccaactaacttcccagcattggaatactagaatctcaacacaccaaaatcccaaaaaagcagtgtatcacggattgctacagagtcaccatctggcatgagcaggaattagcaatggcaaacacaagagcacggatcgaagggagatgcaccgtgacagc

SEQ ID NO: 59275 - DNA, 412 bp, Zea mays
  unsure (1)..(412): unsure at all n locations
  Clone ID: MRT4577_154055C.1
tcgggacgacatgtcatgagaggttttgtaggggtttctggcttcgctacacttgtattaagtgctaaacgccccttggctataaagggaccctngaactatatattttcaggggtttctccctttaaatttgtttgaactctaaatgctccggttaacacactatgccacaaagtgttttttttggctctatatatngacctaaaaaagaaataaacactaggaactttacatttttatgcatcaagtttactgtcgtggtgctttggttgtcacgggtgagctctaagtatcctttgttttgctgtctgtattcgtggttaaatccatggatccagtgttggcgttgccagtatatcgccaaagatgctgtctgtattcgtggttaaatgcatgcatccagtgttaacac

SEQ ID NO: 59276 - DNA, 1197 bp, Zea mays
  unsure (1)..(1197): unsure at all n locations
  Clone ID: MRT4577_154056C.1
ggaccctcgaggccggccgggagactataggcagtaaaaaagcgaggaaaaaaaacgaaaaaaaaaaancagggcgccctcacgngcgaactcccacctcctatcgccccctcacctctcctttctctctctagccccgcacaaatctctcctccccttttgccctcgccgcattgcccgccgacgacccccccggcccccgccggatagagaggaggaggagcggcgcggctgcgggagagccgggcggcggcggcggagcgggcttcatgtgcgacctagtggcccgcacgggccggcatcagcagcggtacgaggatggccgtcggctagtggccggatgcataccatttaggtatagagctaacaatgatgaaacctctggtgacaaaactaagaaactcgtggaagttctcatgataaatgcccanagcggacctggtcttttgtttccaaagggaggatgggagaatgatgaaactgttgaagaggcagcagctcgagaagctatagaagaagctggagttcgaggtgatatagtgcattttctggggctctatgacttcaaaagcaagacgcatcaagatgcgtgctgccctgagggtatgtgcagggctgcagtgtttgcgctgcatgtaaaggaagagctgaactcatggcctgagcagagcacccggcagaggacctggctcacggttcctgaagctgcatccaggtgccggtaccagtggatggaagaggccttgctcacaggcttctctgactggcacgacaagtggagcataggtgacggcggtggcggcggtgccaactgtgtgacccggcctaactgctgatgaacccatctgcagtcgtccaatttgtccatcctcccccatttcccctaggctccgacattgcgtaacgcaataaatacagtgtacttctctcgatgctgggttggtcattgacccttggatggttatcttagttattagtgggacgaggtatatagtatttatatctgatgaagacgagaattctcacaacttttaagtgtcgattctcgtgcctgtttatttctcggtttcaggtcagctgcagcctgcaggcaggcacgcaccctgcgcactttgtaactctgctcctgattctggagatgcacatcctgtgtatgaactgaactggtataacttgaaaataactgttaagtcaacc

SEQ ID NO: 59277 - DNA, 1166 bp, Zea mays
  Clone ID: MRT4577_154057C.1
cattgggtaccggccgggaaaaagggagggcgccctcacggcgaactcccacctcctgtcgcccctcacctctcctttctctctctagccccgcacaaatctctcctcccctcttgccctcgccgcattgcccgccgacgacccccccggcccccgccggatagagaggaggaggagcggcgcggctgcgggagagccgggcggcggcggcggagcgggcttcatgtgcgacctagtggcccgcacgggccggcatcagcagcggtacgaggatggccgtcggctagtggccggatgcataccatttaggtatagagctaacaatgatgaaacctctggtgacaaaactaagaaactcgtggaagttctcatgataaattcccaaagcggacctggtcttttgtttccaaagggaggatgggagaatgatgaaactgttgaagaggcagcagctcgagaagctatagaagaagctggagttcgaggtgatatagtgcattttctggggctctatgacttcaaaagcaagacgcatcaagatgcgtgctgccctgagggtatgtgcagagctgcagtgtttgcgctgcatgtaaaggaagagctggcctcatggcctgagcagagcacccgacagaggacctggctcacggtccctgaagctgcatcaagttgccgataccagtggatgcaagaggccttgctgacaggcttctctgactggcacgacaagtggagcagaggcggcggcggcacaaactgtgacccggcctaactgctgacaggcccatctgcagtcgtccaatttgttcatctcctctctttccctaggcccccaaccttgcagaatgcaataatacagtgtacttgtcttgatgctgggttggtcattgacatgttatcttagttgtagtgggacgaggtacatctcatcaagacgagaattctcacaacttttaagtgtcgattctcgtgccctattatttctcggtttcatccgctgtcgtcgcggtgctgcagcctgcaggcacgcgccgcacgcattttgtaactccgctcctgattctggagatgcatatgctatatgtatgaactggtataactttgaaatcaaaagttgccactgttgactcgaaaaaaaaaagaaaacgccaggccaatggacggcc

SEQ ID NO: 59278 - DNA, 144 bp, Zea mays
  Clone ID: MRT4577_154058C.1
atgatctaccgggccgacctgagcaagtgtcgcgactaccgccgccgccacaaggtctgcgaggcgcactccaagacgctcgtcgtcgtcgtcgccggccgcgagatgcgcttctgccagcagtgcagcagccttttcatatga

SEQ ID NO: 59279 - DNA, 1146 bp, Zea mays
  Clone ID: MRT4577_154059C.1
ggtaccctccgggtcggccgggaaaaagaacgaagaatgaaaagtggggaaaaacagggcaccctcacggcgaactccccacctcctatcgcccccctctctctagcgccgcacaaatctctcctcccccgctcgccctcgctgcattgggcgccgccaaggcccccgccggatagagaggacgagaagcggcgtggctgcgggaggagcgggcggcatgtgcgacctggtggcccgcacgggccggcaccagcagcggtacgaggatggccgtcggctagtggccggatgcataccatttaggtatagagctaacaatgatgaaacctctggtgacaaaactaagaaagtcgtggaagttctcatgataaattcccagagcggacctggtcttttgtttccaaagggaggatgggaaaatgatgaaactgttgaagaggcagcagctcgagaagctatagaagaagccggagttcgaggtgatatagtgcattttctggggtcgtatgacttcaaaagcaagacacatcaagatgcgtgctgccctgaggggtatgtgcagggctgcagtgtttgcgctgcatgtaaaggaagagctgaactcatggcctgagcagagcacccggcagaggacctggctcacggttcctgaagctgcatccaggtgccggtaccagtggatggaagaggccttgctcacaggcttctctgactggcacgacaagtggagcataggtgacggcggtggcggcggtgccaactgtgtgacccggcctaactgctgatgaacccatctgcagtcgtccaatttgtccatcctcccccatttcccctaggctccgacattgcgtaacgcaataaatacagtgtacttctctcgatgctgggttggtcattgacccttggatggttatcttagttattagtgggacgaggtatatagtatttatatctgatgaagacgagaattctcacaacttttaagtgtcgattctcgtgcctgtttatttctcggtttcaggtcaaaaaaaaaaaaaaaaatgtaactctgctcctgattctggagatgcacatcctgtgtatgaactgaactggtataacttgaaaataactgttaagtcaaccaggcgaaaaaaaaaaaaaaaa

SEQ ID NO: 59280 - DNA, 386 bp, Zea mays
  Clone ID: MRT4577_15405C.1
attcggctcgaggaaatgcaggccattgtaacctataggacgaactggacatagaggctggcaaattacctgtagaccagatgatccggcttgggaggatgctttacatgagcactgcagatggcaaagggggcggacacaagcagaactacctcctgttcatggaatgggacgtgaagatcaaccctacttcaaaatacatggcctgcatcaagaacgataaccgtgatcaggtgaaggagcagatcaagaaagctgatgcttgagaggatagcatcaagatgaccactaggctcacagctggcgcaggacaccttcctcatgggttggtggaaaggtgactagcaagggactctgcatggggcagctgacatgaaaaccaacca

SEQ ID NO: 59281 - DNA, 955 bp, Zea mays
  Clone ID: MRT4577_154060C.1
gccggccggttcgggaaaaaaaaaaaactccgtgtgctgggaatctttgcatgcagctgtgtgctgaactgaaacccttcgctctatctatctatctatatgaacagatgcgctgcccggccggcgcaggaagcagcatcgaccgacgccaacgaagaagtctgctcgttgccttgtgctacagattttgtggaacgaagcgatggcgcgcagcggcgccgtggtttcctgcctgatgccactggcggtggcgggggtacatctgctcgttgcctccattttgtcgaacgaagcggcggcgcgcagcggcgacatacgttcgtccgggcgggctcctgattttgtggaacgaagcgatggctcgcagcggcgccatggtttcctgcatgctgctcctggtggtggcggcgcaactgctcatggtgatgatggccacgcagacagcggcggcggcggcggcggcgggcgaccaacgcggagctggacgccggctgctgtggcaggtgacctgccactacagcgcctgtaactgccgcacttgcccgatatatggctgggcgtgctgcagcacttgctgctagctagctagctagctagtgtgagttcttccgcgcgcgcacgcagcctttgcataccacccctcttgcttagctcatgcatgtccagtagtagccggttgctggactcgtcgtcgtgtcgtctgcggcggcggcggcgggggcgggggcggcgtcatctctggcgtggttacgttctcatcagcgacttctaatggcgctcgctcgatctttatttcctgcagtcctttttgtaataagaagccaattgatgtgtgtgcacgcgcaatcctaataataaatagatcttctttgtgccttgctttgtttgatatatatataaaagtcttcgtgcaaaaaaaaaaaaaaaaaaaaaaaaaaaaaaaaaaaggccccta

SEQ ID NO: 59282 - DNA, 158 bp, Zea mays
  Clone ID: MRT4577_154061C.1
gttacgcgtacggccaagagcaggatcattggaggagccattaatgatgtctaactggactttgtgaacacagatgttgagggtatgacgatataacctattatgaaagctaatctggtaaagattgacgccgattagagacgtgtagtaggaaatga

SEQ ID NO: 59283 - DNA, 737 bp, Zea mays
  Clone ID: MRT4577_154062C.1
gccggttcaggacagccggctatctatctatctatatggccgcttgcgccggccgggcctgggagcaagcagcatcgaccgacgccaacgacagagaagagagtccatctgctcgttgccttgattttgtggaacgaagcgatggctcgcagcggcgccatggtttcctgcatgctgctcctggtggtggcggcgcaactgctcatggtggtgatggccacgcagacagcggcggcggcggcgggcgaccaacgcggagcagcacgccggctgctgtggcaggtgacctgccactacagcgcctgtaactgccgcacttgcccgacatatggctgggcgtgctgcagcacttgctgctagctagctagctagctagctagtgtgagttcttccgcgcgcgcgcgcgcgcagcctttgcatacccctcttgcttagctcatgtccagtagtagccggttgctgccctcgtcgtcggcggcgtcatctctggcgtggttacgttctcatctggcgtggttacgttctcatcagcgacttctaatggcgctctcgatctttcctgcagtcctttttatttgtaataagaatccaattgatgtgtgtgcacgcgcaatcctagctaataaatagatcttctttgtgccttgctttgtttgatatatatatataaaagtcttcgttgcaaaaaaaaaaaaaaaaaaggcccctagctaaaaaaaaaaaaaaaaaggccccta

SEQ ID NO: 59284 - DNA, 158 bp, Zea mays
  Clone ID: MRT4577_154063C.1
acgcggactcgtgggcaccgcatccgccgcccgctcgctcgcctccgcttcggcagcgagctctatccccctcgactagcagtagttgtcaccgactcacgcataccgcggaataaatattggtattggtagtgtgatatctatattaagtcaagatg

SEQ ID NO: 59285 - DNA, 737 bp, Zea mays
  Clone ID: MRT4577_154064C.1
gccggccctggccgggaggcagcatcgtctcaagttttgttctcctctcctagctagccagcacctgcagatctgctcgttgccttgggctactgattttgtggaacgaagcgatggctcgcagcggcgccgtggtttcctgcatgctgctcctggtggtggcggcgcaactgctcatggtgatggccacgcagacagcggcggcggcggcggcggcgggcgaccaacgcggagctggacgccggctgctgtggcaggtgacctgccactacagcaactgtaattgccgcacttgcccgatatatggctgggcgtgctgcagcacttgctgctagctagctagctagctagtgtgagttcttccgcgcgcgcaagcagcctttgcataccacccctcttgcttagctcatgcatgtccagcagtagccggttgctgggctcgtcgtcgtcgtcgtctgcggcggcggcggcgggggcgggggcggcgtcatctctggcgtggttacgttctcatcagcgacttctaatggcgctcgctcgatctttatttcctgcagtcctttttgtaataagaagccaattgatgtgtgtgcacgcgcaatcctaataataaatagatcttctttgtgccttgctttgtttgatatatataataaaagtcttcgttgcaaacgtaaaaaaaaaaaaaaaaaaaaaaaaaaaaaaaaaaaaaaaactcgagagagggcgccggtacc

SEQ ID NO: 59286 - DNA, 489 bp, Zea mays
  unsure (1)..(489): unsure at all n locations
  Clone ID: MRT4577_154065C.1
ccggccggngaaaaaaaaaaaaaaaaaaaaaaaaaaaaaaaaaaaaaaaaaatccaaggctggcgcggccagactgggcctgccgcgcggtgcaccgtagctagtcgtcagttcttttcgatacgaggttgtcatgcaagagaaaaacctgaatcgccgtggcttcatcaagaccgcctccggcctggcgcttgcgcccgccctgggctggctgcccggcatggcccacgccgccgaaaaggaaatcgtggtcggcacctggggcggcgactaccagaacctgctgcagcagatcatcaatcccatcgtcgccaagcaggacgtgaaggtggtctacgacacgggtaacgccgtgggccgcgtcaccaagctgcgcgccgaaaagaactcgcgccgcggcagcatggacgtggcgctgctgggtgaagtcagacaacaagcaaataaaatatagaggcatggaaaaaaaaaaaaaaaaaaggggcggcc

SEQ ID NO: 59287 - DNA, 224 bp, Zea mays
  Clone ID: MRT4577_154066C.1
cccacgcgtccgcccacgcgtccgatccaagctagcaaccggcgcgtctggtcgccgcccgccccgacccacgttagggcgttcgcgccccaagggcccgtgccgttgggtcagcccgcccggccgacgcgccgcggcgggccgcgtcggagctccgttcccgacgggcggcgtggtgggtcgtttgcagacgacttgaaacgcgacggggcgttgtaagtggc

SEQ ID NO: 59288 - DNA, 225 bp, Zea mays
  Clone ID: MRT4577_154067C.1
ggttatgacttccaagcaataatatatatatacaccattggtccttggcgaaggaaacaagaatggaagcatatcaacaattgttcatcacttcctcactgccgccagagcgtatcagctgagcacaggccctcatgcagatgcaggcatatacagcgatatgcatacatgatcgtcgattgtccatcagagggactgatgtgtaaccaaatgcccactgaccaa

SEQ ID NO: 59289 - DNA, 252 bp, Zea mays
  Clone ID: MRT4577_154068C.1
atggatccaaaaaaagtgaccactagagccagctcctccatggacaaggccacgaaggcgtccctcatcaaaaagaaaggcaaagcagtcctcacagatgacaccccatctggcacggctgaaaacaataagatggaggcagtcaaaagcaagcaccctcgtactgatgacccttatcctagaaggcaccattcacacatgcagccagtggacgtgtcgatcacatggtcgaatgaggcgtatacctcctag

SEQ ID NO: 59290 - DNA, 743 bp, Zea mays
  unsure (1)..(743): unsure at all n locations
  Clone ID: MRT4577_154069C.1
gtacgcctgcaggtatcggtccggaattcccgggtcgacccacgcgtccggtggcgaaagcgacatggagagcggggcctatggcgcggccaacgcgggcggctccttcgacctgcggcgcttcctgtctcagcctcaggtggtgacgcgcctcgtgagcatggtcttggccttgatcgtgttctcctgcatcttcggcgagggctacaccaacattcacacatctgatcaactatactgtgtgttcaaccagaatgaggatgcctgccgctacggcagcgccatcggggtgctggccttcctggcctcagccttcttccttgtggtcgatgccttcttctcccagataagcaatgccactgaccgaaagtacctggtcattggcgacctgctcttctcagctctctggaccttcctgtggtttgttggtttctgcttcctgaccaaccagtgggcagccaccaaacctcaagatgtccgggtgggtgcggactcagctcgggcagccatcaccttcagcttcttctccatcttttcctgnggtgtgctggcttccctggcctaccagcgctacaaggctggagtggatgccttcattcagaactacgtggatcccaccccggatcccaacacagcctacgcctcctaccctagtgcctncgtggaaaactaccagcagccgnccttcacccagaatgtggagactactgagggctaccangcctccccctgtgtactgagca

SEQ ID NO: 59291 - DNA, 332 bp, Zea mays
  Clone ID: MRT4577_15406C.1
gggcccaaacaatggtttaatttattcccaagtcaaaatttttggaaggaataacaggacttttggggggcctacaacaggccaggggttccattccatccaatttttcggggcgcccaggggacaaaaaaaagttacgggccccataacgataacggggcaacaacatttttggcccactttttaggacagccttataaggggcccttttaaccggacgcttctttgctaacgggaccaaaacctttgtttcccgtaaggggggacacgtggggggggggctttttagctaactagcgggggggggccaaatagggggtacgggccatacc

SEQ ID NO: 59292 - DNA, 324 bp, Zea mays
  Clone ID: MRT4577_154070C.1
gctaggaattcggctggagccatgccgctaactgactagcgccgcctcgggggacgcaccaacccaacgggggtatgtggctgacctgggctctttcagcactgggccagacccgggacggagccctaacgggcatgaggcggtcccaggcccctccacccgcggaagatctggaggtagctgacgcgccacaggaagacaagcgcaagccgcagccacggcggtacccgaagcagtaccccggcgagggctgcgggcgttgcagaagagactgcgtttgtcgccatgcagcctgaggaaccccaagcgcaccaccataataag

SEQ ID NO: 59293 - DNA, 357 bp, Zea mays
  unsure (1)..(357): unsure at all n locations
  Clone ID: MRT4577_154071C.1
agcagtggtaacaacgcagagtacgcggggttcatcattggaccagagaaggaggtcaggaaagctgaggccactttcgaggccgtggtaacaacgctggagttcgcgagagatgttaccctttgcgatacaggtttcaactgctttatattttgaacgtaaaaaggggaatatccaaaaggtgtatgcgggaccgtggatcccttgaccgtctgtgaatcatgaaaacaaaataaaggatttcaacttggcaaaaaaaaaaaaaaaaaaaaaaaaaaaaaaaaaaaaaaaaaaaaaaaaaccaaaaaaaaaaaaaaaaaaaaaaaaaaaaaagnactttgggttgttaccactgtt

SEQ ID NO: 59294 - DNA, 496 bp, Zea mays
  unsure (1)..(496): unsure at all n locations
  Clone ID: MRT4577_154072C.1
gaacaacaaacaaaagatggggtagaacagaagaaataattacagggctgagaccaggtttgcaagctgctgcttcctgacgcaaagagggaaggagagagatcaaccaagggggggggacaacaaaggagagagagagagagagatctaatttaccgagcaggagctggaaacaacacttttttttgcgcctagacggggagagctctttttcttatgaacacaccaaaagggagaacaaaaactaaaatccctggtggtcacacgtccacttaacgttgacgcattttttcgggggccgttgtggacgaaacgttcttggtcgacctgttggacttaatgggggttttaacgagctgccccgcggggagcgccgacagcagggaaagctcgccggcaaggaccccgccggggaccacgggggccaggaacctcgngttcgacccgggacgggcccggtttgggccccttacgcccaggaggtccaggcaggggg

SEQ ID NO: 59295 - DNA, 535 bp, Zea mays
  unsure (1)..(535): unsure at all n locations
  Clone ID: MRT4577_154073C.1
ccgcngccacaagccacggcgcccgcatttaaaggaaaagaggatagctacncattaacgcactgcattccatgtcaaagtgtcaatagaggcaacctttaaacaaggcaaaaagattaaatgcaggggtactaagagtttttaagcatcacagaaaactacaatagggcattagtacttgagccttttttggatagtgggttagactaacatatttgaaagtacacaaacaaataagcatgcaaactaaaatatataacaatttttgaatatattctctgtcagtggataagttcatacagaggcgaggagcagtacagcgcagccttacgaaaggcacgtcatctaagcgtgcccatgaacaatccacaacagccaatcctttcttctggattaaagagtaatcttctcttgagacacattgatttccacccggactgtcaaaacagaattacagtaaatcagtaatcactatttggaggggagaacagaggaacttgccatatatagctacttaacagtcaaaagagaatgc

SEQ ID NO: 59296 - DNA, 247 bp, Zea mays
  Clone ID: MRT4577_154074C.1
acattatgggggtttgaaaaaactttcaaggccaatactggcttggaatgaaaaaggacacgagttcatccatccttttacagactgttgactctgccacaatattcaccaggccaaccttgcttccattactactgtgacactgggagttacaattttttccccttccttttcccttttcgccgggggttaaggtcaccttaataaatagtgtaccaactacatgctcaactaattgtttaaaatt

SEQ ID NO: 59297 - DNA, 575 bp, Zea mays
  Clone ID: MRT4577_154075C.1
attctccgccgtgccggctcccccttgatacgccttcttgttctcgcttccggtgacgcccgtcacttcctccccgatgagatgactactggcaccaagaaggcaggaatctctgccaaatatgtgaccacgtatggagcccggttacgtaaacacatcaatgaagtggaggtctcgcagacactccaaatacttctgtgacttctgtgtgaagattgccgtgaagaggcaagcaggtggtatctggggatgccaggactgcgggaatgttgacgtcgatgacatcctacacaatgaacactgctaatgagaccactgagagaagcaccatccgtggcctgccttatcacaccgaactatgattgcgagcagcttgcacaggagtacctggatttttgtagatcattcaagaggcgggaaccattttgcctttttaccctacatgaacaagaaatgcttatctatctgtactgtacactttgcactcatggtttgccatgctacattgatggtatgcactatgcaatggaaatacttgcgtcatcgcatgttgtcttgtgctgccgagctcaaaa

SEQ ID NO: 59298 - DNA, 374 bp, Zea mays
  unsure (1)..(374): unsure at all n locations
  Clone ID: MRT4577_154076C.1
ggaatgtttttgcggacatgataaagaggggctatgttcctgatgttgtcctgtacagtattattattgagggcttcgtgaaagctctgaagttgcaggaggcgttaaggttgtaccataagatgttggatgaaggtgtaaaacctaacatatttacgtattctagcctcataaatgggctgtgtaatgatgatagacttcctgaagctatgggattgattagggatatgattggggaagacctgttacttgacaatgttttgtacacatctaanaaaaaaaaaaaaaataaaaaaaaaaaaaaaaaaaaactataaaaaaaaaaaaaaaaaaaaaataaaatataaataaattatgaaaaaattaataattat

SEQ ID NO: 59299 - DNA, 829 bp, Zea mays
  unsure (1)..(829): unsure at all n locations
  Clone ID: MRT4577_154077C.1
agcatcatcttcgaggcgtagccagaatgatgtacactggtcttccgccaccagcttgggagccggcactaccactacaagacggacaccagccgccactacaccgtcatcctgggcagccataggaacaagcggctcaagatcgaagtagatggaaacactgctgttgatgttgctgccgtcggtctctgctgctcctcgtctttccagagctactggatcagcatctatgacggatacataagcatcggccaaggaaagcatccaagcaacaatctcctcttccagtggcttgatcctgatcccaacccacatgttcagtatgtcggcctatccagctgggacaagcatgtagggtacagaaacataagccttcttccatcagctcccccaaatagcatattttggactcaaattgagtacgccaatgtccacccggatgctgacgccagggattatgtgaggaaagataattgtggtcaacgggtacttgcagactttctagagaactgggatttctctgatgccgtatttgtcggtggcactgaaagaaaggtcgtccctgcacacaaacttgtcttgtgtgcctctggagatttcccttttgaaataggggatggagctaccattgtgcttccatcagcatcctaccctgttctccactctcttcttgagtatatctatacaggttcgacccagattgctgaatggctactaagttctctgctggagttaagctcacagnttanagtcgacccactgatgaagtggtgtaaagacatcattgactgtttagaagtggataagaaaccttcccgatctggaaaat

SEQ ID NO: 59300 - DNA, 1297 bp, Zea mays
  Clone ID: MRT4577_154078C.1
cgggaacctcctggccgactgcacactcgtctccgcagtttgaaacgaagcccgcggctactgcaagctactccgtctccgtagctaaaggagagggaagatgtaccacgacatgagcacggcgggcggcctggtggctgtggcgctggcgcacgcgctggccctggccgtggccgtggcagtggccgtcaacatctcgggcgggcacgtgaacccggcggtcaccttcggcgcgctcgtcggcggccgcgtctccctcgtccgcgcggtcttgtactgggtcgcgcagctgctgggcgccgtcgccgccacgctgctcctgcggctcgccacggggggcatgcggccgccggggttcgcgctcgcgtccggggtcggggactggcacgccgtgctgctggaggccgtcatgacgttcggcctcatgtacgcctactacgccacggtgatcgacccgaagcggggccacgtgggcaccatcgcgccgctggccgtgggtttcctgctcggcgccaacgtgctggcgggcgggcccttcgacggcgccgggatgaacccggcgcgggtcttcggcccggcgctcgtcgggtggcggtggaggcaccactgggtttactggctgggccccttcctcggcgcggggctcgcagggctggtgtacgagtacctgcttatcccgcccgccgacgccgtgccgcacacgcaccagccgctcgcgccagaggactactagctagtcggccggcgccggcgccggcgcggcggcgtctccttagttgggccgtgtcctgttgtcaaatttttttatgcatgtgttggaaattatattgtggtgtcttgtgatggttaataatgaggggcatagggtacgtacttgttgatcgccccagcgttggacacggttaatcaggtgatatgcgtctctactaattactatgtgtatgtaataaattccaggtacaaaatgcaggatttgtctcgtatgagtcgtatcatagtagagaccaaaaaaaaaaaaaaaagaaaaacaaaattttttttcttaaatcaaaacgacgctctaaagaaaaaacagcctgaagcactaacaaaaaagcagcaacaacaaatgaaagaaaatgcagaataggctcctgggccggaacccccctagggggaatttttggaaatttccgtaaaagtgggggccgctggaccttgcttttaaagggcccattccgccctatagggggtcgttttacattgaatgggccggcgtttaacaacgtgggggggggaaaaaccttggggttcccca

SEQ ID NO: 59301 - DNA, 125 bp, Zea mays
  Clone ID: MRT4577_154079C.1
gcagcagaggaccgcggtacctcaatcgtgcaaccatgctcgctgcctgacgaaccgccaggctcgtacactgttgatgcttccgcgctcgtcatgcacgcgtgcgaatcgcgagacgtacagcc

SEQ ID NO: 59302 - DNA, 472 bp, Zea mays
  unsure (1)..(472): unsure at all n locations
  Clone ID: MRT4577_15407C.1
ccgcaacggccatatagatattngagaagancaggaagcaangcagggaacggatgaagcaagggaangnaaggaccacagccgagaacgacnnccaagngcgcgccnnggaccaaaggagggcagcagaacaggcacgaanaaggnaacacccgggaagaagaagaccaggaggaangagcccacancacngagcgagncanagcagcagccatcnnncctcctggaaccatgagaactggattcctgggcaaatgcaggtactggaatctgaggtgggaggcacaatttctaagccaagnactagatatcggggaagggcaccgttaatctgaagaaggtttcaaccgcagtcaagtaacaacctacaggagaaaccaacaatctggtgccagaaaggaccctctgaaaccagaaactgaacagcccaaaacagggagaaagcaccatgccagcccactggcaacagcca

SEQ ID NO: 59303 - DNA, 1353 bp, Zea mays
  Clone ID: MRT4577_154080C.1
gggtacccctcgaggccggctggggactgactgcccgctcgtctgtttgaaacgaaggaggaggtacgcacgccgctactgcaagctagcaagaagaggccgctagcagggggttttgcttgatttctggcggacgacatgagcacggccacgggcgtgcggccggggcggcggttcacggtggggcggagcgaggacgccacgcacccggacaccatccgcgccgccatctctgagttcatcgccaccgccatcttcgtcttcgccgccgagggatccgtcctctcgctcgggaagatgtaccacgaccacagcacgatcagcacggcgggcgggctggtggcagtggcgctggcgcacgcgctgggtctggccgtggcggtggcggtggccgtcaacgtctcgggcgggcacgtgaacccggccgtcaccttcggcgcgctcgtcggcggccgtgtctccctcgtccgcgcggtcctctactgggccgcgcagctgctgggcgccgtcgccgcgacgctcctgctgcggctcgccacggggggcgcgcgcccgccggggttcgcgctcgcgtccggggtcggcgacgggcacgccgtgctgctggaggccgtcatgacgttcggcctcgtgtacgcctactacgccacggtggtcgacccgaagcggggccacctgggcaccatcgcgccgctggccgtgggtttcctgctcggcgccaacgtgctggcgggcgggcccttcgacggcgccgggatgaacccggcgcgggtcttcggcccggcgctcgtcgggtggcggtggaggcaccactgggtttactggctgggccccttcctcggcgcggggctcgcagggctggtgtacgagtacctgcttatcccgcccgccgacgccgtgccgcacacgcaccagccgctcgcgccagaggactactagctagtcggccggcgccggcgccggcgcggcggcgtctccttagttgggccgtgtcctgttgtcaaatttttttatgcatgtgttggaaattatattgtggtgtcttgtgatggttaataatgaggggcatagggtacgtacttgttgatcgccccagcgttggacacggttaatcaggtgatatgcgtctctactaattactatgtgtatgtaataaattccaggtacaaaaaaaaaaaaaaaaaaaaaacggacgcgtgggcggacgcgtgggcggacgcgtccgcggacgcggggcggacgtgtttcggacgttgggccgttggggcgcaccctactaagggggaattttgcttgtttgcttccccctgggggccgttgctccccgtttttttggggcccgtttcgcctttt

SEQ ID NO: 59304 - DNA, 373 bp, Zea mays
  unsure (1)..(373): unsure at all n locations
  Clone ID: MRT4577_154081C.1
ataattaatttgtcggtgtgtttacagcaacccggcgttccgaacaaaatgcagtttgctgcatgcaggctgcttggagccaaggaatgagcacaaaactaaagatctgacacaacaccgaccttcggtggaacttcacagaacgggaagaaacattacacggagccgaccgggggatggacgactaaagacaaagcgtaaacacctcggcaccgatacaggatacactggaggcgcgcggggccaaaccaacagttcccccggtacccgggggcgataacgtaaccaccgtcacggttggcaccgccgtaggcggctccaccaccaccgnagcgccacgggggaaaaaccgtcccccccaacaacccccaaa

SEQ ID NO: 59305 - DNA, 1473 bp, Zea mays
  Clone ID: MRT4577_154082C.1
acctcctctactgcacactcgtctccgcagtttgaaacgaagcccgcggctactgcaagctactccgtctccgtagctaaaggagaggtaggtttttatttggcgacgacatgagcacgggcgtgcgaccggggcggcggttcacggtggggcggagcgaggacgccacgcacccggacaccatccgcgccgccatctccgagttcatcgccaccgccatcttcgtcttcgccgccgagggatccgtcctctcgctcgggaagatgtaccacgacatgagcacggcgggcggcctggtggctgtggcgctggcgcacgcgctggccctggccgtggccgtggcagtggccgtcaacatctcgggcgggcacgtgaacccggcggtcaccttcggcgcgctcgtcggcggccgcgtctccctcgtccgcgcggtcttgtactgggtcgcgcagctgctgggcgccgtcgccgccacgctgctcctgcggctcgccacggggggcatgcggccgccggggttcgcgctcgcgtccggggtcggggactggcacgccgtgctgctggaggccgtcatgacgttcggcctcatgtacgcctactacgccacggtgatcgacccgaagcgggggcacgtgggcaccatcgcgccgctggccgtgggcttcctgctcggcgccaacgtgctggcgggagggcccttcgacggcgcagggatgaacccggcgcgggtcttcggcccggcgctcgtcgggtggcggtggaggcaccactgggtgtactggctgggccctttcctcggcgccgggcttgcagggctggtgtacgagtacctggttatcccgtccgccgacgccgccgtgccccacgcgcaccagccgctcgcgccagaggactactagcttgaaaattgtattgtggggtcgtgtaagtggttaataaggggggcataggtacgtacttgtctgtcgccccagcgtgtgttggagacggtgaatcaggtgatgtgtacatgctgcttcactgtagtgtatgtgtatgtgtatgtagtaaataattccaggtatataaggcacgacttgtgtagtatcatatctggttctgacttctgattatctaaagggaaggattcgaaaaaaaagaaaaaagcggacgagtagaaagggcggccgcgtgggcttcctgctcggcgccaacgtgctggcgggagggcccttcgacggcgcagggatgaacccggcgcgggtcttcggcccggcgctcgtcgggtggcggtggaggcaccactgggtgtactggctgggccctttcctcggcgccgggcttgcagggctggtgtacgagtacctggttatcccgtccgccgacgccgccgtgccccacgcgcaccagccgctcgcgccagaggactactagcttcaaaattgtattgtggggtcgtgccttatatacctggaattatttactacatacaca

SEQ ID NO: 59306 - DNA, 599 bp, Zea mays
  Clone ID: MRT4577_154083C.1
ccggccgtgaagcgatgaggatctggaatacggctagggatctcctcttcctctccctctcccaactgttcatcagcgctgcgacatatacatgcctctacctgtccaacatatggaacgtctccttccctctcatcaccacctgatgcgtcaaatctacggccaccacctcctggcggccgccatcggcccccactatcacgcctaatgccagcgaagaatctaggtccccgatatccagacccatgatattcaccatgtcatgaggcgatttcatacctaacgtgcttagctctgcactgactggccgtgactcactaagggcctaccaagtacatgctcatatatcccaaagctggtggctacttctactgaaaaaatgaataaaagagcatcacccgccacatataaatgatgagatcacctcatgatacacatctactgactgagcacgataacgctcgtgcacaacgtgaacactcgctatgaagacatccttgttgacatactcgtggtaccacagatcactcggactacttcatacatgaaatgaatgccgacgatagaatgtggatcccagtctcgacttcctttcataa

SEQ ID NO: 59307 - DNA, 157 bp, Zea mays
  Clone ID: MRT4577_154084C.1
gcacattgcaagtaatgaattataatggtttatcactgacagattcgcacagatctttgagagcatgtactctcgacacaaagcgcatctcaagatcattacagagcttaaagcgtccgatactctcgttgctacactgcaaacaagtgtgcatcac

SEQ ID NO: 59308 - DNA, 1305 bp, Zea mays
  Clone ID: MRT4577_154085C.1
ggccgaggaaggctgttatggaagacaatgcccttcaggcacgcgtcttgagggagcttggtgtgagggcattgcagtacaataacgaggagagaaagaagatactcaataagtaccgctctaaacggcagagcagatcagtgtcgagcaggcctaccaagatatcttcaagacaagctttggctgaaaggcgtaagcgtggcaatggaggtagatttctgtcaagtgaagaacagccgctgccttcagaaaggcgttccaaacgtcttaagaagcaaaatctcaaaatgcagaattgggtacctcgacgtcggccggggagtgaacgaaacgggagacgataacgagacagcaagagccaagaggtgagagaaggagtgaaggaccgaggagggaaacagagaagatggcgacgaagcgcgacaccgagtcggacggcgaaggctccaaccccgtcggtggtggcgcgactccgccgcccctagccgccgcccctgtcgtatgcctcctccgctccgccggggacttcggtggcggcgccttcgttggatccatcttcggatatggacaaggcttgatcaccaagaagggttttaagggctcattcagcaatgcagggtcctctgccaagacttttgcagttctctctggcgttcagagtttggttttgtgcttgttgcgaaggctacgtggcaaggatgacattgtcaatgctggtatagctggttgttgtactggcctcgctttgggctttccaggggcgccacaggcattgctccaaagctgtgccaccttcgcagcattctcatgcatcatggaggggctcaataagcagcaggctgcaatggctcgcacgcttggagggactgccgcgatggccgtgcatgagaaatgtggtgttctgcccccgttcacgcttccacctattcttgatgcatctgatgctttagcttcatgctgcttagcgttagtaaagcctaagcactagactacacaatagagggcgtgagcgatggcgaagaagggtaacttcaatcttcggctctttattgtgttgaccccaggttatatgaattatgtttttggacaagatgtgtaacgtgcctaaattccagggttttttttggcttcatcggaccaggtttcccttgatgggttaacgttgcagcatgcccttgcggattccgctgggtctagcatatttgtatgggataaaagatcataaatatttgcctgaatgttcggtttcaaaaaaaataaaaaaaaaaaaaaaaaaaaaaagtactctgcgttgttaccactgct

SEQ ID NO: 59309 - DNA, 832 bp, Zea mays
  unsure (1)..(832): unsure at all n locations
  Clone ID: MRT4577_154086C.1
cgggtaacactctgtactagtggagtatctctttgtatattgtacccttaccaatccatagggtacacgagatttcttattggttatgtctggtaatggtgttatgactaaaattgatgatactgcgataaaaccgagggcctcctgtggatgcatacacatggttgtgctgctcgttacacgctagtatcacagttagcagtcataatccattatgagattatactaataggttatctctacacaaattgttcttaccacgtgagattcattattagtgccagttttgtaatggtgtcatggttaaggacttgtggtaccgcagcgaaactgagagcctcctgtgaatatgcacacaggattttgctgcttggcgcatgacggtaccaaggtctctggtcatgatccattgtgaaactacactgatgtgtgatcttctatggactccttccttaaaacaatttctatnngttgtttgtgaagagatcaagcaacatctgtcatttccattggatcaaaagggcataccactttcatgtgtggtcgtatttcttttgatcttggtagtgactactcacacaagttccctttgcatccttggtgtaaaggtgaagccttggatctttttagtgttggacaacaactgattagctcccaaatagagatctgttttccctgctactgaaatgcaaaagtttgttcattcgctctcttatttaatccatgtattccctaaccaagtggataattcatctcgcatgataaaaatggatgaacaacatgaccaaatagatttttaaccaagtgcaggatttcttgntagcaaatgtga

SEQ ID NO: 59310 - DNA, 119 bp, Zea mays
  Clone ID: MRT4577_154087C.1
catcgagggcacccagacagaggtggacagccacatcatgaaggtggtgcagcagatcgtgcaccaggctagcgccggccaccagatcatcgtgcagaacgtcaccatggacgaggaga

SEQ ID NO: 59311 - DNA, 287 bp, Zea mays
  unsure (1)..(287): unsure at all n locations
  Clone ID: MRT4577_154088C.1
ctcgcatccgcagcctttcgagctctactccaccccctcgatctcgaagcgcagnagcagcagtcaggcggccatggacgcgagcncagccgganccggcgggaaggcgaagaagggcgcggccgggcgcaaggccggcgggccgaggaagaagtcggtgacgaggtccgtcaaggccggnctganttttcccntcggcnncatctggcggtacctgangaaggnccggtacgcgcaccntcggcacgggcgcccccgtctacctggncgccgtcntcnagtacctg

SEQ ID NO: 59312 - DNA, 223 bp, Zea mays
  Clone ID: MRT4577_154089C.1
gcaaaccaatccctagtgcctagtcgcctgatctggggagaacgcatctgagactgattttcgagtcaaagctactgctcgtttgaaggggagccacctgtgcggttgcgctcctctttgctcgttgggttttggttcaagagggggaaaccttcgtggagactgaagaggaaggccaagttcgagggtgttcctcgtccactcttctcgatccgcaatgcgt

SEQ ID NO: 59313 - DNA, 453 bp, Zea mays
  Clone ID: MRT4577_15408C.1
atgctttctttttctctttttttgtttgtaagggaggattttgatacgcatctcggcatataataactaagatcattctccaggttatggaccatgggaagaaagaactcatctcacagagcttccaaataactgtacaatttcctgtcaggcgattccaacgacaggtgtaactaaagactgacggataaggtaaaatctacgccactgcaagggcttactgtggagcccacataaatgtccagtctgaactaacaatgtgcattccctagtctctcattccttggaggacttgttaatcaggtaattgctgatgagctagatgacgccttcacctgagacggggcccttgataaggttgtcacaggtactattctccgtgaatggccaactgcaggcagccaggggtgattcgcttaaacttcatatacttggtggagactccggacagct

SEQ ID NO: 59314 - DNA, 136 bp, Zea mays
  unsure (1)..(136): unsure at all n locations
  Clone ID: MRT4577_154090C.1
aattcccgnnacgacccactctttttttgacttttggaaataggcttgccacccgtttttgctagatgagtcgcgggacaaccttnnnacttcctccctgctgtccgttgaatttgatctggtattttttatatat

SEQ ID NO: 59315 - DNA, 260 bp, Zea mays
  Clone ID: MRT4577_154091C.1
gacacaatatgggtttcatactaactttctttttaaacttcataaacaactctgtgatgcatataacaaaaagatcctgttactcatgaacgcgaactgttgactaaccggaggctgactggaggagaatacacacatccaggcatgaaaacaaacaacttggctggatcccaagcctaaggtttaaaacacaaaaaatgtgaggtcactcatcaccaatcctctgaaccttcagatattcaatcgcaacttgccatttt

SEQ ID NO: 59316 - DNA, 513 bp, Zea mays
  Clone ID: MRT4577_154092C.1
gtagtcaatgccagcaagctccacaccctccgccctccagcactctctcggccctccaactccaagatctgaatcaagaaaaccgccggcgatgggctgcttgggccggtgctgggacaaatgcaagtggccactagcgtgcttcaccgccctcgccgccgtcatcatcatcgtcgtcatggtcgccgcctacagcttcgccatccagccatccatcaccgtcgaggacgcctcgctggccaggttcgcgctggcgaccaccccgacgacgtcgctcgggtacaacctctcgctgcggctcgtcgtccgcaaccgcaactgggcgacgaccatgaagaacacggagccgcttgaggcggcgtacaagttcgacggccagcagttcgaccgcgtgcaggtcgccgacaagggcgacaagcacggccccaggaagacccgggtgtaccgcctcgtcacgggccaagagagcggctacgtggcgctgggcaacgccggtgtcgccgcgtacaagga

SEQ ID NO: 59317 - DNA, 1228 bp, Zea mays
  unsure (1)..(1228): unsure at all n locations
  Clone ID: MRT4577_154093C.1
aaatttttcccttatatcactttcccccctattttctccctatttntcatctccagcagcggttccccctaaatactcccctataccccactacaactataaaactagtgtccaatgcgcgcttgcgcgcacggtgtttttacccttttcttccaaaaatgaatgagaattgagtctctcgcaaggaagcatcaggccaacgagattcagtggccaaaacatgatactatcattttcttttgattggccgagactgatatgcatttgcctaaaagtctcacaaattcattcctcattcttcgtgccaacattttaattgggaggatgttttgaattttggcgaatgggacttctccatcctgaatgatgccgtaggggtcaggccacgaacgatggttgcccgcgctccactgtagtaagctgctggcttggcgggtcgctggacctagcgacgacgtgcaagcttaatactgagcacgacctggagctcctcctcaacgatgtactccgcgatgctgggtggagaggccacatggaagcaggtacgtgcggacgacgacagttgcagcgtcggagactccgagttggagcggctgctgctaatgctgccgagctccacacggaagaagtgcttgagcgatgggtggggcaacacgatggaggcgtgacacagcggataggatgactcgctgctcagcgcccgcggcgaggagctaggatgctcgggtcggcgggcggcggcgcctcgacctaagcgagcgcggggccatgggcaggtctggtcaccattcagaacagggggctcagaggcgaaggcgagaggagagaagcgtatttgtttttttaaccctaccagccggtcgtctaaaaccaaaagtgctagccgcttcaagaaagtgcgaggggtaggaagcatagaaattaccagctaaacatgtgcgacggcggtgaagcgtccaaagtagatcgaacggctcctataaaaaggacgacgtggccacgctcattgggcgtcttgatgcagagctttaatatatagaaatatcaacgagtcgccgataaaaaaccaagcatgaatgtgcagtgcagtgctcgacaaacggcaccagcgccgctgggtactgtcaccgcttcggtcgccggagcccggagatgtaaatgcgctggagttttcatgctgtcgctggaggaaattgagaagaaagtttggtaaccgtatactgctcta

SEQ ID NO: 59318 - DNA, 490 bp, Zea mays
  unsure (1)..(490): unsure at all n locations
  Clone ID: MRT4577_154094C.1
ggntnnnnnnnnnnnannnnnnnnnnnnnnnnnnnnnnacacccagcgcaacagcctgatttttgaaccaaacccggtcataggaagaagaagggacgagtgcatgcctgaaacataaggtgtactcatgatccacccctacacatggctatttgggcacgcatgcaaggtgttttttttttttgacaagattccgaggagcggggactaaaacaatatcctgatgtttctgcatgcatgaagtcctctaccccctacggagggcggccgacctgggatcgggctttttttgctcctaagtggccgaaccggcaaataggtgcttggaaactaccccggacaggttgttgccgaccatgggccctacgccagtacacccattggggtctccagcgacgggagcccacgacggcgggggggaacgctcgcgccggatttattacggggcccttcttgccgcctaagacattacgttggccccccccaggag

SEQ ID NO: 59319 - DNA, 342 bp, Zea mays
  Clone ID: MRT4577_154095C.1
aaattaattagccgccctttttttattcatcgggtcatattgggggatttgggtttcggccaacaaggaagcttgccgggtaaacaacatgctcaagcaaactacaaggcggggggcactggtcccgcctgcccggggaattaagggccagaaaatgggagggccggccccaaacaattttataataatccaattctttttcgatcgggagcagacgtacccatacctacgttgaaatcaatcaatttctcctttgggggcaaaaacctgtgttgcccaagaagaagaagaaccaaaattaagaaagtcccctgggggccggatagacttttgttttttccc

SEQ ID NO: 59320 - DNA, 578 bp, Zea mays
  Clone ID: MRT4577_154096C.1
ctctccatctcgcccgccgttctcgtccttgtagatctcctcgcacctcgcccattcgcttcaccaagggtttaagaccggcggcgatggcggcgaagctggcgcagctgcgcacacaggtaacgcgtgcggcggagttcgcttcgaagcacggctgctcctactgcaaggaggtaatggagaagaacaagcagtacgtcgttcagccccccaccgtcgagaagtgccaggagctctccaagcagctcttttacacccgcctcgcaaggtgaaaccgtttgcctcttttgctgttgcgtctcgttgcgattagccaattgggttctattgcctgaagcgctgtacgatctgtttgtgcgcgcagtaatcagtaacgggtcttgttcaggtcgtttgttcgatgggtacagtgctgtgcacgtaatgtttttgtcctgtctactattgtaatcaccttgttaaacctgaacgtagtatggatgtatggtgtgatttgcttatggccagtataagtgatgaggatagccaagctgtctgtctgaatctgtgagcggattaaggctgttagcaagataatg

SEQ ID NO: 59321 - DNA, 497 bp, Zea mays
  Clone ID: MRT4577_154097C.1
cattgggtacctcgaggcggccgggacatattccacgcggtaggcgatggctgtcgtcttgcttccgctcctcaaccaagtgcgagcatcttctctcactacaccggagatgtggggctacaaccagccatgctgctcgcctgagatgactcagacctgaggcgatgaactgatatagcgtatgcctgtaggatcgcagagagctttcgatgtagaaaataacatgtggccgggcactagcactgagagaccggaaggaacgaaagagccggatatggacggatggaactggctcttctgcggtcgatcctaacacggaggagctcagctccagtctccccagcccttccagctgccgacgcccttgtccgagtgacctcaatgaggggattttgctagcgccactatatgctataggataggctgatgttacaagtattaccgaattccatagtatatgtacctgctcctatgctacattatatgagccataagga

SEQ ID NO: 59322 - DNA, 173 bp, Zea mays
  Clone ID: MRT4577_154098C.1
tgcctttataactgaccgtgcgggaggggcaaggaggcagctcatgctccagttggtctgatagctacagctgatgcagttgagccccctggcaacacatgagctggatccgtgccagacctctgtcttacacgtgcttaacatccccaccaaaattaacaatgtgtacctgc

SEQ ID NO: 59323 - DNA, 632 bp, Zea mays
  Clone ID: MRT4577_154099C.1
gcccctcctcgagtttttttttttttttttttttttttttttttttttttttttttttttttttttttttttttttttttttttttttttttttttaaagaaacccccccccttttttttttttttttacccccgtttagttaaaaaaggcccggccggcccaaaaaatttttggaaaagggggggggcccctaaaaacccaaaaaggtttttttgggaacaaactttttttttttttccccctcccggggaaaaaaacccccttggcccaaaaaaccccggggtgttacttgggaagaaaaacccccctgggcccttgggaaaaaattcctttaacccctttccaaacaaacgggggactatttggccggtttactttttttggggggggccccccccccccctaaaaaaggggggggggggggagggtttttaggccccccccccccccaaaaaaaaaaaaaaacccccccccctttttccccccgggaaaggggtttttagggcgagggggcccgttttcaccccagttggggggaaaaccccatccccggtataacggaaaaagggggtttgtttaaactttggggcccccccccggaataggggccccgggaaaccccccccctttt

SEQ ID NO: 59324 - DNA, 403 bp, Zea mays
  Clone ID: MRT4577_15409C.1
tcgaggccggccgggccgggaaatctgccttgccgatttagctcctccgacactgtgaaaccgcctatcctcatgctgattgcgtggacggcggacgactaactcgcagtcccctcagcttgactgaagctaccggagtccttgaatcagcgaacacgggatctcgatgcaccatccgagaaaatgagctacgatggccgaatgggcctgaaggatccgcaacggctgatgggccccaccgtgtccgaagctgatgatagaagatgaatggcaaaaagctgattctctgagctggatctgtagtggtgaacagattgagatgctggtgtggcaactgctgggggcgatggatctgctgctgcctcgaatgcccaggagagataaggaagacatatatcttgga

SEQ ID NO: 59325 - DNA, 287 bp, Zea mays
  Clone ID: MRT4577_1540C.1
gtgccttgcgtgttttaagttgttctagggtgaactcttgagttctcattgtctggatcatccatttccacactcaaaagatgcaacacatccaaggagaaaaagatgatccagacaatgagaactcaagagttcaccctagaacaactttttctccttggatgtgttgcatcttttgagtgtggaaatggatggtactcctcgccatgaatttgctggctactttatacattgctttgtaactctgtttgatgataaactttgttgtggcaatccccttagtgctg

SEQ ID NO: 59326 - DNA, 240 bp, Zea mays
  Clone ID: MRT4577_154100C.1
gactcgcccattcgtccgttcgcctctgtgcctctctgagctcgcactcgctccgtcgctcgtgaacgctccccgacctccgtattgtccggctcactttagcagttcagcctaggactctctgcgagtagcatagcagcagcttcttgcgaggcagaggcagagccttgtgttgcgttgcgtcttcctttcctgcttgagcttattattagttggctcgcgatggccggcggcgtggtg

SEQ ID NO: 59327 - DNA, 226 bp, Zea mays
  Clone ID: MRT4577_154101C.1
ctagttctagatcgcgagcgccgcccttttggttacgcttaacacaggcaggagcctctataggcttggcaggatctcgttcaacaacagccgcgtcattacgacagccgccaccatgagcaatcgttgctcggaatcagaccaaagccgtgagagcgacagcctaaaactagagtcctccagcgcttcgacaggtctggcgaaccacaaacacaaggatgttttt

SEQ ID NO: 59328 - DNA, 125 bp, Zea mays
  Clone ID: MRT4577_154102C.1
ggattgaatgcttaccgaacaaacccttttactgttttcaccccggttaaacacttctcagttcaggggcttaccggggtggccatttttgccgtttacttcccccgtattatccggtttttttt

SEQ ID NO: 59329 - DNA, 585 bp, Zea mays
  Clone ID: MRT4577_154103C.1
attgggacctcgagccggccgggaaaataagaaaaaaaaaaaaaaatctcgatgtcgcgtggagctctgtctctttattcagttcccggctcaccccgagccagccgcgtcgctaagcttgtctccgccgccgccgccgccggcatgactcgccgcaactcagaaaagcctgccccacgcccaggtccccgagctgctccagggaggaacccgccacagccaggacgtaaggctcctcctccaggtcctgatcgagatgatgaaggttccatgctagaacgaattgcgcccaccattgctcaaggtatggttgctggaacgggtagagccatggaacacaggggtggagatgctgaattaggtccccgtaccatctcaaaggaaactgttgcctcacaagatgctgctgctgcccctgcccctccagtgatgaatgcagatgcttgcagcatccattataaggttttccaagattgtctcaacaactatggcagcgagatcagcaattggcatatctacctagacatgctgaacgagcgccgccgttgatggagagaacgcctaagctgccgctgacattattca

SEQ ID NO: 59330 - DNA, 465 bp, Zea mays
  unsure (1)..(465): unsure at all n locations
  Clone ID: MRT4577_154104C.1
tggcttggaacctttgggctgatttatgtgcttgtttatgtgcttgtttatgtgcttgtttatgtgcttgagtccaaccgtgttatcggcggggacttcttctccgtaccgtaccgtaggctgcanccgagtagtagtaattatcgtataggacgctgcggtagatgcatgctgacgagtattctacgcgtgagactgagggttattattcgagtctcgttgttacagctggttatgatggtgttgcccgggtttagagtattgtacctttatagcctaagttagaggagacgattaatactaccaaggatcctgatgagttcgggccctcggttttgactggttctccttccggttttattaagcatacggctacttaaggtgagtttggtgtcgctacctgtgggaagaagggactcggaggtacaatcgcgaagaagattggataggtgtcggcgactggta

SEQ ID NO: 59331 - DNA, 531 bp, Zea mays
  Clone ID: MRT4577_154105C.1
cccgtttaaaaaaaaaaaaaaaaaaaaaaaaaaaaaaaaaaaaaaaaaaaaaaaaaaaaaaaaaaaaaaaaaaaaaaaaagggcaggacgataaaaaggaacaaaaaataaaaaacaaaagggggggggccgtttaaagggtttttttttaacggggggggaatggcaaggccatagtttttttatgggggccctaaaataaatttaaggggccgggttttaaaaccgtgggaaggggaaaacccttggggttccccatttaaatcgcttgggaaaaaacccctttttctccggtggggtaaaaaaaaaaaaggccccaccggacccccctcccaaaaagtgccccaccctaatggggaatgggacccccccttttaggggcccttaaaccggggggggggggggggtcccccccaggggaccctttaccttggcaaggcccctagggcccgggcttttggttttttccctttctttttgggcccctttggggggttttccctagaaattttaaaaaggggggccccttta

SEQ ID NO: 59332 - DNA, 205 bp, Zea mays
  Clone ID: MRT4577_154106C.1
gattctcctagttcagcattcattttaaattaagaaacctatacatttagctggcaacatgcttatagtctttcttaacaaatgaaccattctaaaggattttatttgtttaaatctggatttcaatgtaaaaaaatgtagaaaaacatatagatttcatttccatagcttcttatccctatattaagataataagttgttttac

SEQ ID NO: 59333 - DNA, 431 bp, Zea mays
  Clone ID: MRT4577_154107C.1
tcccggctcgacccacgcggtccggccttaacaatggttggcatggtcagtttatccattgacctgattgaccaatcgaggtgaggcgaaataaacaaatcgtataagatacaatacgaaattacaaataatcataaagcaacaacgaatttgcgtaatgcttcatcgatcctatctgcgtatatcaatacaaaccattataacagcgataccaaacgtcattaaataccttcaactgatccagctagctattattaacatctatcaacttcttataccattaactcctgacatacaaccgatttgctgtagccctcgtttacattaacgagcaacttcttcaacatacacaccttctaaaatctcttattaaactagtcatagtataccatagcatctacctacatcctcgacatcttatttcatctaat

SEQ ID NO: 59334 - DNA, 166 bp, Zea mays
  Clone ID: MRT4577_154108C.1
aggccacactgatatcattgacgacttaccaaggactgacctacacaggtgtgcaacgccacccattgatgggcggtcttatatagggtactaggaggagccatctgagctgcgttacaccagtagcaaaacctgggcaacatcatgacaaacagactgaaatggt

SEQ ID NO: 59335 - DNA, 269 bp, Zea mays
  Clone ID: MRT4577_15410C.1
gccacgcgtgcggtcagcctagcaattagctcatcgactccagattggagaactcgacaccatgaaggtgctgatcgttgcccttgctctcctggcgctcgctacgagcgcccgctccattacaagctgcggctgcagactgcagacaccaccggttcatctaccgtctgcgtgctatatgccggctccgctctatctgccgccgcagcaacatctcgcactcatgggaataccccactcaaccaccgtagataagtccgtgccagcag

SEQ ID NO: 59336 - DNA, 873 bp, Zea mays
  Clone ID: MRT4577_154110C.1
ccggccggggaaaatcaaaacaactgtgtgtgccgctgtagcagcgcgcgccaccaccgtcaacttctccccacctcgccgccgtctagatttcgtctcctgggctcgagcaaccgaagcaggcttggggtgttctcggagagaatcgttgcctcggccgatgccggccctgatgtaggtttctgctctgctttgcccggtgccaacgtctctcccggagtagcggttccgccgccccatgatctgccagttggaacacatgggcgttcacggaggaggttgctctgctggacagtgaccgcatttggtagcggtggaggaagacgacgaagaggaggaggagtaggccatgaaggaggtggccgaggaaaggtgccttgacccgcagctgtggcacgcgtgcgctggcggcatggtgcagatgccgcccgtgcgctcccgtgtctactacttcccgcagggtcacgcggagcacgcgcatggcggcggggccgcggacctcgccggggcgcgagcgctcccgtcgctcgtgctctgcagcgtcaccggggtgcgcttcctggccgatccggagaccgacgaggtcttcgccaagatccgcctggtgccggtcgcgcccggcgaggtggagttccgagagccccgtgagttcagcgtcgaccccgaggacgcccgggagaagctttcttccttcgccaagacgctgacgcagtccgacgccaacaacggtggcggcttctcggtgccgcgctactgcgccgagaccatcttccccaagctcgactaccgggccgacccgccggtgcagacggtgcttgccaagacgtgcacgggaaggtctggaagttcgcccatttaccggggcacgccgcg

SEQ ID NO: 59337 - DNA, 699 bp, Zea mays
  unsure (1)..(699): unsure at all n locations
  Clone ID: MRT4577_154111C.1
cgggacccttgctgtctacacgctcacaggtcaagaacaggtaccgcaggatgaagcgcatggaggatgttgtgatgagttcgtgagaggtctaggtcgtcgtctcccagtcaactttaggttgttggatcgttgttttcatatgatgtaattatttatttattttgtacagaactcctattatatagtaatgatgtgacattcgtttctgtaccatgattcatcatatgtgtaagacttagtcctagcacacatggtgattatctcacgctcgggtccctaaaatccgggtgtgacatatgtgcgtgttctgggcttcggacggtgtgctcggtggacacagggtttatactggtcttggtagaacgtccgtacattcagtcttcgacgactcatgctacctacacctttgttgctcgatgcttgtagtaggggttacaagcgagtgagagggggaggaaatgctcccgagtctcttatgcgagtgtggtcctaaagactacggatttggagtctcttgtgctaccaacaccttggctccgacctccaggtctttaggtttcttcgggagtgtgtggttgccttctgtcgagcgactntagtcttgggtcttcttcgtgtgtctgcgtctctctggtttgtctgggttcatgtgtctaggtcccctgggtccgtggtcgacctcctccttttataggc

SEQ ID NO: 59338 - DNA, 350 bp, Zea mays
  Clone ID: MRT4577_154112C.1
gtcgttcccaatgttgagctgtgtctggcttcttcatttttctttgcctcttctgtgtttgggttgggccccttggggggggggtgtggtgcttttcggccggccggtgccctttacgtcgggcccgggggtaccccccgaacttttccctcggcaggggatcgtgcggtcccggggggttgaaccgggagctgcttggcccccccgggggagggttaaatcgcgccggcccgatccttggggggggtgactccttcctacttgaaccggaaccacttcgtgggggcccccctgggcgccctgtgctggctcccctcccggggcttgcccctcgtggggggggcgacccg

SEQ ID NO: 59339 - DNA, 190 bp, Zea mays
  Clone ID: MRT4577_154113C.1
gcggggtcgacgtcgccgacgtcgcggacgcgatgcgggaggcgatcttccacatcgccgcgctgcagccggtggagatcgacccggaggcggtgcgtcccccgaagcggcgcaacgtgcgcatctccaaggacccgacgcgctcggcgccgccgcctacccggccttccacgcgccgtggcagtacgcg

SEQ ID NO: 59340 - DNA, 1639 bp, Zea mays
  Clone ID: MRT4577_154114C.1
cctcgaggccggccgtcgcacccggccgggactcctttcctgcctctctctctctctctctctctctctctctctcttctcttctttcctcacctccgacggctgaacaagcgaaactgcgaaaagcagcaacagcaggtaggtatagtgatcctcctcctccatggggaacgccctcaagtgcttcacgggagaagaagaaggccaccacttccacgggcgcagagaccgctacccctactaccagccgcagtcctacagtggtggcgatccacatccaccggccgctgctcatcagcagggtctagcagccccccatggcttcgtaaccttcgtccccgtcacgcaggctgctggtccaaacgccgggcaccagcagaggagcagtggggttcatgacagaagaccggtggcttctaagtatgaatccaacaccgaggacatcgacgaatcgtctgccgagggcctgtgcagcgccaagagctacgccaaggcgaacccgctgctgatccaggtgccggtgctgggaaccaccaggaagttctggcggctatccgacaaggccacaaggatcacgcgaaagctcgcgctgatcttgaggagccaccacgccgtcggcaagcacctcgccacgcccctgcaggtgtctaatgtctggatcgggagcaccggtggcagcgtcaagctaagaggcgtcagcttcaccgccaagggcttcggcatcgagcgcgtgagagacgactacaggcagctgtccaggctcctgcacgcgatcatcagaatctccggtgggggtgataccgccatcgccaggctgcctcccgactaccgcgagttcctcgcgctcctggggagggacaccctcgccatggaagacgagttcttgatcgtcaacaacgccgcgctgctgccgatgaaaaaccgcacggaggccttcctgatgctgcacgacaggatcgtgaagtacctcggccgcacggaccgacagaagaagaggaggatcctctccgggctcccctaccagagcgactggctggatacggccagggcgaacaagcggatcaaccagtgggtcatgaacgtccagcacgagtacaagggaacgcaccagtccgacatgctgcggctcaacaggaatgtgaggagccacctgcatgagcacaaggacgacgacggcatcgaggaggccctgtactgcgagtggcccgagctgctcatggccatggtgaagctgttgcaccaggaaggcgagctcgaggccactgacattgagaacaagttcggctagtccatcgtcctgccgaagaacagatgtgctaggtagctctgcactgcggtttctgaatctactgttggtgttggcacgctttcagtgagaaagtttatggtgatggcctgatcgcgggtgatatgctacctggtttatgtaatgtaatataggctccgtactttcttgaattctctggacttgaaggcaaaaggttggggtcagctttatataatgttgccttgaaactcaaagttgtaaaaaaaaaaaaaagcggccctcgagcttttgtgggggtcttgttttcgttttgatgaatggattgttcatggggcagggcccacgcaggcagaaacccgacgttggcttttt

SEQ ID NO: 59341 - DNA, 273 bp, Zea mays
  Clone ID: MRT4577_154115C.1
cccacgcgtccggcagtaataattttagaagatcgattcttaatattgatgacctattgtaatgtcttggtgcatgttaatggatggtatttctcaccgtgaccactctgcttagccggtaagaactgagccactgataaggactgaaactgctcacgtgctttgttgttagcagagtgctcatgattcaaggaagataattttccattttttctgtttggtcaacgaaacacacagaatgtgtactattgtacactgcatgctgttatttgc

SEQ ID NO: 59342 - DNA, 678 bp, Zea mays
  Clone ID: MRT4577_154116C.1
tgtccgtgagcaagaagaggggtcaccaggaaatacgaactaggctgagtggagctgtcttgaaggccaacaccccacttgaagtgcatgctagcaaaatgtacacaagaaagatgtttgagattttcgggggaatattgtacgaatccggaagctatgatgtagaagagatcataccaaaaaagaaatacgtagtaacacatgtgaaagctgaaaagcgagaaaaatggttcaaatgccgctacgaggtcaatgtctctgacaatctgggatatttctcctgcatatgcggacttttcgagcacatggggatggtttgctgtcactcgctgcaggtcatgaatgtcctccggcttaaggagattccctccaggcacatcctgaagagatggagcatacacgggagagacaatctgccagatcatcttaagcattatcaacaagacatggggccgccagacgcgccaacttatagacattctgctctgtacatcctgccctggaagtggttaaaatgggtgacagaaatctagaatcatacaaattcatgttggatggcttggtggatctgcgggagagaggagcagaaattagcacaccaaatgatggactaggcattgccgagcagcaggtttcgaagactggagttgatggtggttcgaacaagaaaacaaaatc

SEQ ID NO: 59343 - DNA, 700 bp, Zea mays
  unsure (1)..(700): unsure at all n locations
  Clone ID: MRT4577_154117C.1
atgaatatgatagccggccttttctgcttcggcttcctgtcatcatcagtgccggcctgcgtcgctctcccgcctccttatccgcacaggcagcccgcccttcatcctcagcgtcaccgtcacctcgtacggcggaggcgcctccatgcttgccgcccgcaccgtctccacggcgaacctcctgaccacggcggccacaacggccttcatctgcacatacgccatctccttaccgaggcacgccctcgggccggcgtggaacaccgggtacctcgccgcgtccaccgccacgaactcgcctccgccatcgagccaccgctcggggcggaactcgcggcagtcgtcgccccacagctgcggcatcctccccatcgcgtacgcgcagtagtccgcgaaccagccggcgcgcaccgtcgtgccatccggcagcacgtcccccgcggccgccaccctcgagttgatgggcaccggcggatacagccgcatcgcctcggtgagcgccgcgtgcaggtagtgcagccccctgagctcgtcgtagccgccttcgtcgtcgacgccatatctgtggagcgagagcgacgccacctcctcgtacacgcgccgctcgcagcgcgngttggcggcgaggagccagaagaaccatgtgagcgcggaggacgtggagtccttcccggcgagcacgaagctgacgacgatgtcc

SEQ ID NO: 59344 - DNA, 483 bp, Zea mays
  unsure (1)..(483): unsure at all n locations
  Clone ID: MRT4577_154118C.1
cattgaaaagatttctcactttttcaaaccagncttaatctgaaaaagttttcaacattgtctgaccgttcttatttttgtgaagcttattgctccctccttcattccgcgtttagggtgtcgattcacccacttgcgttcgggcttccagctccagatactcttgctaacagttctgcccgctgtaccaccgcttcggccctttcaccgtgcttgtcataatatttcacatcttccttgggccgactcctctgtgaaccgcttgcgcttacccaccgaacctgtgctcggacgctggctacatcctaattgcacggacactggtcacgcccgcccgtctgttgactctttgaaagccccgcttgtcacagtcctggacctctgggcatccctccttgttttatagggaagcatttttgatcttggcctggtccagggccttggttggtattctgtggaaaagttttccggtgaagatcccac

SEQ ID NO: 59345 - DNA, 1021 bp, Zea mays
  Clone ID: MRT4577_154119C.1
ccgcgatctagaactagggtttttttttttttttttttctataatttatatacatgttcaaataattacaaatctctctgttccaaacaatcaaacaatcaaatgaatgatatcacgatataccctatatttccctttctttgtagccatttcccacccaaaaccataaaaaaaaggaaggaaaaaaatcacaactctcaatctgggcactcctaaaaaaaatcttcagttccctgtaactccacaagtaactgtaccattctttctactctttatctgtagaagatatcagtccgtgtgctgctgcagaagaaagtgaaactgagaattctgcctcagtagcgggggcggttccacatcggacggatcgatgtgaagcatcagccgagctatgtcatccaacgatatcggtatgcttgagtcgtcgtccagcaagaacgaactgtttggagtagttattgagtcgtccgttgtcatcgttctcatctttccaatgacctcttgagatacgccttgtgcaccgtacttgtcgtcccagaacatcgttgctatgcggtatatttgagttatgctcaaaacagggcaaatctcattcgtaatttcctccaggattttgtgtgatttctgatgcaaaaccaggaacccgactgcctgcctaatgtgttgcagttcatcccaggacgtccctacatactcttcagttgtcctagagcaccactgctccaggtcttgtaaaccagcctttaagaactccccattgctaaaagagcagcagccgagacgaagcagcaagctgttgaagagttgcacattcaagtatgcaaatacttggttaaatgttttcctgattatcaccggagctacatagttttctttcatcgtttccagtgtatgatccaggcacttgacaatgttttgccaatgcagacttgatgcttgcctagctagtgaattacagtgtatgctttttagtgatccccgtgatgacctcacacggttagctcttggagcctgtatgcac

SEQ ID NO: 59346 - DNA, 373 bp, Zea mays
  unsure (1)..(373): unsure at all n locations
  Clone ID: MRT4577_15411C.1
tttttatttttcttttttctatttttattttggggtttttttttgggcaggcgggtgcattcatttgctggaaaattttttaaaaagaggnttattgaagggggcacaattccttaacttcccaaagataaggacattactcggggctccagtgactcccaaaataacaaagctatttaatacccgggagcccaaaaaggcatccccccaaataagaatatgaaccccaagatgcgcaccgacaatattgcggttattaaacagatttaatcttccaacagacggtcaatttttttaacaatgaggaagcatcacggcttcatattctcactatctttgaacctacaactcggggtaaacattttacatctgg

SEQ ID NO: 59347 - DNA, 534 bp, Zea mays
  Clone ID: MRT4577_154120C.1
tttttttttttttttttttttttttttttttttttttttttttttttttttttttttttttttttttttttttttttttttttttttttttttttttgggaaaaaattttgcggtttaagttttttttaaaaaaaaaccccgtttattttcagacagtggaaattgttttaaattttgcccaaaaaaacgtttttaacaccctggccacgtgaaggggttttttcaaaaggaaacctttgaaacccccaaaaaaaaattttttttttgaggggttaaatttgaaatggacactttttgtttttaacccgcacggggttaaaaataggattggcccaaattaattttcccccccgggttgaacactttttttgaattttggcaaaattttacaaacaaatttaacaaaatatttccatttaaaaagtttttttttggggaaaaaacgaaacccggaagtcccccccaaaagtttttggaaggcgcaaaaaaactttaaggattaaaaaaattgaaaaaacccggggagggggttt

SEQ ID NO: 59348 - DNA, 546 bp, Zea mays
  Clone ID: MRT4577_154121C.1
tttttttttttttttttttttttttttttttttttttttttttttttttttttttttttttttcctgtgtgttccggcccggtacccgggggcggcccagggggggccccggggaggcggggggagggcgggcgaaggcaggggcaggggggggggtggtgggaaattggtagtgcgaaaaaatacccaacaacaaacaaaccgggagaaacaagggaaaaacctgaggggcaaaaagagggaggcaaagaaagaaaattagggggggcgaaagggccgcaagccagggaaaaaaaccggcaggcaaaagggggaaaagaaccggcaaaaagcagggaaaagagggggggcgaatggggcaccaggggggccaaaaatgggggaaaggaaatgggcgaaagggaaagggagataccgaacgggccccaaaggaggggcccaaagggggtaacccaggttggcccaagggggaaaaaaggaggtaaaaaggggggtaacggggggacataaaaggggctaactacagggtagtaccaaccaacaccc

SEQ ID NO: 59349 - DNA, 731 bp, Zea mays
  unsure (1)..(731): unsure at all n locations
  Clone ID: MRT4577_154122C.1
atccgaaagcatgcgcataagctacacattattaaaacatctaggctagtttgcacacacaccggaagaacctcgggtacctaccaactgtgtttgaagcttgctgggaagctatcaagtaccagctgttgtcaagatcagtgggttgtatatataagtaatggacaggtcggcggaggtacttgtgcttgttagcttctttcttcagctgtttctgttcttcactggtgggcttcggcaacgcacaagaaaccctttgcttcgatgcagcatatgggtagcgtatgcgggagctgacctggtagcaatctacgctctcggtgtcctgtcacgagatgcgaatgcgatggaaaacggaacagcgtccctttgggcacctttcctcctcatccatctcggtggccaggacaccatcaccgccttctccatggaggacagcagcctgtggaagcggcatgtgctgaacttgttagttcaggtgaccctagcgctgtacgccttcttcttcttctggaagcccagcagcacgcaggttcttttccccggcgtcctgctgtttgccgctgngatcatcaagtacggagagaggacagcagccctgatgcagggggacctgagcagcagcatggtgggtgggagagctggtcacctcccgacacagcagatcagagcagcagcagcagcagaaaccagcacccgatctcgcgaacatctgtgctgacgcgttgcgt

SEQ ID NO: 59350 - DNA, 452 bp, Zea mays
  Clone ID: MRT4577_154123C.1
ccccaaaacccattatttgcacaggctacattttaaccaaccaaagggcacgccgaaacaccaaatttttcggggaaactggccaaagttcaaaagctaaaatgtacaaaaatttttcaagaaaagggctcggcgagctgcttgataatgaaaaaaaaaaaaacccctatgttttgctgaccgaaccaacaactggtgacaatggctgacaaacttccaaaaatgtttgtgctgaaggaaaaaaaaaaagactcattctggcagctcccttggggggaacttctggctctttactggctgaaaaacccctaaaaggataaaaaaactgggggctaaaaaaccaagggggggagttggtaaaggggaaacaattttttggagcgtttggtttggcctaaaaggaacttgaactttgggagtcaaaaatgcaggatttggggccaaaggggcgg

SEQ ID NO: 59351 - DNA, 449 bp, Zea mays
  Clone ID: MRT4577_154124C.1
gcatgactcccagccgccatgggcgcgggatactctagtttaaggcagcatttgaatggaagcagctgacttctgacaacagtcctttgtcttgaggcggtgagtatcttctgtgtttattatgccaggatttcactgctgactatagattcttcccagactgaggggctgaagatcgatcatgtttcaaagagttctttgaactgggctgtaggctagagcagagatgttttctttttctgatcataaatacttcaggttcacaaactacttcttcataatgccaaaactggaatgttctgtagtggggacattatagcagcatacacaaatgctaggatggaaacattagtgctggagatgtttgacagagtgatttgcactacaaatgtaaaacaaaacacaggctttgacaagaacaaaggattataaaaacatgcctaaaaatc

SEQ ID NO: 59352 - DNA, 257 bp, Zea mays
  Clone ID: MRT4577_154125C.1
cgtgcgactgtactgatgcgacatgccttgttatagactttattactgttagacgattcaccaaatcatgataacggtggctatcaatcctgcgtggagcatactgaatgctcatacttagacagggcttctaaaccacatagggcaagggaaaatctcaaggatatccaataactcggcaatatattactttgtgtcaccctatcaggttctgatcctgcgttgtcactataaggattacaatctgcatccctaat

SEQ ID NO: 59353 - DNA, 686 bp, Zea mays
  Clone ID: MRT4577_154126C.1
ctgcaacctcgcccgatcatcttcctcgttccgccgctccctcgcctccggcagcgaggtgaggccaccgatcggaccttccctagcggcggcgcctaccaacctcaaggagcgatggctctgtctgcgacgctacggatttctcttagcgtcgcgttctttggggttctggcgttcgtgcttggtgtcatcgccgaaaacaaaaaggcttgtctcagccctggctcttgcaatgtcgttgtgggcaactgtcactgagggacttcaccgcagcaagaacatccaccacgacatggactaccagtgccctactgccaagaccggcctgttcggcggcgccgctttcctcgcccttgacgctgctctcttctggcttgtttgccagatgctggccctcaatgcaagggctgactaccttgacgaggatgacggcaagggagaatatggccagatttatgctgctcaagtcgatgatggctcgaaggtctgagcctatgtggtcatgctcggcagggttctatgattagtgtcatttggctacattatgccatcaacaaagtcgctttagctctcagtaaatttgtatataagttgcaaagtcttacataaggctggtggttattctgcactttcgtgtttcagtgtgatcaataaacagtatctcagtacaatcggtttgctatgct

SEQ ID NO: 59354 - DNA, 123 bp, Zea mays
  unsure (1)..(123): unsure at all n locations
  Clone ID: MRT4577_154127C.1
cgacagngactccaactgaactaccttcccccagctctactacaaatcggagctgattgggggatgcgataccgntcctgacacaggaaacancggagcatgctgacaacgccaagaccttgc

SEQ ID NO: 59355 - DNA, 1299 bp, Zea mays
  unsure (1)..(1299): unsure at all n locations
  Clone ID: MRT4577_154128C.1
ccgcccgatcaatcttcctcgttccgccgctccctcgcctccggcagcgaggtgaggccaccgatcggaccttccctagcggcggcgcctaccaacctcaaggagcgatggctctgtctgcgacgctacggatttctcttagcgtcgcgttctttggggttctggcgttcgtgcttantttcgtgggggggggcgggaagccatctctaanggctcccccaccccacatggggggcatttaaagtgtcaaacccctccaaggctccaacagcccaccccaccccacaccccacatggggggagagaggaaactcccctcatatatgggcctgcttccgggactcctatcctaggagaggatgtcgtcatctgcacgtttccaagtgatccgactcttgcgatggggagcctgtccattgtggcacttgtggtagctgccatcgtaggccatgttgccatcttctttccatactcgggcaagtcagttcctcgtggagcgctgtttcaaagcaccagcttgacagtgttctttgttgttgctgagcttgtctcagccctggctcttgcaatgtcgctgtgggcaactgtcaccgagggtttttaccgcagcaagaacatccaccacgacatggactaccagtgccctactgccaagaccggcctgttcggcggcgccgctttcctcgcccttgacgctgctcttttttggcttgtttgccagatgctggccctcaatgcaagggctgattccccttcacaaggatgacgccaagggaaaatatggccagatttatgctgctcaagtcaataatggctcaaaggtctgagcctatgtggtcatgctcggcagggttctataattagtgtcatttggctacattatgccatcaacaaagtcgctttagctcccagtaaatttgtatataagttgcaaagtcttacataaggctggtggttattctgccctttcgtgtttcagtgtgatcaataaccagtatctcagtccaatcggtttgctggctcaaaggtctgagcctatgtggtcatgctcggcagggttctatgattagtgtcatttggctacattatgccatcaacaaagtcgctttagctctcagtaaatttgtatataagttgcaaagtcttacataaggctggtggttattgcactttcgtgtttcagtgtgatcgataaacagtatctcagtacaatcggtttgctatgccccttggcgaacttgtccttgagttttttggggtctgaatggccctataatataatatactccctctgttccc

SEQ ID NO: 59356 - DNA, 488 bp, Zea mays
  Clone ID: MRT4577_154129C.1
tccgccatttcgtcgactggttcgtcaggtactacaaggttttacatcaggggcgggaatgtcctcgccggcaagaccgccaagaggaaatccatggccatgtcctcagcatcgtgaggagccgccgccgctgcgtgtgcccaagccccgccgtccaccaccaagtgtgcattcgattgtccttggaggagtgtcctgtaacttcgcgagacgcgaggtgcttattgtttaagccttgctgcttttgcttcttcatgatgctaccatactactaccatagcagtgcttagtgccatggaaaaggatccatagataaactaagcttaactgcttgagaaaaagaaaaaggtagagaaaaaaaaagatgtgggtatagatacacagcagagcaaagcaaaggagccatgtctgaacgaagacgtggtcactgccgtccttatgattcagaccattctgctcaaaatattaatgttttttttgggtcagat

SEQ ID NO: 59357 - DNA, 812 bp, Zea mays
  unsure (1)..(812): unsure at all n locations
  Clone ID: MRT4577_15412C.1
gagtagagctgacgagccacgggtagcatgcgccgcggcctgcgtcgcgggttgggcatcctcctcgtcccgctcccgcacgcacccagccgcccgccgccgatctctcgcgcggctctcctcctccgacgcctcaatggcttctcccgccactccttctgcagcttccccgtcggggagcgcgccgtcgagcagttctcagacgacgaatacgaccacgagtacgaggacctccggccgtcgtcatcggtggcgaacatcgacgagtggaggtggaagctgagcatgctgcagcgcaacgcggaggagcaggagatcatctccagggaccggagggaccgccgggattatgaccagatagccaacctcgccaagaggatgggactctacagtgagatgtacggacgggtcgtggttgcgagcaaggtaccactgccgaactacaggcctgatctggatgacaagcggccgcaaagagaggtggtaatcccgctgggtttgcagaggagagtcgaaggacttgtgcaggagcacctagaccgcgcactcttaccactgaataaatgtggtgacaacacaaaaaatggctctgacatgactgagaatgcgaacctggatgagcagcatgattcccttcttgatcggtcagtcatggagaagatacttcagaggaagagcattcggatgcggaattttcagagaagttggcagctctcataatcagatatgaagatgggtaatttcattgtacttctaacacaggaatcacccgaaggtgctaagatgctagaattccgnagatcccttccagc

SEQ ID NO: 59358 - DNA, 266 bp, Zea mays
  Clone ID: MRT4577_154130C.1
gtccggatccccgggtctggttaggcatggctactgcagatgcaaaaagagaaagggctggttggcgatgggaaacttaccgttctatgggacgcttgcggaccacccgaagcttcccaaggggtaaaccgctgggtgatcccaacctggactgcatgggtgaagggcaaaccctgccagtacaactggatccatgacgctcaaactggtgggaggtactcgctaaaggagattggacgctcctgagaaatggagactagatgaac

SEQ ID NO: 59359 - DNA, 788 bp, Zea mays
  Clone ID: MRT4577_154131C.1
cctcgaggccggccgggcttcttctgacccgcgccgtttctgtgcttttactctgctaccttgtgacaatggtgagggttagtgtgttgaatgatgctcttaagagcatgtacaatgctgagaaacgggggaagcgccaggtcatgattaggccatcctcaaaagtgattataaaattccttttggtgatgcaaaagcatgggtacattggagagtttgagtacgttgatgatcacagagctggaaaaattgttgttgaattgaatggtagactgaacaaatgtggggttattagtccgcgttttgatgttggtgtcaaagagattgaaggttggactgctaggctgctcccctcaagacagtttgggtatattgtgttgactacctcagctggcatcatggatcatgaagaagctaggagaaagaatgttggtgggaaagtgctgggtttcttttactagtttaattagtttcctttgaagattttgctctgatttcagttcttgaaactcaccggttgtaatgattaatgtgttagacccgtagtttatcaagtatagcattagcaggagatgtttttctggtgtgctttgttttgtttgctaaaccaaattggtcgccataatttcaacggatttcttcatcgtggcagtattagctatggttgaatcagtcttgctattatggttgaataagtctaagtgggagataactcattccataaactatcattccataaactaacttatgggttgagttagatcaagtttaaattttaagataatatt

SEQ ID NO: 59360 - DNA, 413 bp, Zea mays
  Clone ID: MRT4577_154132C.1
ttgtggggggggggagtaaaatgtcaatcaatatattgattatttctaggaaacacatgccggtatgagggcaccattatcgattacatctcatatgtaatctaaagcaggcacctccaacgatgggttgctgccacgacaaggcatggtggggcgagagagaactggctgtatggtagcaattgttgctgctgtaagaaggcagtgaccaatgggttaggcactgctagtggattaagtaactgttgtcgcgtgttgtgggtacgccgcagcgttcgacacagtcattttgttgaatggaatcagccgttgcaagtcggccgcacggtttgccacagttggctgagtgagacctggtgcaatctggtgcagcacattgttagcgcaggtgttccggtgctttccccgctacg

SEQ ID NO: 59361 - DNA, 593 bp, Zea mays
  Clone ID: MRT4577_154133C.1
ccggccgggaagaattttaacaggcttcctgtcctcttcctctgttgacatctccctccccaccccgcgatccttcccatcaccgcgcgcctcacgcctcaactctacgccacaagcgagagtatggacccccccccgaatcttgctgatgcgatgaacttgatgacaactatccactccaggatgaagaatacccaggctcaagaggaactcgtgaatgaccacaaccgagctcatcatgagcaacgacaaagcaagccgctcacgtttgagacgatcctctgcactgctgctgaccaccacagatatgctaagatgctgaattgactctgaatggagtcctgcgatcacccgtatgcagttccaggcgatcataaccctggtatgagtgttcaaacattgtaatgaactgaatcacacctgacttgaatgaatattggagactccgcctataacatcgccaatgactactgagaaaaatctgaagaacatagcacatcgaactacaatttctagtcccactagaggtgtgaaatggctcactgatactcttcatttgcatatgtgcttactgtgatgcattggcatccgct

SEQ ID NO: 59362 - DNA, 372 bp, Zea mays
  Clone ID: MRT4577_154134C.1
aatggccacaaaaaactttcctgccaaaagaacatttaacatggggggcctaaaccttgcacaggggtgtaaacagggtatttaacttccggaaaacaggaaagggggtttatccattacaatatacttttcgattaatcaccgatcggaatggaaaaaaaaaagatgatgtttttttagagtttttaaagcaccggggggcgggagagcgtacattgaacccctgcctcctccattttcccacacggttttgtgggttttttccccccttgccggtttgcaatcagggtggcaccgactccaaggcccatgacaacggcaacgttccggatgaccaaaagacccctaaacttttcaaaggacgacgggggg

SEQ ID NO: 59363 - DNA, 895 bp, Zea mays
  Clone ID: MRT4577_154135C.1
acgtgcaccctcaattacttagttttgcttggatcacagttgtaggatgtgttaacatgtgatccaaaaaatttaatctattgcctggaagctcttgtcaagttcataagcttacaccatttgcctaggttagctgaactctcagtacttggttatctgacatctgtcccctttggagacagtctcctgggaattcagttactgtttggctatctctggtcttgacaaagggcatttagatttaaattaatttgccagtgcgaattggtccaacagtctgcgggcaattatcttgatgtttgccatgtaagactggaagtgacgctttaacttttggtcaatatagtcactgttttctgaatcatggtaagctaatacacatacaattcaaaacttccacatgcctgcatttgcaaactgcttatcaaaagttccattcatttaaaacgttgacctgttaattctttctgaagtttgttgttgaagtacaacatggtatttcgattgacattccaatctattgttagtgcttggaccaaatagttctgcattattcttgcgatgcttgtgccgttgataaaaaggagaacaaatgccgttgataaaaaggagaacaaactgttcctccaggttctgcttgcattttctccatcaaagaatatcaaaacatttgctgttgtattcccaggtattggtggaagcatgtttaaccaatccgcagacgcgaagagtccatctacctctgataatagaaatcaaaacgacatgcttcctccgaccaaagcggccgagaagccactaaacggtactgcgacagagcagcagcctcgcctacggacgcttgggtccctcacgacacggacgggcagcaccagtgacatcagaaagctcatga

SEQ ID NO: 59364 - DNA, 313 bp, Zea mays
  Clone ID: MRT4577_154136C.1
acccgtccagcggtggacgttctcgaccagaatctcctgaacgccacatcttatggttcgacgcacactgtgaacgcggggaagggtgactcctttgataggataacggacatcactggcccatgggttctcaacttatgttaatgaagcgccttcggaactgttttccttaattcccttgtccctagccaattccctcccctcggcgggctaagttgactgcacgcacagagagctctggttcaccttctctttccccgtgcgccagacgtccatcgcgtcaggcacgctcatcaagtggaccaaggcgttt

SEQ ID NO: 59365 - DNA, 312 bp, Zea mays
  unsure (1)..(312): unsure at all n locations
  Clone ID: MRT4577_154137C.1
gcaggtaccggtccggaattaattcccgggtcgacgagctcactagtcggcggccgcccttttttttttttttttttttttnggggatagaactctgaactctagtacttgtactagcaacggcaccactcactaagcactgcactactagtgatcaacaacacccagcaacaacttgcagagtgtccacccacccacacccacacccacattacatcgacacactcctctagctcagagcgactggcctaataattaacacaagcattattactggcccgcctgacacgaccagaaaaaaaaaaacaaacg

SEQ ID NO: 59366 - DNA, 318 bp, Zea mays
  Clone ID: MRT4577_154138C.1
cccacgcgttcgcggacgcgtgggggttgttcacttggtattttgtagattaatctggggaagctttggtctatgttgtgcatgtgtaagaaaatgtatttgtatggattgaagttcgtggcgaaagaaaaagaagtagaaaaggactcgaacgtttttatatttcgataggaatatatgcgatgtattgtttgatgtgtgcgatttgtagtttgtataattatattttggttgatgtggtgttaaaaaaaaattttatttttttttttattttttaaattttataataaagggttgcctttttttaggatccaatct

SEQ ID NO: 59367 - DNA, 515 bp, Zea mays
  Clone ID: MRT4577_154139C.1
ggcttggaacctttgggctgatttatgtgcctgagatatttaccggaaactcgcaccctcaacccgccgggggacatcaggtgcacgaatcaggactcacgtagcgggaatcacactagatagccacctaaaaacgcattcgaatattaacagcatgccggagaatgccgtcctgattaggaccatcactcctgactcgaaatctcgacaagtagaaccgaagataaatgactgggcatccggggaacacggaacccacccatcgacggcccattcagcatccgttcattagttaggtgttttacgggatgatggtaaagacatagctctgggcaccaggacggtaaaggtagtgacagacaaacctcatcttaagcacacgccgggactatgcaagtcggcgtccgatttatacctaatgactcccggtaaaaggacgtccgctaaaagcgtgactacgcgtcaccttaacaatatacgacagactagcttctgaggaaggctcataggggttt

SEQ ID NO: 59368 - DNA, 434 bp, Zea mays
  unsure (1)..(434): unsure at all n locations
  Clone ID: MRT4577_15413C.1
ccggtttgaccccgcgtccttcgnaccccaaaccgttccgttccaatgcgccggggggggcagcaaagggagaggtggaggaaatctatggcggcggccggcggcgngaaccgcggcgctggcgcgggcgggggcgtgttcttcctgcgctgctgctcgcgtctttttttcttttccccnccctctttgggggggggggggggccnccttcccctctngcgncgttgcgcccgcngtcgcgggccctcggctccgcgcttctccgggtgtgcgctcccctcgtttttttcttgggcggggctgcgcgggggtgtgtgcgggctctccgcgccccggccgtcgggctctcgctggttgcccgcggcgctgtggccctgggtgttgtggcctctcttcctgtgggtgggggtggccgcgctgcctgggctctgccg

SEQ ID NO: 59369 - DNA, 388 bp, Zea mays
  Clone ID: MRT4577_154140C.1
ggcggctgaattactttactgcaagagggatcttggttgaggtcgagatctatgtgcaggtaatccttacatagaccaaggaggtggtcctgtagatggaattgacggtcgttctgaccgtgaaggtgaggatggtccaggtataagaagtagtccatcgggaataggagaggaaatagaaagtctggaaggacaacgaggtgatcgtggggaggagtttcacggttcacaaggaaacgcagttctcaggtcttatgatattgctccggacttcgactaggagggttagggcggtgcctcagaacgtgaccaggagcgtggaggttgaagaggaggtgcgtatgacgcaccttgaggagtcggtccccacgaaacaaacgcgttctac

SEQ ID NO: 59370 - DNA, 228 bp, Zea mays
  Clone ID: MRT4577_154141C.1
acgccgcgaatcacagacgcgtctatgtcagcttgctgcgctgtactaccctgccctgggatcatatggcacgtgagcccggacgagcgagagcgagggagaggcatggctgctccgaagctcgcgacgctggcgctggccgtgctcctggcggagaccgtgttggctcccccagcacgcggagcgcgcggccatgtcgtgttccaccgcgtacagcacgctgatgcc

SEQ ID NO: 59371 - DNA, 454 bp, Zea mays
  Clone ID: MRT4577_154142C.1
ttaccggctggacccacgcgtatcgatggatccatgtaacaactcgacttgttctatcctcccgacacacactgggatatgccggatatgaaacccaactgtgtatcacctaattcatatatcaaactatggatttaggagccctgttacttcagatggcaacactaacgatgatcttactactaccaactgatgacactcttgtggaccatatcaacgaagggttttaaagtggcaaagatcttgatgggactgtacaatctactattgttgaagatcaaatatgcgcgctgaacgatgttggccacaagtaacttccctgtcttggaatactgcatctgaaaacctaaatcgaacaaataagtgtatcaatgattgctacagagacatacatatggcttgagctgcctgttgctatgtcaaacacaagtgcaaggatcgctgggtgttgcac

SEQ ID NO: 59372 - DNA, 287 bp, Zea mays
  Clone ID: MRT4577_154143C.1
gggaacgaaaccccgggaacttttattaatgggtaaagctttttacaaagggcccccatacatacaaaaccatacaggcatacggggggacatacattgggggggaatggaacaacaaaagattgggggaccccccaaaaaataggtaaagggggcaaacccccaaagggccccccgtttttaaaagctcccagggggcttttttccaacccaaaaaaagtttccaaacttgatgatccccgtaagggaaaatgaccacacttatggggggggcccgcctttcctcc

SEQ ID NO: 59373 - DNA, 293 bp, Zea mays
  Clone ID: MRT4577_154144C.1
gaacaagaatgttattccgttttgccagagcagacagatgagaaaacaaaaggctagcaacaatccttggaaaactcgtgataatccctttactttcttgcggttactatgctacaaaacatcaagtagcgtccaccatacttatgaagcctcttctaccaaagaggaggagaggaggacacaaagtttcccccacccacccatgtttatacacaaacacacccacccttatttgtcgagatttcttattttttagtgatgcaatgattatctgacaaagagcgccggttcct

SEQ ID NO: 59374 - DNA, 775 bp, Zea mays
  Clone ID: MRT4577_154145C.1
gtatccgcactttgattatgtttaagacttaagttaatgactctgtggatgtctttggcatcttgatataataaagtacctatttctgctattattttgagcaatgtgtgatgatgtccaactatgtaatcgttgtgcacatgaatttctgatcctggcatgtacatagttcgcatttggtttgccttccaaaactgggtgttacataagtggtatcaaagccttgctgactatagaaccgctaacctagaccagaatggtcgctttaaggattatagacccttattctcaccttgacctttggtgtcacttcaaaagttggtcatctcgaccaattctatgtatactactatatacactcatcttacaattttttatcttactttacttgtggtttacttgctggtcatataattctgttctcactcttgtgcttatgacatcttttgtagatggcccatcttagatgcactgcacggtcggtgatccctttcttgccctctcgccttgtggagcgtccactgtgctgcacggtgataggacagtcgagtcacctagagagatcgcacctccgcctgcacgaggagcaggaacaccgacgccaggaacgggagcagcaggactcttccccctcgcctcagcaagaggtggagtctgggaggcagccctcccctatgccttagctagatgtgccccctgcaccaccacagggcaccccagctgctggaggagaccctaacagagacgaggacgacggtggcagtttgagccacat

SEQ ID NO: 59375 - DNA, 1652 bp, Zea mays
  Clone ID: MRT4577_154146C.1
gatcactcccacgatcccactctccccgctcacctcaaggagtcaaggtgcaaacctaagcttagctcattgctcaagcttccgtctctttctctctgcgagactgcacactgccaccacgcgcaatggcggcattccaccatttgttgccggccttgctccttctactcctgctcccttccacccctgaggcgacgtcctcggcgctgcttggcatcagctacggccgcgttggcaacaacctccctgcagctacatcagtgccgcagattgtggcttccctgggcgtcggccgcgtccgactctacgatgctgacagcaccaccattcgcgccttcgccaacacgggcgtcgagctcgtcgtcggcgtccctgacgagtgcctcgccactgtctccaacccgacgggcgccgcctcctgggtccgctccaacatttcccctgcgctcccggccacaaagatcgccttcctcacagtcggcaacgaggtgctcaccggcgtcaacagctcctcgctgtccaggtacctccttccggcgatgcagtgcctccacgacgcgcttgcgcaggccggcctggacaagcaggtcgccgtgaccacggcgcacaacctcggcgtgctggccacgtcgtacccgccgtcgtcggcgtacttccgcaaggacctcctcccgatgctctgccccattctcgacttccacgcgcgcgcgggctcgccgttccttgttaatgcgtacccctacttcgcctacgccgaggaacccaccggcgtggagctcgagtacgcgctgctggaacccggccatgccggtgtcgccgacccggggaccgggctgcactacaccaacatgctcgcagcgcaggtggatgcggtgtaccacgccatcgccgcagccaacagcgcggcggcgcgggccgtggaggtgcgcgtgtctgagaccgggtggccgtcggcgggggacgccaacgagaccggcgccacgccgcagaacgcggcgaggtacaacggcaacgtgatgcggctcgtggcccaggggaagggcacgccgctgcggccggcggcgccgctgcgcgtctacatgttcgcgctcttcaacgagaacatgaagcccgggccaacgtcggagcgcaactacgggctcttcaagcccgacggaacgccggcgtacgagctttcctaccgcctcccgctggacaacaccacctcctcctcttccgccggtggcagcattaccggcggtggtgggtacaatggccacggctacgggtcgtcggacaacggcggatactacagcatctcggccgccgccaaggtgacaccgggttggtggacatggccacaggtagctgtggcaccatgtgtggctgtactggccatggcattgtgaccattagcagagatcaagtggtgcctgcctggacttggtggatggaagcctctggcttctgatggagtcagaagcagcgtatggtgtgggtcagtgaactgctgttctagagaaacgcattgctcgtggtgatccacttcctctctctctatgttgtttcccttttctccacgttgttgtaactgaggtgtccttgtaatcagtggtgaacaaatggactagacaattgtcattaatgattagacagcccatattttttgttct

SEQ ID NO: 59376 - DNA, 719 bp, Zea mays
  Clone ID: MRT4577_154147C.1
cgtaaagatttcacacaaaaactattggatcttttccccttttgttgtgctcatctcatgtggttctgtgactgctgagagataggtgggcgaggcagccatggagttgatggtcggaggcagatctgcttggatgcaagtggagagggggctggcgcgccgcacgcggcacctacctccagcagcggcgccagcgccggcggcttcttgtagatctggaagcgccaatattttcttctctagccgtttagcaatcatcatatataggaatgtggacgtgctccatgtacctcttcccctactaatcaagcaaggtagcaagaatatgtactgcttgggaccatgagatgctagagcctgacatgctagagccctcatcctccatgtttgatgtggttatcatctgattcaagtaaccttgtcacttgggcaggtgtcatctaaagaaagaaaaagagaggttcttggaagccaaatccagagttgatgctgacttcagaagaaaggggtaccttgtattagtggattcatacacgaaggtcactaaaatggaatggtttttccacatagatagagcacaaaataattgatctcgatctagatgaagttaattttgtgtacaagttatttttcatgcatggattaatgatcaacacgcgtacttattttcctaaaaaaaaaaaaaaataatattaacatgcgtaaaaaaaaaaaaaaaa

SEQ ID NO: 59377 - DNA, 176 bp, Zea mays
  Clone ID: MRT4577_154148C.1
aaggtctccccctccttttcgttcgcattgacagacatgtggtcatacattgggtccatatagtacgctccattgtgatagcagcctctgcatccactatcattccaacctgcgtcttcaattaagtggactaaggcatgctgaggagggatcatatgtagatgctggtggcgatg

SEQ ID NO: 59378 - DNA, 242 bp, Zea mays
  Clone ID: MRT4577_154149C.1
ctcccgctcattgctcaacaccatcacgcaggtccacctcagccctcacctcccgccatccgaagcactaacgcccaagcagggcgtcaggcccaaaaccatactgtacccacccatccagcatcacccaagcgacatagccgacaaacactactacaacatccccatcccccggagccacctaccgctcaaaagcttcaacagccaaagagtggacgaacgcggcgcccccatgccgcacc

SEQ ID NO: 59379 - DNA, 322 bp, Zea mays
  Clone ID: MRT4577_15414C.1
gggacaacaaacgggttgcgaacttaatttaaaagaagcgggttttgttttttttgtccaaccaaaccacacataacaggtttttccaacaagataaattcatgactcaggtcccagtaattcaaacaaacattctgttttatttcaacaaaaatttgcgattttagcaggtgggggcaaaactaattgggccttggggtcccccactccactcgggggataagggtgtcataaccatacccgttgagcttgttgatggccttctcggcgtcctttttgtgaacaaagttgaaaaacccaaaccccttgtttgacccaattt

SEQ ID NO: 59380 - DNA, 1191 bp, Zea mays
  Clone ID: MRT4577_154150C.1
gggttcgtcttcctctgaatttttcgtggtgccgctgctctgctcagcctccagctcccgcgccggcccgagcttcctccagctagcccctgcgctcgccatggcagccgctggtttcggctccttgcgcgccatggccgccttgcccgtcccctagcactcgattcctccaccagacatccctcctcttcaacctcgttgtaccactgcttggagtttgcgcagctccctccctgtgtggtgctccagccgagctcgccccggtctcttgcttctatggtggatgagctttcctgctggcgcgcgtgtgaagccccctggccgcgtctccctcttcctccctctgcatcctccatgcccgagtccggaatcctagtcgcgccttccctgccctctgctcgatgttccttggcgcgcctgctccagcgtcgcgcgaccctgctcggcttccctctgtgcatgcgcgcagagcatcgccagccgccgtgctgcttgccgatccatggtcgttgctcgccagaccttgtcccatggtgctgtgcgcgtgccgccgggtggtcatccgcctcgtctctgtccacggggttcactcgcacggagctctgcggcctcgccttctctgtccttgtcacagctcctctgtcgcggctgaacttagtttcctccgtgccaccaaccgtcgacctcgtcgttaagcacgaacgctttactttctcgccactgcatcgccatttgttatcgaagaaaaagattctcggacgttttggtggaaaggaaaagaaagctcatgtatcgctcgcaaggtgctcgaagtaatggcgaaatcagaaatcatgattgtgttcacggccttcaagacagattaaattattggtttaaattattggtgagctgccgtcgctctcgttttttgttttaatatttctcgttagtttagtatacttgcgctgttaatgtgagccggtgacgtggccgtaaatcgcagtagtgagttagtgccagaataaaatttgatcgggtagaatagtgaagtctagtacgtcgctcgtcatgtatttggtgttatgcgtggaccgggaagcgtcgtcgatttcgtgggttcaagtaggattttattatggtaagctaattcgccactaccaatatttggtttaatggatggagtgataggtatgtatgtcgcgacgatta

SEQ ID NO: 59381 - DNA, 415 bp, Zea mays
  Clone ID: MRT4577_154151C.1
caaaatccagaggtacttttgaatgattgcgggtcttcaaatctactcgaagattggtgccccatgtattatagggaatagctgcatggggtggggccctttatattttggggcccagggcgagcgtcctgttagccctgtatatagcgccggccctgaacgcaatgcagcaacctttgcctacatacactgtcgaacagctatatttacactgacaattatatgatacatctgtcagtcgtcgtgcaactcccaggctcccagcatgatggatcgtcgtcgtgcgccatgcactgatgcactctcgatcactatacttccagttccagcctaccagtacttggtgcgtagcgcagtaccatcgtcgatcatcagagcccatacgcagtgctgaatacctccgggtgacgttccg

SEQ ID NO: 59382 - DNA, 274 bp, Zea mays
  Clone ID: MRT4577_154152C.1
gtggaccagcggtatctcagccctggatggtgaatttcagtcagcctcagaggttgacttctacattgataaggacatgatccacatcgcggacaccaaggtcgccaggcgttatggggatttcttcatccgtcagatccacaaatttgaagagcttaatcgaaccctgaagaagatgggacagagaccttgatgatattcacacacattcaggaacctgttttgatgtattataggcaggaagtgtttttgctaccgtgaaacctttacctag

SEQ ID NO: 59383 - DNA, 295 bp, Zea mays
  Clone ID: MRT4577_154153C.1
tcttcaccttaattataacattttctaggacggcaagcaaacagcagccgtctgttgaagtattcagacctcctgccacatcttcatctctttttttcttttttaccattccatcctctcctaggatgatctcctcgtcatcatcctcttcttccatgactgttactatacctacattcatatgtattacattctatcatcattatctcataccatatataactttactgtcatctaccttttttacatcacatatttcccttatttcaacactatttattatctttactaccct

SEQ ID NO: 59384 - DNA, 261 bp, Zea mays
  unsure (1)..(261): unsure at all n locations
  Clone ID: MRT4577_154154C.1
gctaatttgtcagtctgacgctgctgggtgacaggtgggtaattatgctctgctttgagctgnnttgnatggctgctgtcgccgccatacatgtatcatcttcttgtggttgtatggtacctaaccgcgtaaacatgttaaccttaggccatgtattaattactccgctctaatgtttgtatgtgtattgtcaaacttgcaaaaaaaaaaaaaaaaaaaaaaaaaaaaaaaaaaaaaaataaaaagacaaataaaaactat

SEQ ID NO: 59385 - DNA, 451 bp, Zea mays
  Clone ID: MRT4577_154155C.1
agttgggccaaatactatgccgtgtcaactgatggtgggcttctttgcttatgctaaatcatgggagatgaacgtggacaagcaggagcttgaaggtgatttttgagacttcattaggaatccaaggctgtttctttcttttgacttggattccattaacttctcttcctgttcctacataattgtttggtcttgctattattattttcttcctctactacgacatagtgtgctgatgttatgtatgcgtctattgcaatcctttggcaacactcttaagcttttatctgagctggttgatgcatgaaacttgatattttacaaaaagattatgtgcaggttatacaccctgaaaatggggcttactttgctgaccctttttagagcatggatggccacaaagcttcaacttggatctcaaatgccatttcttttgtatgcatgcagatgc

SEQ ID NO: 59386 - DNA, 725 bp, Zea mays
  unsure (1)..(725): unsure at all n locations
  Clone ID: MRT4577_154156C.1
aattgaagaatgaatttaagtaattacatataaatactttttcactagtgtacatacatggctcattatatctggcaatctaaatattgccaaaacaaaaaaatgtgtctcggattggccctaactacaacgtctgctcaaagacggaagatgacatcaaaatgtggttacaagccctatgcctacttcttctgcgagttcgtcccatacaggcaggagtgtcaaaaccaccaggattagtgcaatccctacaagggccttcctccacgttccaacctcggtcacgtcgtttagacacggtttttcaggtgttctctggcagattaatacgtagagtccccaaggaagtgccaaagggccaccgagcactctgagtccaagcattacataggttgacaaaccaaatgtaaccaatgcatttttcccgaatgctccctgtacagctcttcctccatccaaacatcccactggaagcatattaaatgctgttgttgttaaaccacaccatccagcaattacaagtgggtggattgaaactgttgcagcatgcaaagctgcatatcccagagttgctctgctgatgagtccaagaagtaatgaaccttgaaataacatgctgggaacctggaccaggtcgttagctgcatctggntctgtagataggaacagaccaacagcaaacatggaaactgagagtgcagctccagcaaatggaccagctagcg

SEQ ID NO: 59387 - DNA, 478 bp, Zea mays
  Clone ID: MRT4577_154157C.1
cctcgagccggccgggaacattgcttccatttcacaggtgcacaaaggagctaggaggagggaagaaagaatggctcaagcgtcgagctctttctctattgttctgttgttcctcgcactagtacttgtggttgaggtttctgctggaaccgcaaatgaagagctttacagacctgctggtgcagaaggctctgtccccatagaacaatgtccagagaaatgtgactaccggtgctctgctacatcgtacaagaagccatgccttttcttctgcaactactgctgcaacaagtgcttgtgcgtcccgtccggcacatacggcaacaaggaagagtgcccgtgctacgacaacatgaagaccaagcaaggcggccccaaatgcccgtaaaatgaatattagaggcctggatcattcaaaaagacaactaaaaatgaaaccatgtactccctccgttcccatataaaattcgttttggct

SEQ ID NO: 59388 - DNA, 223 bp, Zea mays
  Clone ID: MRT4577_154158C.1
acggctaaggggaaatggcgcctcgagacgacatataatttacacagaccacaccgaagatctcacccgcccaataagaaaagttccaatagtgactctagatgaacatgctctacaaaccatttggcagatgacccacattcgataggcaactgttgaggttatgcgtcaattcataaggttctgcttatgagctcatcacatgggaacccctttttggaga

SEQ ID NO: 59389 - DNA, 725 bp, Zea mays
  unsure (1)..(725): unsure at all n locations
  Clone ID: MRT4577_154159C.1
cattgggtccctcgaggccggccgggaaaccaggacagagagagagagcacgcggcgcggccccgccgagccgagcgcctgcctgcaaggctcccctcctccctttcgcttcctccttcgatcggccccgcccagctgctgctgcgcgcgccgccgcggtgagacccgggaggagggcctggtggtgggcgggcccgatggagtgggcgtcggcggcgtacacggccgcggcgctggtgtgcgcggcggcggcgtgcgtggtagcgctcgcgcacatctaccgccacctcctccactacgccgagccaatctaccagcggttcatcgtccgcatcatattcatggtcccggtaaatgctcaacgctcgccgctcatacctaaccctcgcggcggcagatctggcgccgagcttttccgtactgggtgagctcgagggcgcgtcgcggttgttagctggactagggccggtttgcgagagctagttgcttgcctgtgcgcgattgttaggtttcagtaggtatgtaaggcgcctgccttctttttcttcttctttttctgtagactttcccgtgaaagttagcctctcatggaactgaagtacttactggcaattttgctggtgcgtgtggttctcaccacaacgcgaatgatcaccatgtcatggagctttatgcaatatatagctgtggcttacttnntgagaaaaaaaaaaaaaaaagcggnc

SEQ ID NO: 59390 - DNA, 561 bp, Zea mays
  Clone ID: MRT4577_15415C.1
ggccgcttttttttttttttttttgtaataacatagtgtatagagataaatgtcacaataacatcagagtacttattacatagtggaagtcttacaaaataaattataaatataaatcgaactaaagtccatccttggcgccacaaagtcaactgggagacaccacctagatcaagacaaactcctcgtggtgtggctcctcttgaaccacttgtacttctccttcaattagctcctactcagcagtctccacctactgaacccctggatcctctgtggcttgctcgtctcaacggcgaaggaagcagtgacgttgatagcctaggaatcaattgaaccggtcgccgttcttgactccgagagtgatttcgcaaccacacctccccgtctccccttgctaggctccgattccgccccgcggactttgcgaaacgccacggccaatgccgacacactagacgacagtgtagaggatgtaccgcggcggtggcgattttcagcacaccgcacggtgctcacgacgacgtgggtctcgaaaaggatcccggcccggccggcctg

SEQ ID NO: 59391 - DNA, 576 bp, Zea mays
  Clone ID: MRT4577_154160C.1
aataactcagacgatgaggcacaccagttctggcgtaagcagctcccagatgatattattccagacttcacttctttcgagaaaatcgaacatgaacctgaagaactgtcccttgctggattatccttgaatgcacctccgttctatgggacaaaagctagccgcttgtcaagagaacaccaagagttgtcttcttcagctagcaacctggaacttgggcataccaatttattttacgaggataattcacaggcaaccttttcaactgttggttcaagcaactgggagcaaaattacgtgggtgacctccactttgctaatgaaaatcaggaccttcagtatgatcctaccacgggctttactgagagttttgcttgtgagtacgttgcagcatcagatggcctttttgaccccctagagtatttagcgtctcagtttcctggattttcagcagagagtcttgcggagctgtactatgcaaatggatgtgacttcaatcatactattgaaattctcacccagctagagatgcaagtggatcctacttccaatcagacaatgaatttgacccccagc

SEQ ID NO: 59392 - DNA, 985 bp, Zea mays
  Clone ID: MRT4577_154161C.1
cgggtccgttgtagtctagttggtcaggatactcggctctcacccgagagacccattgggtacctcgaggtcggccgggaacggaaaaaaaccgggagactgccctttcccctctcacccttgccgccaccgtcctctatctgccgttccaccggcggcgttgcctcccacagtcccactgaagcctctcgcggacccttccagaacttgtcctcgacctccccgtggtccggcctcttaccggtccgcttcctcctacaccggatttaggcttattgacgataatgtgctaggagaacgaatttgggtggcatagacgttatgtctatgaagaggcattttgcgatattcaccaccgcaagcctcccatggatgacaggaacatccatcaaccctttgttccgggctgcttatctggcaaaggatggtgataaggatgtcacactggtgatcccttggctttgtctaagggaccaagagttgctttaccctaacaatattgtatttgactcgccttccgagcaagagagctatgttcgccactggatcgaggagaggattgactttaggccatccttcagcatcaaattctacccaggaaagttttctaaagaaatgagaagcatcctccctgttggagatattacagaatgcattccagatgaagttgctgacgttgctgtattggaagagcccgagcatctaaattggtaccaccatgggcgaagatggaaaaataagttccgtcgagttataggaattgtccatacaaattatctagcatatgtaaggagagaaaagaatggtcagttattgcttgtttcctaaagtatgctaacacttgggtaactcgaatctaaattatcagattgtcaggtgccacccaaaatctgcccaggtctgttatatgcaatgtccatggtgttaatccaaaatttcttgaggtaggcaagataaagttgaggcagctgcagaatggggagga

SEQ ID NO: 59393 - DNA, 451 bp, Zea mays
  Clone ID: MRT4577_154162C.1
tccagatcaacctaccgcgacacagactgccctttcccctctcacccttgccgccaccgtcctctatctgccgttccaccggcggcgtcgcctcccacagtcccactgaagcctctcgcggacccttccagaacttgtcctcgaccgccccgtggtccggcctcttaccgctccgcttcctcctacaccggatttaggcttattgacgataatgtgctaggagaacgaatttgggtggcacgtgagtggtgatccgttgccctccctgacaaagacgttatgtctatgaagaggcattttgcgatattcaccaccgcaagcctcccatggatgacaggaacatccatcaaccctttgttccgggctgcttatctggcaaaggatggtgataaggatgtcacactggcgatcccttggcttcgtctaacggacccagagctggcttacctta

SEQ ID NO: 59394 - DNA, 344 bp, Zea mays
  Clone ID: MRT4577_154163C.1
ttcaaccaacacttctgccttgattgtgatagggacattcatgagagcttgcacaattgccctggctgcgagagccaacgcatcattgcattatagagaccgagtcactgcgtgcattattcaggtggtaccttaagctttctcctacactgtgacagccagcagagttgtttaatgatcaggtttctttctgacaagcttttatgagaatctagctgaggagagaatctggctgtgagaagaatttgtatcgctaaaattacgtgtggaggaagatgaagcggtccaaagggttcaagatctgacaagggatggattcttactgacgggactatacaaccgac

SEQ ID NO: 59395 - DNA, 282 bp, Zea mays
  Clone ID: MRT4577_154164C.1
gtctctttaaactagcaaatgtttttgttttttcgtttaaccgttgaaatccaacaacttgattatgcgcattgaccctattagccaatcaatcttttttattgttttgttccacatatttttttttctaccacaccggtgggggcataattcaataataatataataccactagtaaccccaccaaactaggggggaacaagacccctaaatttttgaaaaaaaaattcataggggggggtggcatgccttccatgcacaagccagtctacaaacccaccc

SEQ ID NO: 59396 - DNA, 594 bp, Zea mays
  Clone ID: MRT4577_154165C.1
ccgggctctcctataccaaactgagggttgccatagacagaggaaggtcgtcaccgtgttgccaccgacgtgagatcgcagaggaagacacggtgatcgccaccgattcaatcggtgtcgcggcgctaatggagccgtcgttggaaggcatcagtgggtgctctaggagttgccgaggctatcagtgcctagtcatccgcaaaggagaagcagggccccgggaatcgctcgacgaaacagcagcaccgccgcgatgctgctactctctgcaggcaaggatctccacaccaaagatctagacgaccaagtggccgggagacccgaagcacatgaggttgaagatcctgagcaagagctcgcagaaggcaagttgtgcccttgatcacttttttacccaataatattttctataatcactatgacatgctcaagttaatttgatggaacctaataggttaccctagtttggtctaccctataccttgcttataaatgaacttttgggtagtatttgttattgctttatgtggttttgagtgttatgaatcatgatcatgcttattattgtcaaatggattatttactgtgcatgat

SEQ ID NO: 59397 - DNA, 296 bp, Zea mays
  Clone ID: MRT4577_154166C.1
ctatgacgtaagacctgcacgcgctcacgtaagctcggatcctgtatagcgggcgccctccactcgttcgactccgtcttctattgtaggtattattatcgatgtgtcttatactgtgtcagacagccgacgacgactattaggacgatcgatcaacttcatctgatgcctacattttgcacctgcacatacttggtcgactgcctccttttgcagccgctgttaggtttgcaggatcaacggacaggtgacgggcctgtcctaccatgcaccgtgctccttcagggaccatcaca

SEQ ID NO: 59398 - DNA, 571 bp, Zea mays
  Clone ID: MRT4577_154167C.1
gcctctcaaaccctaataccccaccatccccaccgatccaccgccatgaccgacgtccgccccggctgggtgatgctagatggcttcgtcttcatcaggggcgccaacacatccttgccggagaagggctatcggcccttgagggcccaaggtaccacctcccagggcgtcaacttcgacatcgcactctgcctcgccgatcccccagacacctcccgcctctatgtgctgtctccgagcgatgcgagtccagataccgcgtgcgacatcttggcggcgcacggcaaccactttctgtttgtgatcacctacttcttaaggtcgcacgagacgtccaacctgcggtgctatcaggatcccttcatctgcagtgtcatctcacgggacctgccgccgcttctcaaacggcttccggcacacaccgagccgctcatcgcacgtaaggtggatggggcagagataactctgcagcgcctgtttttcccaggggatgctggtctcttgtgccgcgatgaacaagtgtttgctgtggcgcagctggaccaacttattccaatttcagacagcaaca

SEQ ID NO: 59399 - DNA, 664 bp, Zea mays
  Clone ID: MRT4577_154168C.1
tacatttgtaccttcggctggacagaagatttgaatacaagcgtgatgcacgagcgagtacaaatcagtgtgaacagtacggggtactgttcatctatttataggcataggacgcagcctgtgtaaaattacattcatgtcctttatatttagtattaacttaagaacaatttatcgaggactaaatagaattttcctccttaagtcggttcctttatctattattgagccgaagcttccttgcgcatggcttcgacactggttcaaccttagttctaaacctgctttccatattgtatacagcttcgtcccatgtccgaaggttcctgcccatatattatgctttgggaaacattgttagtcatgtttttgaggaccttcggaagacgaaggcccccaacaccaacttcatcttgtgattgttttctctccgtatctaatcagatactaatccttgaccttgtaatatctatgatgggcatagaaataagcttgggactgaattaacagtctcccattatactcattcatcaacaagtttaggttatggccatgtcttgttcatttcatcgggccatgatctatttggctctctacttgtaaccattctgacaggtagagtctctttgtatattgtcatcatggctcaatctatttgtgtcgc

SEQ ID NO: 59400 - DNA, 704 bp, Zea mays
  unsure (1)..(704): unsure at all n locations
  Clone ID: MRT4577_154169C.1
ggtaccctccnggttcggccgggnaaaaaaaaaacaaaaaaaaaaaaaaaaaaaaaaaaaaaaaaaaaaaaaaaaaattaaaaaaaaaaaaaaaaaaaaaaaaaaaaaaaaaaccgggggccggggggggggcatacttttctaaaggaaaggaagcgccgggcaaaaactgaaaattgggggttgccaccatgtgtatcgaatctgaaatgggggcagaatttgtgttcaagcggggaaacccgggggatggactttccaacgggagggacatccaggcacataattttctgtctaaggatgcaaataagaggcgcaaaaaaaacatccatccttgagcagaataagcctgctgaattggaaatatattcaaaatccgtatttttttttttaacaaacactactttatatacaatgaataaaagggcgacaatacagggtcaaaaaaaaaaaaaaaaaaagaaaaaaaaaaaaaaaaaatagaaaaaaataaagaaaaaaaaaaaaacactgtttgaaaaaaaaaaaaaaaaaaaaaaaaaaaaaaacaagggccccggggggggccattttttaaaaaaaaaaaaaaaccccgggaaaaaaatcaaaattttgggggttcccccctgggtttccctttccgaaaggggggccaaacttgtttcccggggggaaaacccgggggatgcccttccacggggggg

SEQ ID NO: 59401 - DNA, 500 bp, Zea mays
  Clone ID: MRT4577_15416C.1
cccctcgagccggccgggaccgaatcagcccggccgcccggcggcgaggaggatccccattccccccctcctcacgcacgctcctcgccatctttagcctggaccccacctcccgtgcctcggccattaaagcgggggaggccgacccgggcgctccctgcctcctcgtcccgtcccgtccctcccagcgccccgttccattccaccgccgaccagatccacccccaacacgtccagccatgccggcgccgccgcatccaacgccgctgctgccaccagcgggggagccgttccgcgtgttcgtggggtacgacccgcgggagcacgaggcgtacgaggtgtgccgccgcagcctgctccggcgctcatcgatcccgcttgacgtgcgcccgatccggcaggcggagctgcgcgccgcggggctgtacacccgggcgcgtcggcccacggagagcaccgagttctccttcacgcgcttcctcaccccgtacctggcgggg

SEQ ID NO: 59402 - DNA, 356 bp, Zea mays
  unsure (1)..(356): unsure at all n locations
  Clone ID: MRT4577_154170C.1
ttcccttctccacccacacattcttttctacatctgtttcaaaccacctttagcttcttgatccaatgaaagagagcatccatataaaacttccantaaactttttnaatgnttttnnttatttatttattttcactttcnnttncnttttttttttccttaccccntttaccncatattttatctattatttcttccttcttttttnttcctatattatttttttatttttcttatttcaatcattttttactttttttattcaattttttttttcactaatttttattttacctttattactcttttttatattatttctttcctattttatttatatttctttctaacttttt

SEQ ID NO: 59403 - DNA, 225 bp, Zea mays
  Clone ID: MRT4577_154171C.1
tcatcctccgactcttccatctaccctcactaacatttgactctaccatcctctacgggacccacgggctcttctaccaccacttggaacagctcctatgcctactactctaccacctctctctcatcaccatcatcatcaagcgcaaggacttctactacacactgatcaccagcaacaagatactcctcataacatcacactactacatgcatcatatccgtc

SEQ ID NO: 59404 - DNA, 358 bp, Zea mays
  Clone ID: MRT4577_154172C.1
aaattaacagttttgttttttctttgatgaacaagttttattcgggctagttggcactgcttatagctgatttgtctcaacaaaattactcccgccgaagaagaaggggcccccccctaaaaaaatccaggggcccaagaaaccaaaaaaaacaggggggggctaccacaaacaaagaccccccagtggacacccggaatccaccccgattccccccctcaggccctaaccgggcaacaaaccgcccgggctaagtttaaaccctaaagagggggcgccgaaaaaggccccaaaagaatggacccaagccctgccgcagaaaaaaaaaaacaccaaagccccccaccgggttaaaggg

SEQ ID NO: 59405 - DNA, 237 bp, Zea mays
  Clone ID: MRT4577_154173C.1
gcacatcaagaatccccgagcagggccccattcagttgttcccactccattaccataccatactccatagtccatacacaggggcatgtagggcccagcaccaacccgtgccgaccgaactcctaatccagcgaccagaactgcaattggaaagctcccccaaaaggcgaggatgcatgacaaagctaatcagcctactaaacaagtaaacaacaggaccggctacggccaacacac

SEQ ID NO: 59406 - DNA, 780 bp, Zea mays
  unsure (1)..(780): unsure at all n locations
  Clone ID: MRT4577_154175C.1
cattgggtacctcgaggccggccggagccatttctttacccatccgaattccctgtgattcctctctcctcgtctcctcgcctccccctaggggatcgtcccataggaatcccaaagagggacgactcatccgaattgaggaagacattggaacacaatgagggtgcgtgccaggcccccggaggacccctcctctgcatcaataactgtggattacttcggaatcgtggagaccatgaacatgtgctctaagtgcccccccgacatgataacaaagcaggatctcgccaagctggttgtctcctctatccacagcatcctgaacggtagcgacgacgccatgtagacggatgttgctggcgacaacacggtatgaaatgatggccaagacctacatgcaacaaagaacgtgcatgagacctctgatgttgccggacccaatgagggggtgggggcgatctccaaaggtgggaaaggatggcctaacaccggcataaccgtgcaggaagagggctgggctcacagaattcgactgatcggtgtgggaacttgtattgtgcggtccaccgctactacgataactacgactgtaagctatactaccgcactgctgacacggactccattgccaaggctaatccgactggtgaatggagaccagctcgacaacatctatgtgccggctccctatcgttggtgtcatgaagattagtcaccgcggtaactcgtcatgcggaactgctgccttgcccccgcgcctntctcttcatgtttgctgct

SEQ ID NO: 59407 - DNA, 131 bp, Zea mays
  unsure (1)..(131): unsure at all n locations
  Clone ID: MRT4577_154176C.1
ctaagttcttcttccatcgctccacncccacgcccttctctctcgtagcaacgtttggggcgccgtcgctgccgctctactcgggtgcncaggtcttgttcggggccttcgcggcgagccagggacacttt

SEQ ID NO: 59408 - DNA, 586 bp, Zea mays
  unsure (1)..(586): unsure at all n locations
  Clone ID: MRT4577_154177C.1
aattcggcacgaggccagaagctgccgagaccgagagagcctgcggatacacgcatctcgccgacccccgccccccatggccgatctccgcccgccggagccgggcacgaacggctccagcgccggcgtggtcgccgcgctgccggccgtggaggccgtagcggccgcagaggccgccatggccgccacggccggaccacagccgcccgcgccgccctactccaagcgacgccgccgccccagcgtccgcctcggggacatcgacgctccgcccccgcgccgcaaccacaagccgccgtcctcgtcgcactcgcgcccgccgcgccgcgcgcacccggacgacctcgacccgcacgcgcacagccgccgggggcccaagccgccggcgcagcgccgcccgcggaccgcgtggattcccgccgcgcccgcttcggcggngcccgccgagggctacgacgacgacgaggagcgatactacgacgacgaggaccagtccgactccgcggccgccgccgccgcgagggcttagggttcgggcagccgcgacgccagcggcgacgagtcggacggggtggcggactggggc

SEQ ID NO: 59409 - DNA, 224 bp, Zea mays
  Clone ID: MRT4577_154178C.1
cagcaaattgcggtgcttccaaggatcgtctaacagaacagcatgaagatggtcatcgctctcgtcgtgtgcctggctctgtcagctgccagcacctgtgcaatgcaaatgccctgcccgcggaccttgatgggaagaaatgtactgtgctcgcccccccctaactaccattatgggctgccccagaaattaaccataacccccggatctggggctttccgccc

SEQ ID NO: 59410 - DNA, 414 bp, Zea mays
  Clone ID: MRT4577_154179C.1
cggacgcgtgggcggacgcgtgggcggactcgtgggcggacgcgtgggcggacgcgtgggcggacgcgtgggggcccgggcctgggcctgggcttcctcgcggtcagcggcgtggtggcgtccctcgcactcctcgtgatctggagcaaggtggttgcggccgttaccgtggcctccttctcactctacctggtcgagtccgtgaggtcgtcctcgctccccaggcggcggccccgggcggtggtgaccgagaggcggcttcccctggacggccgcgggcgcgtctcgccgatccgggaggttgacgcggcgaccgagccgtcgcggccgagctgctgctcggattccgacaggggaagcgacggccgcatgctgctcgtcgaagaaagcagcggcgtcctggacgaatcaagc

SEQ ID NO: 59411 - DNA, 639 bp, Zea mays
  Clone ID: MRT4577_15417C.1
gtgcgactaggagggcaggagagagcgaataggagacctatcgattgaatttgtgcagtgaagggagtcttgtccataggatatgttctcttaacgtaaatgtttaatgagtttgcacatggtgcatattgagtttgttgccaccataaacctgcaccaagatatgaaacaaatatcacaatgaaaggagacttactgattgtccaagcaagactaaaaaaggctaggagaaagggagccagtgcaatcttgtacgagtttcttctaaacatgcaaaagctaggagaaatggagcgaggtgcaaccttttatgtgtttattctaaacttgcaaaagttatctatattttcgtatagagtgagtcaggtagcattgaggatacatcatagcataaataactttgcattggaattaactatctcttttgtattggattagaaagtaacgacaatttagccttcatcagctattaggttcatagactttgaagcaataggttgtacttctcaagctatgggacaccacatatttttttctgaaactaagcttgtacgtatgcaatctgtcattatgatgtagctagagatgctaattgtatcattagatctggaagtccaaatcatctgattgcaagagata

SEQ ID NO: 59412 - DNA, 654 bp, Zea mays
  Clone ID: MRT4577_154180C.1
atttgattcgactcttcctgccagaaaacctgcagtccaggcgactgcatatccggatacaggtgtgccggttcaacccaccattattgctttcccagtgtctagtgcacctgctccaaaaggagtatttgtgggttattctcctccggctggggctgaagatcatgtcaggtaccagcagcaaccattctcttatagcatgcaaccgtcgctagttccagtgaatgtcccacaaggcattggtgccagtgcatacaaagattcaaatcatgcagcagtggaaccgcttagagaatatgcccgtgatcttcctcatgactatgctagagctattgatgctcgtatgcaagcagttcatttgggtcctattgcaccaccagaatctagtgtgcaaggaaatccttctattcctcatgttgtcattgatcatgccaaagttgggaagccacctgtaaataatgatgttacttctttctgcaaatctcaagctggagggtatcatatggggatcacaaatgcctttacttctcctgctttaacccaagaggacaacattgccaggcacagcgagcagccaccttgtgattttgatgttggtgcacaaaatgtccaccctgacataatccagcgaccaccactcaatctgcctgtcca

SEQ ID NO: 59413 - DNA, 296 bp, Zea mays
  Clone ID: MRT4577_154181C.1
ctgacacctgggcgggcgcgcgttatcacgcgagcctgctatgagcctagagtggtcgggcacgctacctatagcatgagccccctacaatatcagaaccgccgcgatgagagacactactcctccatcgcgccatctgtgctccagggcttgaccaaggcggtggccatgacggtcctatacgacgacggtgacaagaccttcttcgccgtcataatattggctatgcaccataccatgatactggacctggcacgctacgtgactgcactaatagtgatcacagctgtatcagc

SEQ ID NO: 59414 - DNA, 225 bp, Zea mays
  Clone ID: MRT4577_154182C.1
cagcggccggcccgacggacacggtgaggtggcacgcactaaaccatacatctgacttgggcagaagcaaactcgcgtgcatgcagtgtgacatgctatacccactgctcataactatctatggggctagcgacatgcccttgctatgtctagggacagcataccgctgctggttgcgtgcaagacgcggaagacgtgcgtcgagagtgcttgcagggcgtgctg

SEQ ID NO: 59415 - DNA, 599 bp, Zea mays
  Clone ID: MRT4577_154183C.1
gttaatggcaagaataggaaggaacttctagctatggctaaagtacagggtgagagtaaaaaagggactttgctgttacctggagaactcactcctaagggtggaagatgcacttggagaaggtccagcaggtcgatcaccttcacacatggctgttggtgcaaataaaaaagcttcaaatgtgggacatattaaggatggcgctactgtatcaaaagtcgaagatgttcatgtagatagaagtgttggtgtgaagaagcccagatattctgcagatgaaggcccttcgttgactgaactgagtggatacaatgcaaagagacatgagtttgacccagaatacgataatgatgccgaacaagctcttgctgagatggaatttaaagaaactgattcggaaactgatcgtgaactgaaactccgtgtgctgcgtatttacctctccaggcttgatgaaagaaaaagaagaaaggagttcatattggaaagaaatttgttgttccctaatcccttggaggaggatcttacgagtgaagacagggaactttaccatcgctataaagtcttcatgcgttttctttctaaggaggaacatgaag

SEQ ID NO: 59416 - DNA, 465 bp, Zea mays
  Clone ID: MRT4577_154184C.1
caactgattgagactatcatattcccccatgccccaggtcaactgttgttaaaagggattcacctcttgctcttccctacccttcatcacctaccctccaacaacctggggaagaagcccccaatacatttgtcttcagtggggccaacgaaatcaaaggctaccctagcgacctcagagtcacagcaagctaaacaactgggccagcttccacagtctgtctcattgcatcaaaagcctaacctgggccaccaccggaatgttagcaagcctgctgatgaagaacagtcccttttcggttatggagggaatctttctccatctacttacgactttgatcttcagaagggtctcaagcttttgcaatacaaaaacactgatggtaatgctatccgcaaccacggggagctggagccttctttaactgtgttgaggacgaacacatgcatgctattcaaaatgctt

SEQ ID NO: 59417 - DNA, 2592 bp, Zea mays
  Clone ID: MRT4577_154185C.1
cctcgagggctggccgggaagcatcactgactccattgatgtgtgcatctaatgagaaaaaggttcctgtcctgcaccgccttgtcctagacccgagtggacccgagtggctgagtccacctctgatgctctgacctccgcctcctcctttctctcgtcgtcgtctccacgacacctcaaccccaatcagaacccggacccagatctctaaaaaatccccaatcccaatctgccgtacgccgttgcgatcatacctccaaatccgcccccaagtctgttcgatgcgaatagcacctgcgatttagcgaaccgtgcgctcgctaggtttagggtttcgagggtttgcgttagggtttgggcgcacgatggggcggtcgcgaggggtgctgagttccggcgacgacgacaccgggcacaggtcgaagcggaggagagtctcgtcgggcggggatgcgacggactccatttcagcctccatcgggggagctggagagggagggggcaagaaggcgctctatcactgcaactactgcaacaaggacatctccgggaagatacggatcaagtgctccaagtgccctgacttcgacctttgcgtggagtgtttctctgtcggcgctgaagtcaccccgcaccgcagcaaccatccttacaaagtcatggacaacttgtctttcccacttatttgcccggattggaatgcagatgaagaaattctcctccttgagggaattgaaatgtatggtctgggaaactggcttgaagttgcagagcatgttggtaccaagtctaagttacagtgtattgatcattacacatcagcatacatgaactcaccttgttatcccctcccggatatgtctcatgttaatggcaagaataggaaggaacttctagctatggctaaagtacagggtgagagtaaaaaagggactttgctgttacctggagaactcactcctaaggttgaatctcaattttctccctccagggtcaaggtggaagatgcacttggagaaggtccagcaggtcgatcaccttcacacatggctgttggtgcaaataaaaaagcttcaaatgtgggacatattaaggatggcgctactgtatcaaaagtcgaagagatatgctttctcaagaacgtctttttctgtaatttgagttctattaagaaatgaaatggtgatagtctcacgttacgacatgatgttcatgtagatagaagtgttggtgtgaagaagcccagatattctgcagatgaaggcccttcgttgactgaactgagtggatacaatgcaaagagacatgagtttgacccagaatacgataatgatgccgaacaagctcttgctgagatggaatttaaagaaactgattcggaaactgatcgtgaactgaaactccgtgtgctgcgtatttacctctccaggcttgatgaaagaaaaaggagaaaagagttcatattggaaaggaatttattgtttcctaatcccttggagaaggatcttacaaatgaagacagggaagtttaccatcggtataaggtcttcatgcgttttctttccaaggaggaacatgaagcccttgttaggagtgtcattgaagagcgaaaaattcggaggagaattcaagaactccaggaatgtcgttctgctggatgccgcacacttgctgaagcaaagatacacatagagcaaaagaggaaaaaagaatacgagctgaatgcccaaaaagctaaggatagcagtcaacttaatgcaaataataaatcagtacagaagatgaatcgacctatgaaaattgagtccgatgggaatttggatccaaagaaaggtggtgctggcttggattctcctaaaactacaggacctacaagtgttaagcagtgggatgactgggatatagttggtcttcctggggcagagctattaagtgctagcgaaaagcttctatgttgccagaacagactgctacccagtcattacctgagaatgcaggaggtgctgatgcaggagatattcaagggtagtgtcctaaagaaggaagacgcacacgtcttgtttaaggttgatcctaccaaagtagatagtgtttatgatatggtaacaaaaaagctgggcaaccatgtggagttgcctacggtctagcttatgcctttgggcttgcctgctgtgacatgccgaagaaaacaaatcttggtttcgccccttgcagcgtgtctgaatcagggctgaaggtgggaactgtactaaatcgaatcggccatagttagctgaaattcatatcagctgtcagtagcacagtaaggcattcccgccaagctgtaaaattattgccccgacgagaatgtgtagcatgaatttgaatttcttttctgctattgctgtgtactgttgcagggtagtgccttattgtagtatatgtataggtgcctgagttttatgtatcatcgtgtatgtaccatttgggcgctctatttatgccattgtaccaaccccaaacatcgattattataattcatctagcagccaaattctaaaaaaaaaaaaaaaaaatggcgtcaaaaaaaaaaaaaaaaaaaaaaaaaaacac

SEQ ID NO: 59418 - DNA, 894 bp, Zea mays
  Clone ID: MRT4577_154186C.1
ttttttttttttttttttgactggggatcacataaccctgatctcattaataaatggaggtaccatcacaaccatgtacaaaaatgcataggaattctaggccacacgccatggcacataagacagcatctttcaattgaggttatctttgcaattcctttccatgaattcatgctcgctctcttgcagagttccaggttctgacttgtggtgattgttgtcagataaggtcgatccggccaccctctatgagtcccttgacggacttgtaccgaagaacatacaagtcatcagcaaccaggtccacaacctcctctccaatgtcatctagctggaatgcacctacgtcgcccttggtcttacagaagacgaaggtgtcaagctgaggctccggcaccatgtcatcctcagtgctcgacagcgactgcctggaaaccgagtcatacccgtacgggagcttcgacagcaccgactgctccagatgcttctccatgatctccgcgcaactcttggcaaaccggcgctcctgctgggacagccggctgaggaggtcttcggagcgggagatgtgcatcgtgtacttctcgatcttctgcaggcggaggcggaggtaggagcggaggaggaagagcgtgcggtcgaggtccatctggtagagcgagaccaccaggtcgtcgacgccactgtcggcgaagtcgtccagcgtatcctcgaggagctgggtctgctcgcggacgcgagagacgaggggcgagtcgaagcggaggatctccggcgcggccttctcgttgcgccacgcccgcttgagcagctcgacgtccgtggtggccgcctcggccgcggacgccgccgccgagtcgtcagcgtccccccaggccacctcgaggtacccaa

SEQ ID NO: 59419 - DNA, 608 bp, Zea mays
  Clone ID: MRT4577_154187C.1
caatacttacctaggagacctctgcgggacccaggttgagaggagctcacgccagcacctgctatgttctacctacagagcagcaagtaagggtgcaaccttaactgtacgggggaattgcaaagactcggcatgctaaacgtcatccaaaagaggaacctcctcgcaacaggcacagagggacacgggcaacactgacttcatcttcatcaccgacagttaaatcgaccacattgacggagcctaggatcaagatagaaatgtgtaaactaatagggatcacttttgccacaaagatagagtaaggctagtgatcgggaaccatctaaacgttgaagcgcacgcttgccatgtggacaagagcgtcgtcccagtcatcaaggaaatgggcatggacgcatataggttctctatcgcttgagccagaatactggcgaagggcaccagggaaggaggtgttaacccggctggcatcctttactactgaggcctcatcaacttgttgctggataacggcatacagccatatgtaacacctgtccactgagatgtacctcaagcactagaaagagagtacggcggcttcctagataatagtcataagagca

SEQ ID NO: 59420 - DNA, 476 bp, Zea mays
  Clone ID: MRT4577_154188C.1
aaaaaaaaaaaaaaaaaaaaaaaaaaaaaaaaaaaaaaaaaaaaaattgtacttcctaaagacacaaccctactggggggctatttctagatattcttcatccctggtggccgcttttagcatccttccttgggggggccccttctccctcttttgggggactcttattacttctttggtgcgcggttttttaacaacagcggggtgctggaacccccctggccgcccaccttattatccttgttgcacctccccctttttccggctgggggcatacccctgaggccccctccgcccttcgttcttaccaactgtccaacctgcttggcgaatagtggccccctcttgtgggggattattcgcggcggctgttgtggtttctacccacttgggggcttcttttctcgccagcctatcaccccccctttcttcttttttccctcctttttttgtcgcggcgtgccgggttttttccc

SEQ ID NO: 59421 - DNA, 145 bp, Zea mays
  Clone ID: MRT4577_154189C.1
acgaagagagaagcccataaactgtgtttgacgtactggctaatattccccgtgtggaactaatatacctttcattccttcaaacctgcaccaaactattatagccttaactacaccaactttttccttcacttttcttgacgcc

SEQ ID NO: 59422 - DNA, 416 bp, Zea mays
  Clone ID: MRT4577_15418C.1
gaacaaattaagaacagcggactttgtbacacgacgccactagaaasacaaaagcaacccamaaacycgtaaaaaawagcacacggcaracacbtctkttcagtattckttcttatggcatcatctgaagcaattcaagakctttatctatcggcacttckacaaarcttcacgggacgkgggtttcctcctttkttctcaggttcttaagggtcaacgcacaaaatctcckgtkcaaraacacaataacaaaagccttccgatcttktttctacagcttagcttatkgcaataccaaacaacaatcctatttttactyytgcagaaagtyagactacaccatactaagtttcakcttgacagttgccaratcttctctagttgtaattcacttamargggaagktttaatgcagc

SEQ ID NO: 59423 - DNA, 366 bp, Zea mays
  Clone ID: MRT4577_154190C.1
ttcgtttttaaatgcccacactcttgtgctgcgttggggacacggttatgttacagtagaaggaaagcagactgattacaggtaccaatcgaatgtaatggacagccacatgggatatagctctccttttggctagactgaagcaagatcgaacgttggcatgcatgtctttacctaatcccggcaccatctgtgagcgttgatgttgtatactatgctggaatcaacggactaatagactacagcttgtttggacttttctcgaatgaacagatcatggaagccttgagcatggtacaagtgtgaacacgagatcttgtttcacattatgttaacgtgagttgataggtgactacgttcataaac

SEQ ID NO: 59424 - DNA, 301 bp, Zea mays
  Clone ID: MRT4577_154191C.1
aatcgcgtgatgttgtctcttggtccgcggtgatatcaagccacgcgcaccatggctgtgcaagggatgctttatgcgttttcaatgaaatgctggatgcgaaggtggcaccgcctaacgagatcacttttctcagcatccttactgcatgtagtcatggaggattggttgatgagggactcaggtattatggaattatgaatgatgaatatggattgagcccaaccataaagcattgcacctgtgttgttgatcttcttggacgagccgggaggttagccgatgctgaggctttcataag

SEQ ID NO: 59425 - DNA, 237 bp, Zea mays
  Clone ID: MRT4577_154192C.1
gctacacttagatctccaaacactcgtaactatcctactatgaggttacatctgtccccaaaagcatttgtggtcatagaagctggccttggtttgtcagacctacaatcttacttacatacaattccttcttttaaatatcttatgaattgctgctacttaaaaaaatcatacttttttaacaactcattaatttaatcaacaaaactctctacaacttaaaatatctatatcatt

SEQ ID NO: 59426 - DNA, 376 bp, Zea mays
  Clone ID: MRT4577_154193C.1
gtggtctgttttcatatgctgtatcgtgttttagctagttgaaggtggcggcggcgcgggcgtcgacggcgaggatggtgctgaggttgagcgggtgcatgtactcctgtgggccgtccatgaactggctgacgatgatgcggttggccttctccgtggggtggaagttgtcccagaaggcgtagacgctgcggtccgggcagacgctggacgcggcggtgcagagccccacgccgttgtatggtccctggccgcagcacgcgaccttggaggtgacgaagccgtaggccgccgggtcggagatgaagtccatgtgcatccggtaggcgttgacggcgacgaagacgtcggcgccgagctccgcgttgacgccctt

SEQ ID NO: 59427 - DNA, 832 bp, Zea mays
  Clone ID: MRT4577_154194C.1
ggtatggatccaaatttcccttgaaaaaaagataatgggttacaatagtccagttttttttttgcagaaatttaaaaaggaagagaaggaaaaaaaatcgagagctgtacaaacatgtgtagtcaattagtacaatgccagaaaatgttgggccgacaagcaagcaacctacgcagcagtaagtataatgtcaacggggtggtttggacttggtttgggtgcgccaatcttttacagactcttttcctcacgggatagacaaaatgcaacaaatccaaaagaaaaaagagattgtaacctggattaggatggtgttattaaccatggaacgaaaaggaggaaaagccatggaagcagagatcaccggaagcggccaccgtcggcgagcttccgggagcgacagcgcgtgacggaggcggacgagaggctgctgtggagcggcggcggcggcggccggagctcgctggagaaggctcccgggtccggcggctgcacgggccggcgccccgggatgggccgcacgagcgggctgaggcagacggcgaagcccgacggcatgctgccgctcgtctggcggcgccggcaaggggtccgccgcatgggggacggggacggccgccacgcggggtccgagctgctctcgtcgtcgtcgccgtcgccgtcccgctccggcgagagcccccggttgctgaccgcgcggcaggagcgcctcggcggggccgactgtggcgaggtggccgaggccggcacctgccccttgctgcggcggcggcgcggcatgatgccggcgagccaagaatgcttcttccgcctacctggtgcctcgcttctg

SEQ ID NO: 59428 - DNA, 213 bp, Zea mays
  Clone ID: MRT4577_154195C.1
aaaaaaaggaacccttattttggggttataaaaaaaacccaactttttggagggggtaaaaaaatgcttttaaaacaaagggctccaaaattttacgcggggccattttttacggttttgggccgggaaggggaaaatccctgctttatccggaccggggtggtatttggggaaaacggaaaaggggcggggggttttgggactttcccaatt

SEQ ID NO: 59429 - DNA, 494 bp, Zea mays
  unsure (1)..(494): unsure at all n locations
  Clone ID: MRT4577_154196C.1
cacgccgnntccgcggaccgcccgtgggcggaccgccgtggggtgggacccnntcttaggtganncggctccagagaagtgccgatcgtcacccggcaaggaagaggcttcnngccgacgggatcccacgactttcaagggagcagcaannncttcactggcgcaagggcngnnacgggttcaatgtgcganntcgggatnnggggttcccagaacacccggccggcgccggagaaagcacnncaggcggttggcgccttgctgtgtgcccagtcggaccaagtcccanntcttctctcaactgcaaagagtgtgacgggttccaggacacntnnctgtacgcgccactccaaaggcgccagttctacacgcgaacttgcatctatctccggcacccggtggacttcanntcttctggcgacgcgnngcggcggtgttcccagaacatgcatccctggtgcctgcggcgggcccatggacaaccaagcagaaca

SEQ ID NO: 59430 - DNA, 280 bp, Zea mays
  unsure (1)..(280): unsure at all n locations
  Clone ID: MRT4577_154197C.1
cgccggccggggnnaaaancgtgctgtcttcccgtctcttcccaatgcggcgtctcgctctcctcttcctcctgcctctcctcctcgccaccggcgtcaccacggcgtcagcggagcccgcgacccctcccgcctctcctcctcctcctcctcctccaccacctcctccnccccccccaccgcccccgcagaacctccacaagctcctcatcatctacagaacgaccacgaaaatctccacctccagaatcaccagcttctccgtcgacaacaaacaaaa

SEQ ID NO: 59431 - DNA, 466 bp, Zea mays
  Clone ID: MRT4577_154198C.1
gcggggcgggacctcccccattttcgccgccccctccgatctcgctgttctcgtcatccttccgttggattagggttcttcatctgctcgccgcacttcaccagactcccatgggggatgaggaggtcatgggtccagaggcggtcctagaggaacgttcataagctaatggtgtggcgcagcggaatgattatcacgagtgtcctaagggcgatcaataccataacactgtcgactacgactgtaccgagcgtaacttcagtgactgaaaatgtgatgacaataatggtgcttgtagaatctttgagtaggtcaagatgacgaactatcgcgccattgatccacttaagggtgtttgatatttggaatgaatggtaagaccgaaaaggtattaaagggcatatatatgtaaggaaggaatagttgcctgatggatggcactatttttgcactgtaagctagacct

SEQ ID NO: 59432 - DNA, 174 bp, Zea mays
  Clone ID: MRT4577_154199C.1
cagccgagttcgcgtcgccatggggccgctcgagtgggccatgtgggccaacgctacagacgctggcgtccgacctgatcctcattcccgggggcatcgtggccacagctgggcgcttcacccagtggtactttggtgcctactccattgtggcgggcgtgtttgtgtgcctgc

SEQ ID NO: 59433 - DNA, 313 bp, Zea mays
  Clone ID: MRT4577_15419C.1
attcggctcgaggcccagcatgcaaggttttcattaaataatggcagctccactgggtcgggatctttgtattcttgtcccactaacctgggtaaacagtgctcaatgggtgatgcggtggctgagttggttgatcacacgaacaatttgcgtgtatatatcaagaagtgctaaccaaataatctgtgatgagggctgtgttacacatgatcactgtcctaggaaattaaaggtttcatacatgaacaaaaaggcgaacgatatcaccgagctgagattctataacaaataagattttgctagagcatactac

SEQ ID NO: 59434 - DNA, 301 bp, Zea mays
  Clone ID: MRT4577_1541C.1
tcgagccggccgggacaacgatcacatcaagccaaagcaagttgctaggtcctttgaaccagcaactgaagcttcctcgtctcatcatcgagaccagtaagcaacatggcggctaatctcaagtgggctcctgttctagccctcctcgtcgcctgggcggcgcggggtgcccctacctcaacgacgaaaacgaagaaacagctcggcgccaacaagagagacccgcgatctgaatgggtgcgcgccgtactgcttgggcctcgcccataaacatctgccccccccgccaaccccacgtgaa

SEQ ID NO: 59435 - DNA, 232 bp, Zea mays
  unsure (1)..(232): unsure at all n locations
  Clone ID: MRT4577_154200C.1
catcagtccgttctgactcagcagcataatgcccgctctgctagcatgtctgagagannctcatgancatgtcggtgaatgtagcgccgtgttcagctgtcctgcttgtctgatcgactgctttgactaatagcggtgatataacttgtctcgacgacgacagatatggtctgctcctagggacaatgtgggcctgtgggaatacaatgggtgtgtcgcgtatgttgttgtc

SEQ ID NO: 59436 - DNA, 437 bp, Zea mays
  Clone ID: MRT4577_154201C.1
acaactggatttataaatatataatgatattacataagtatattacaaaaaaagaatggcctagtgcatttaaatgatactccctccgtcccaaattgaaattcgttttgcctttcaatagattcataaaataattaatgtatatctctactactacttatgttagtagtgtaggcgtccacaaccacccgttctatcgcgcgcagatgcccgaatcgcgcaatcggtccgcaaccgcccgcatccgtgccagcaccggaaccgcttctttcattcttcgtcatccttgcatccacacgggcggatcccagcgctccctcccgggcacccgcatccgtgccggatcacgcagccgccccgtaccacggataccagcgctgcctgcaccacacaagcctccttgccatgccccatgcgtagcgcccacaccaccgtcc

SEQ ID NO: 59437 - DNA, 585 bp, Zea mays
  Clone ID: MRT4577_154202C.1
ggccgccgtctggctcctcgaggccattcgcttggctctccacctcgcacccacgctcgcgctcgcgctcgctctctttcccgcccggtagcgggctacacccccacctactcaggacccttcgcctgtccactctccgcgtccatctccaccgtcacgttcctctcggcgcgcatgagccggcgaggcctggcgcgctcctggccgcacacgcgctcaggaagtccgtgctgaactccctggtggagctcaagcgggccgtgctcgcgctcctgctggccgttgtgctgctcgccgcggtattcgcgggcgggccgcacgcgggggcgctggccgcctcggtcggccgcttcggcgggcccgtcttctgctcgcgcttctcctcgccttgatcctacgggtacagcgcgccggataccaggggcgggtacacgggcggtcacttctactctcctttgtactttgtatccgcctgcccatccctcggcataggcttcgggggatcgttgttcctatcgaccctcatggggaccgtggctgtcctctacctggccgtgttcctggccgacttgttcggcgctacca

SEQ ID NO: 59438 - DNA, 645 bp, Zea mays
  Clone ID: MRT4577_154203C.1
atgccccctacaccaccacagggcatcctggctactggacgagaccgtgatgaagatggagacgtcaacgacactggtagcagttcgagccacagcgtggagctctcggaggagcaggagccagagggatggatcgctagaccaatcactcgcgacgccgctcgcagctgtcacttccacgatgctctcgacaccttgctacaggccttctcaaagcactactctatcactgagagggatactgccgaggctgccatgcaatatggagcacgacgtgcactttcacagtattgctcattgttctgcaaggtatctgatggccttgacctaaagtactaccctcacccttcgaccggcagtgctggaggtgtgattgtctcgcctgttggtgaaggcaatcccaggctgaacagcatggtcaacctggctgccatgctcaacaccgagctggaccacgcccttgacgagttgggcaaggtttgggtggaagttgcggaactgcgtgctgagtgcgcagcacgccgctatctggatggtggttctcccgcacctatcgggattcagcacccgtaccgttcaccaccccatggtcacttcgcgtacggtaccccaaactgtaggacccagatagatttggatccctaa

SEQ ID NO: 59439 - DNA, 383 bp, Zea mays
  Clone ID: MRT4577_154204C.1
ccaaaaggaaaaagcccccttcaaccattttttttccccataatggatacacaaaaattttgcccaaatgggacccttaattggacggggcccttaggttaacataattgcagaaaatcctggggccgttgggcttttaaaggctgccatctttggtttttcctgggccctgttttttagccctccaaatgggggccaaccgggggcctattttttttttcggggggggaccttttcctaaaaataacccggaccaaggggacaccctttttaaaagttttctcaggggggcctgatgtggcagttcctccccctttatatgcccaaatttttcccttttggggtgcggcctgcctgttttttttgaccccccgcccccctcg

SEQ ID NO: 59440 - DNA, 215 bp, Zea mays
  Clone ID: MRT4577_154205C.1
aatatttttcttaactttaattcactttttggggttttattaacatgttctttatgtaccccccccaaaggcccgtttttctcgggacggcaaaaaaaagagcccactgataaagcaatgcacaggtagcggccaattccccaaaagggaaaaaccccccatcctaagacatttgggggaaaaaaagttttccccctgagagaaaaccgcctcca

SEQ ID NO: 59441 - DNA, 415 bp, Zea mays
  Clone ID: MRT4577_154206C.1
catcccacatggattgggggggattggaaaaaaaaaattttcatttgatggtcgatggcaatccaacacaaacgggtggggtgacaggggcaaccttagacaataattgtttttgctaacagttacatgcttttgagcccccctcaaccaccatttttttttcacaattgtgggaacacaaaaaacatggtctacatttttaaagtaccctttttatttggggccacatgcagctaccctttttgttttgatttattgttgaccctggatttgcttttcaagctgaaacattttttggaattttttggccaaattataaaactttttttttacaacagccaatgccattatgcaccccttttttttttttttctgacataacttacggaactggtttcaagtaaactttattttt

SEQ ID NO: 59442 - DNA, 623 bp, Zea mays
  Clone ID: MRT4577_154207C.1
cactttccacattccagttccactgcgggggggggggcggtcgccgactccgaaactccgacagtccgaccacaaggtcttgtgcaggatccacagaaggatgagtgaagaggataaggctgctgcttctgctgagcagccgaagaggcccctaagctcaatgaaaggatcctctcttctctgtccaggaggtccgtagctgctcatccgtggcatgatcttgagatcggtcctgatgctcctgctgttttcaatgttgttgttgagatcacaaagggaagcaaagttaaatatgagctcgacaagaaaactggactgattaaggttgatcgagtcctgtactcatcagttgtataccctcacaattatggtttcgttccgaggactctttgtgaagacaatgacccaatggatgtgttagtcctgatgcaggagcctgttgttcctggttcgttcctgcgagcaagagcaatcggccttatgcccatgattgaccagggtgaaaaggatgacaaaataatagcagtctgtgctgatgatcctgaatatcgtcactacaacgacatcagtgagctgtctcctcatcgcctgcaagagatcaagcggttctttgaaagatataa

SEQ ID NO: 59443 - DNA, 379 bp, Zea mays
  unsure (1)..(379): unsure at all n locations
  Clone ID: MRT4577_154208C.1
aaacggcgagaacaacaaatgagacttcggggttcagttcattgcactacctccacagctacactactctgcttccctcaagcggagttctcattcgaccgcgtgcacgagatcatcgaagaatcacgtgcgttttacatcacacgaggaaatgctgcaggtaccggagcccctcgtcggcgcacacgtaccgacactcgcacatcactccgagcctcaccttcccgacggccttctcctccccagccagctctaccaccacctccgcgtccagcttggcgccgccgcagccgggcgcgggcngcctcgccgngacccccgcctcacctctgtcgccgnaggcgacggctcctgccgtccttgccgccggcgccttggc

SEQ ID NO: 59444 - DNA, 1377 bp, Zea mays
  Clone ID: MRT4577_154209C.1
cctcgaggccggccggggttgctcctcatttccactttccactccgcctccgctgccgatcgccgtccccgaccgcagtgcaggtgaggatccaaccccaacaaacttccaggcgacggactgaggatgagtgaagaggataaggctgctgcttctgctgagcagcctaagagggcccctaagctcaatgaaaggatcctctcctctctgtccaggaggtccgtagctgctcatccatggcatgatctcgagatcggtcctggtgctcctgctgtattcaatgttgtaagtaccatcattgctttctaacggcttggcatgttatatgtttgctctgctgaaacatttgatgcacctacaacatactggtacatgagtctgttgacagtggtttgcttgttgaggaaaaataagtgcatggttttttttaattacgatatttaacaaatctagttagctccaaacaatgaccgtgttatataattttttattcaggttgttgagatcacaaagggaagcaaagtcaaatacgagcttgacaagaaaactggactgattaaggttgatcgagtcctttactcatcagttgtataccctcacaattatggtttcattccaaggactctttgtgaagacaatgacccaatgggatgtgttggtcctgatgcaggagcctgttgttcctggttcgttcctgagagctagagcaattggccttatgcccatgattgaccagggtgaaaaggatgacaagataatagcagtatgtgctgacgatcctgaataccgtcactacaacgacatcagcgagctgtctcctcaccgcctgcaagagatcaagcgcttctttgaagattacaagaaaaacgagaacaaagaagtcgcagttgatgcattcttgcccgcgacaacagctcaagaagccattcagtactccatggacctgtatgcccagtatattttgcaaagcttgaggcagtagattgcaagcaacaatttatctatcatgcgtcttggatgggggcgtgattttaataagccaaatcgcttgctatattgggaaccttggaattgagaacagcgtcactagctgtgattcgctcctttctcgttaaattatcatatgaataggccaagtccatacgtttaccgtgtggcgctctgtcagtcttcgtctacccaagtagctagctgcatggagggatgtctagcgttgctatgagatggcactcgtgggtctgcgggctggctacatgggtccgttcctgtgttttccgtaaaataaaattataattctatataattgaatcatttaatttatgtgatctttttgtgtattccaatcagttattgagtgtgacgacggtgtttttggct

SEQ ID NO: 59445 - DNA, 312 bp, Zea mays
  Clone ID: MRT4577_15420C.1
cgacaaacccctaaaataaatacatgttttagtttgttaattaatatatatatcagtgtggaataaagataccaggatgtggacctataaagcataagcagatcaaatactgatacatgacgggggcgatgccctaatgcagcagcgggaaatgaaaagcaggctgacgagtgttaagaaaataggatatcatgtattgtcaaacaaaaacaataatcaaacctggggcaattataatatttaatttgtgtggcaacctatattgaggtgtaaggaaaaaaaatgggggtggccactttatatgattcaagc

SEQ ID NO: 59446 - DNA, 345 bp, Zea mays
  unsure (1)..(345): unsure at all n locations
  Clone ID: MRT4577_154210C.1
cccacgcgtacgtccacgcgtccgttcactcgtgcttgtagatctgccactacccttcgcaatctagaaaatatnactcctatacatagccacacctattcccgtatccactgatgcatccaagcccatgccagctgtacagaacccgcagtatatataatacctcaatactggcccacttcgtagatttcctcatgcattacagtagtctcaatgcatctccctactaatggggtaactaccagaatttcccataccagtgttttcaagccctcatgctggtgaaaccctagcttctctaccatgctaaaccctgctatgcattccactatatcctgctgtagc

SEQ ID NO: 59447 - DNA, 484 bp, Zea mays
  Clone ID: MRT4577_154211C.1
ctcccagtcaaggactccaccgcgcagtcgtagttggatagacaaggagcagttaaacgcttggagacgtctcgtccatcatgcagatcttcgttaaaaccctaacgggtaaaaccatcacccttgaggtcgagtcctctgatactattgataatgtcaaggccaagatccaagacaaggagggcatccccccagaccagcagcgtttgatcttcgccggaaagcagctcgaagacggccgcaccctcagcgactataacattcagaaggagtccacccttcatctcgtccttcgtcttcgtggtggtgccaagaagcgcaagaagaagacctacaccacccccaagcgcgtcaagcataagcgcaagaaggtcaagatgtcgatcttgaagtactacaaggttgactctgatggcatgatcaagcgtgtcacgagggagtgccccaatgcccactgctgtgctggagtcttcatggccttcca

SEQ ID NO: 59448 - DNA, 1569 bp, Zea mays
  unsure (1)..(1569): unsure at all n locations
  Clone ID: MRT4577_154212C.1
cgggtagtctatatcttgctcggatctgcccacagcagaccatcgatcacttggtcttcgagctatctcagagaatgctcgaggacgacgaagaaccagtcaggcttgggaaggttgatgtctctgcaaatgttgtattggagttttctcaagggcctactgcctctcaggttgcaacagttgtggatagccagcctcacatgtccccccttcttgttcgtggttcacttgatggtgcagttagaaatgtcagtggaaacctgagctggcggacatctgcagttaccggccgaagtgtatctggcccattgagtccgttggctcatgaggtaagcattccaaacccaacggcaggccgatcaggacagctacttccagcgttaattactatgtcggggccattgagtggtgttcgaagctctgctggtaatctgaggagccgccatgtttccagagatagtggtgactactactttgataccccaaactcaacagatgatattttgcatcaagggggcagtggaattcacgggatcaatgccaatgagctccagtcagcactacaagggcaccaacacttgctttcacgtgctgacatagctttgattcttctggctgaaattgcttatgaaaatgatgaagactttcgtgaaaatttacctctgttgttccacgtcacatgtgtttcgatggatagctcagaagacattgtgctcgagcattgccaagatttgctcgtgaatctcctctactcgtggtaagtatttccgcttgaactgtatgagatcgaaagtagtgaaagagagaataagcatcatgtggtgagcttgatcaaatacatccagtctaagaggggcagcttgatgtgggagaacgaggaccctacccttttccggatcgaacttcccagcgcttcactcttatcagcacttgtgcaaagcatggttagtgctattttcttccagggggaccttcgtgagacttggggttctgaagctcttaagtgggccatggagtgcacatctcgtcacctggcttgccggtcgcaccagatataccgtgccttgcgtcccagtgttaaaagtgatagctgcgtattgcttctgagatgcatccatagatgcttggggaatcctgttccagccgttctgggctttgcaatggagatactgctgactttacaggtcatggttgaaaacatggagcctgagaaggttatactttacccgcagctcttttggggctgcgttgcactgatgcataccgactttgtgcacatctactgccaggtgcttgagttgttttgtagagtaatcgatcgcttgacattccgtgaccggacaacagaaaacgtgttgctctcaagcatgccacgtgatgagtttgacatcaatgggtatgcaagtgacctccacaggctggagtctagaactacttcagagagattgctatctgtgactgggaccgggaaggtgcctgcttttgaaggggtgcagccgctggtgctgaaggggctcatgtccacagntagccatggatctgcaatcgagntgctatctaggatcacga

SEQ ID NO: 59449 - DNA, 818 bp, Zea mays
  Clone ID: MRT4577_154213C.1
ccccgcgtccgcgaccacacaaactgacggaactgctctcagctctcctcacgcggtcacgccctgcagaagcgcaggggctaaacccccctctttagcccctgctgccgcttgccactactccgcttcgttctccgccgcctccccggacgtccggaaacttctagattgaaggggatagccattggcgtcaacgtgtgtgatggaggtcaggggactggggcagctcctggcggcgctggccgcggcgttcttcgtccgcgccatcgcgggacccggtcccgccctccttccgccggcggaggacacggaggccgacgaggccgacgcggaggctggcgagggaggtggtggtggtgtgccgcccgtgaccatccggtgggctcgcatcacctgtgcattgaagaacaagcgcggggaagtggcaaggtttctgttgtcaaatgtgtcaggggaggcgaaaccggggaggctgcttgcactaatggggccatcgggctctggcaaaacaactttgctcaatgtgctagcagggcagctcgccgcatcgtcttccttgcacctttccgggtttctgtatatcaatggtcggcctatctcgaagggcggatataagattgcttttgtcaggcaggaagacctgttcttctcacagctcactgtgcgggagacgctctcacttgctgctgagctccagcttcctgacttgtgggctcctgagagaaagagagctatgtcaatgatcttttgttacgtatgggggtggtcaattgtgctgattctattgttggtgatgcaaaattcgtggaatagtgggg

SEQ ID NO: 59450 - DNA, 142 bp, Zea mays
  Clone ID: MRT4577_154214C.1
gttcgccctaatgagcccgacacacccgaacttttacatcttcctggccttgaactggggccatgttacaaccaaacgcgagctatcaatgcgcccgtcccaccgcatggcgaaagcaacgaatagggcgtgcatagccatg

SEQ ID NO: 59451 - DNA, 679 bp, Zea mays
  unsure (1)..(679): unsure at all n locations
  Clone ID: MRT4577_154215C.1
tcgagccggcggggatgccctcttttccaccgtttctttcctcacctcccgcgacagcaccggtagctgccatggcctcttgcgacctccttgatgtcgaccctctggagcttcagtttccgttcgtgctcgacaagcagatcccctgcccgctgcggctcgccaacaggactgaccgtaccgtcgcctttaaggtgaagacgacgaacccgaggaagtactgcgtgcgccccaacaatggcatcgtaccgccccgatccttgtgtacggttgtagtcacgatgcaggcgcagacggtggtgcctccggatttgcagtgcaaggacaagttcatggtgcagagcgtggtcatcagtgatagcttgtcagccaaggacataacctctcaaatgttcgcgaaagaggggggtaatgtgctccaggaggtaaaattgaaggttgcttatgtgatgccacctgaaccaccatcagagattgcagaggagcacgatggtttagatcgagttttagtgcctatgcagaggatcgtggataatgggaaaagtacttcagagctatcgagtggctccgtgtcattgaggtcagctgaggagtttggatcacctgttggtcgaattgtgaagagtgaggagtttctgaaggctgcanngactgctatggaaacaaanacatatgcagg

SEQ ID NO: 59452 - DNA, 258 bp, Zea mays
  Clone ID: MRT4577_154216C.1
ctagattacaatgttatatttgaccttgtggacagtcattttgggtgaactgtgaactaaactaatgatctcaatgtcttggagcttagacattttgttttaagttaagctgagctcagacattttgttttaagttaagctgctcgacattttacggcagtcatgtatagagctgaactcctatatgtatggcaatatgtatgactatcaaatttgtcgtctattcatctaaaaaaaaaaaaaaaaaaaaaaaagaaa

SEQ ID NO: 59453 - DNA, 217 bp, Zea mays
  Clone ID: MRT4577_154217C.1
cttcaaagaaagccacattctctgagggagcaacgacctaccatacgagctcatctcaccattacgtattgaatttaactcctcattcaacaatctcaaagattttgaataaaagaagtctcagctctaccctgtctatagctacaaatccaccatctcgaacatcatactcaatacttaacacaacatggagatctacacactttatatacatgat

SEQ ID NO: 59454 - DNA, 394 bp, Zea mays
  Clone ID: MRT4577_154218C.1
gttcgctgttgctctctccagtagtcccgttgagtgacctcccctgctcgacaactagttcgaccgccgccgccccacgcctgctggccaggtcttcggcggaccctttgccgtcgacgggcatccaccacaccagggttttgcacattaatgaagacttaaaagttccagaacaaagcactaagggtgctcgaaggaaaaatgctttaggttagatcaaaccatggtttttaaagcggtaaggcggtccaaggcgttggagcaccgtctggacgcctaggcgaggtaggtgggcaaggcgcctaggcgttagaccaccgcccagactcctaggctactccttaagaacagtggatcaaactgtagatcttgccactgccttcaagcatcctat

SEQ ID NO: 59455 - DNA, 546 bp, Zea mays
  unsure (1)..(546): unsure at all n locations
  Clone ID: MRT4577_154219C.1
gtggaacggncaaagnatgtggctggttaggagaacgacctcgtacctctacggcgccgtcgacaccgtcagggactcgctggggctgtccaagatgggcttcgtggtgtcgtccaaggtgagcgacgaggacgaggccaagaggtacgagcaggagatgatggagttcgggacggcgtcgccggagtacgtgatcgtcgcggccgtcgcgctgctcaacctcgtgtgcctggcgctggcagcaggcggcggcaacgggatggcggcggcactggacgtgttcttcgtccaggtcgctctctgcggggtgctggtgctcctcaacgtcccggtctatgaggccatgttcgtcaggaaggacagggggaggatgccgttcccgatcacgctagcctccgttggctttgtgacgctggccctcattgtgccattcttttgactttgaggtgctaataatacgtgtacggccacacgcacgttcgcatgtatgacgattatgggcaacagccgtgtaatactaccaattaggccccgttcatctccggg

SEQ ID NO: 59456 - DNA, 1066 bp, Zea mays
  Clone ID: MRT4577_15421C.1
aaaaatccaagaagaaaggagcatagaacataagaggagagaccgcgcactacacacctcacgcctgaaggccagatctaagccttctcgtcctcgcccaaggacaacgataaacatctaagaaccaaacaaatcagagcacgaccatcggtctctaagcaaaacgcgcagcacgcacgtagcagagcgcgcatggggcttctggaccagctgtgggacgacacggtggccgggccgcgtccggactccggcctcggcaagctccgcaagcacgcgtccttctccccctcgtcggccgcgccgtcgccgaccgcggagggcgcggcgccgcccgccgtgacgcggagcatcaccatgctgcggccggcggcgctgtccgtcgccacgtcgccgcgcagcgagtccagctccgcgccgtcgtcgccgtcgcccgcaagcggcgctcccgactcgcccttcggcgcagcgacgacgcccaggggagagggctggaagaagctgcgccggaaaggcaggatggccgacggcgccgacgcccccggcacgccgaggagccccaccgtgtacgactgggtggtgatcagttcgctggaccgctgaagcagccggccgggccaagacgaggaggacacagcacaaggatggaggaaggcagccaccatcagcagcagctagcggactgaaggaggatcggaacagagaggccccccggccatgcgacctgcttaacagagagcttctggtcacggttctgttatactacgcgttaacggtgtatgtatatacgtcatcttcctgtaaatctccgtggtgtgaggtgctgctgattttgaagagagtgatgctcctgttatgtgctactagctagctagtgctgttgctgtatgagtacagtgtagtctactattaagggttgtcgtttggactgttagtctatagagacagaaaaatgtagaagtacgtattaaagccaatcgaatagacatgtttgtcgccatgtaaaaaaagtataatcctacgtatactcgtacgcaacgatagtaatgcgtgcttgagtgttgtggac

SEQ ID NO: 59457 - DNA, 2440 bp, Zea mays
  Clone ID: MRT4577_154220C.1
gggacctcgagccggcggccggccgggggattattattattattattattcggctcctgctcatcagctgcagcagtcgtgctccggaccggagaagtcgaaatggaggagaggctgttcgccacggagaagcacggtggccgggcgctctacaggctccacgccgtcacggtgttcctggggatatgcctgctgctctgctacagggcgacgcacgtcccggctgccggctccggcggcagggcggcgtggctggggatgctcgcggcggagctctggttcggcttctactgggtcatcacgcagtccgtgcgctggtgccccatccgccgccgcaccttccacgacaggctcgccgccaggttcggagagcggctcccctgcgtggacatcttcgtgtgcacagcggacccgcggtcggagccgccgagccttgtcgtggccacggtcctgtcggtgatggcgtacaactacccgcccgcgaagctcaacgtctacctctccgacgacggcggctccatcctcaccttctacgctctgtgggaggcctccgccttcgccaagcactggctcccgttctgcaggaggtacggcgtcgagccacggtcgccggccgcttacttcgcccagtctgagaagcctcgtcatgatccgccgcacgccttgcaggagtggacgttcgtcaaaaacctatacgatgaaatgacggagcggattgactccgctgctcggacgggcaatgttcctgaagaaactagagcgaaacacaaagggttttctgagtgggatacgggtattacctcaaaagaccaccacccgatcgttcagattctgatagatgggaaagacaaggctgtagctgacaacgaaggcaatgtgctgccgacgctggtgtacgtggcacgagagaagaggcctcagtaccaccacaacttcaaagccggggcgatgaacgctctgatccgagtatcgtccgtgataagcaacagccctatcatcctgaacgtggactgcgacatgtattccaacaacagcgacacgatcagagacgcgctgtgcttcttcctcgacgaagaaacgggccacaggatcgcgttcgtgcagtaccctcagaactacaacaacctcaccaagaacaacatatacggcaactccctcaatgtcatcaaccaggtggagctgagcggcctggacgcttggggcggcccgctgtacatcggcacgggatgcttccataggagggagaccctgtgcggcaggaggttcaccgaggactacaaggaagactgggacagaggaaccaaggagcagcagcagcaccgccaccgcgtcgacggcgagaccgaagcgaaggccaagtcgctagcgacctgcgcctacgagcacgacgacgacacgcggtggggagacgaggtggggctcaagtacggctgctcggtggaggacgtcatcacggggctggcgatacactgcagagggtgggagtcggtgtacagcaaccccgcgagagcggcgttcgtcggcgtcgcgccgaccacgctcgcccagaccatactgcagcacaagcggtggagcgagggcaacttcggcatcttcgtttccaggtactgccccttcgtctttggacgacggggcaaaaccaggttgccgcaccagatgggctactccatctacgggctatgggcgcccaactcgctgcctacgctgtactacgctgtcgtcccttcgctgtgcctgctcaagggcacccctctgttccctgagctcacgagtccgtggatcgcgcctttcgtctacgtcgcggtcgccaagaacgtctacagcgcgtgggaggcgctgtggtgcggagacacgctgagagggtggtggaacgggcagaggatgtggctggtccggagaacgacctcgtacctctacggcttcgtcgacaccgtcagggactcgctggggctgtccaagatgggcttcgtggtgtcgtccaaggtgagcgacgaggacgaggccaagaggtacgagcaggagatgatggagttcgggacggcgtcgccggagtacgtgatcgtcgcggccgtcgcgctgctcaacctcgtgtgcctggcagggatggcggcggcactggatgtgttcttcgtccaggtcgctctctgcggggtgctggtgctcctcaacgtcccggtctatgaagccatgttcgtcaggaaggacagggggaggatgccgttcccgatcacgctagcctccgttggctttgtgacgctggccctcattgtgccattcttttgactttgaggtgctaataatacgtgtacgggcacacgcacgttcgcatgtatgacgattatgggcaacaggcgtgtaataccactaatacctattaaacactccagtctccaagtgatccattgctaaaaaaaaaagggcggccgtcgcgatctagaac

SEQ ID NO: 59458 - DNA, 164 bp, Zea mays
  Clone ID: MRT4577_154221C.1
tttacatttgcaaccacatcctctagatctaggcctggggccttttgtgctcggtgatggagcccaacccgctggcgggcaagaacatggaccacgtgttgctgtaacccaccatcgacatctgatgcttgacctctagccacacagaacgactactcccatat

SEQ ID NO: 59459 - DNA, 348 bp, Zea mays
  Clone ID: MRT4577_154222C.1
ccggccgggacacggatcgtaaaacgaattaccctcggtgcgctccctctggccggtttcaatcactggccggatcggccaaacacagacgcacgctcccctgatactctccgccactctggctgcgggcgccctccgcgaccgctcgccccacgcaccacgcgccgccccccccccgcccccctggtgccggtggccccgccggcgacctgcccctccccccgcgtgctcccccctctcctgccgggctccccgcctgccctgccccctccccccccgccccccccccttgcgccccccccccccccccccgtccccccggtccgccccccattcccccctcccccc

SEQ ID NO: 59460 - DNA, 387 bp, Zea mays
  unsure (1)..(387): unsure at all n locations
  Clone ID: MRT4577_154223C.1
aaaaaaaaaaaaaaaaaactttataaaagggacagggggccccttttttaacagggaatagctaactgctttggggggcanttgagagagactgcaaagatccttagccaggagcccacgggtttattaggcttgctctaggactgaaacaatgcacggggggggatctgaataattaggggagagctcaccgggcgacattaacagaagaactgtgtttgatcgacaacagactccaaaggcactgaaacaagcactgggctggagcacccttttttttttggtgggggggccaaaattcccgccaagtttggccccccatagcaaatataggttagatgactcagctttcattttcatttacagggttcacccctccaagggaac

SEQ ID NO: 59461 - DNA, 389 bp, Zea mays
  Clone ID: MRT4577_154224C.1
agggtcattaaaatacatgcataaacttaccatgaaaacatgaggagagtaacgaacagaacagaaaccactcctaaaaaaacaaacaaagaccgcacagcccaacctaaacggcaaacacccaagcacagacaacaacccacgccacagaacaacctgagatcatatgaaatacacacgagcacataaaacccgacaatcttgcctaccacgagggccgtgggcaagcaacagcccactaccaccaaccagctaacctgcaagacagaccaagtccatgcggcaccacggccaagtggaacagaaagacgcacccggaccagcggaacccacatacaaaacaccttctacgagcccaaaaaaacccacccagggccaagggaacaaac

SEQ ID NO: 59462 - DNA, 237 bp, Zea mays
  Clone ID: MRT4577_154225C.1
ccgattcccggtcgacccaggcggacgcacgcgttcgccacgcgtccgcccacgcgttcggccagtagcttcaggacgtgagctccgggtgccgttgcgaccatcatccggagcgtggtcaggggctacgatgaggccatgccgacgatcgaaaaaggctggtggccatgggggcgggaacatcatgcatcaacgtagacctgactagaaggacacgaaccctactactacttctgc

SEQ ID NO: 59463 - DNA, 474 bp, Zea mays
  Clone ID: MRT4577_154226C.1
ctagtcggcgggcgcccttttttttttttttttttttttatatttttttttttttttttttttttttttttgggtggggttttttaaaaaaaaaaaaaaaggcccctatattatatacattcattggcaagtgggcaccaaataatcccaaccataacgctagggcacttttttttgtgggggtattaaaaaaccgggcggggacatgcacatgcatttactttcgtttttaaataaacacctggttggtggggattaaatataattaaccacccggcaggtgaaggggaccttttctttttcccgttttgtgaacgggtggatttttcccatttttaaaatggactgggcgaaactttttaaaaaaggggtctttttgttgggaaactgttttaaaaaaggcgcggggaaacctttttcttttggcgccgaatttaattttttgttccagccgaggaaacccccgttaacctc

SEQ ID NO: 59464 - DNA, 285 bp, Zea mays
  unsure (1)..(285): unsure at all n locations
  Clone ID: MRT4577_154227C.1
cgcgagcgcgacacgagcgcacacgtccactcttctacgccgcgagaganctagggatganccccggcgccggtactgccaagaagcgtctcggcgttggctccgtcgccggcggggggttcgcgctcgggtgcggctgcagggacgccaaggccgtggcggtggcggtggcatcgtcgtccgtgtcaccctactctgccgccaccagcaccacggagacgacgacatcgacggcgacgaccgcgacttggcgcagggcgaggncgacgacgacgcacccgtcgt

SEQ ID NO: 59465 - DNA, 679 bp, Zea mays
  Clone ID: MRT4577_154228C.1
ttgcttatacgactcgacgggcgattgagccatgtaatagagatgaaagcattaccataagctctttcgtgggaacgcatatcatagagacaggataagaaaaaagaaatttgatcagatcaatagaaggaatggaccataaactgatgggaatcttataacttctttaaataggatatactgctaagtcataccatactttgactatgatgactgaacgattttctccattatgcgaatacctatactattagaagtatattactatgatatacattatgtaaattgatccactttaaataagtagaacaattcgaacgaaaaatattatgagagagcaatattaacacaggatgtttggtgatataattgtgaaagagagccctttgatgcaggatcactcctcattaggatgattatatgaatcatcctactttaatatatattaaccatcctattggaatcatgccctaacgcacgtactaataggcaatttcttttttattgaatagcgtctgactatcattaaatatagggtacagcattgcttttttctagagattctatagaaagtgagacaaagtgaaatgaaagagcattctttcgctaaatactaggcgtatatcatatgtgaatagacgggagatcactaagagggaagtggcgatcacattggatg

SEQ ID NO: 59466 - DNA, 437 bp, Zea mays
  Clone ID: MRT4577_154229C.1
ccgatcgggccattggggacggggcggacaacgcgagtaagcactaccctcctcaactcctaccctccgccgaaaaccccgcctgttctttgccggagcaccccctccccgtttccagccccagactcgtgccccccggcacttcgatacccttctgagaccgcctgtctgctcaaagcgaaacagactcctgcttatacgcaaggtggagatgcgtccgggcacgcatcaatttcttcggacgatggtcctcgggttcaaatatctttacaaaatcgatggaaagccctaaatctcctcatttttttttttccacccacctagaggtgccttctgaaagaaatcgcccccgatttgtcaatgacggtattttattcagaaactgtccccaatggtagtgttcaactctgaagccccacatgaactgaaagaaaacc

SEQ ID NO: 59467 - DNA, 418 bp, Zea mays
  Clone ID: MRT4577_15422C.1
tttttttttttttttttttttttttctctttttttttttgtttttgtttttttttttttttcttttaaaggccaaacccttcattaaaaaccagctcattaaaatgttcaaaccaactaaaccccctcttaattcttccccaaatttcccccaaaaaaatcccatgggtgccggagggcccttaaaagtttgttattcccccttttccccgcccggatgagggaaaactccaaacctctaataaacccttgatttaaaaaaaaaccttactggaatttttcccccaaggggaacccttaaaaaaccacccttggcccaaaaaaaaagggccccatttctggatttgacacccttgcaatttcacggactgaaatccaaagcccaaagacttttaccaccctcttccatgttacgggcc

SEQ ID NO: 59468 - DNA, 1038 bp, Zea mays
  unsure (1)..(1038): unsure at all n locations
  Clone ID: MRT4577_154230C.1
ctcgaggccggccgggagtacgtcgtgggaatccacaccgtgcgcgccacgaagggcctgcgcacccgtgtcacgccgccggaccgcggtttcgcgccatggccgtatctgcgcaagggtaccgcacccgcgtgccgggggctgtaaccgtacgcgcctgggaccgcgcgcccgtgccgccacacctggccgttacagcacaccagggctccgtcgtcgcgtgcggaggatgcggtcgtgcacgcagatcggggcctaggccggtgcccgcgcgcctgcgctgccagggggctgtgccccgtgcagccgagcccggaccgccgtcggggctgcctcaccgcgcccgccgccgaggctggggaccgcgtcgcctccggtgccgaggctgggtgccacgcacccgcctggctgcctgcaccgccggagccgccagggacgagaccgtgaccgctcctggtcgggccgaccaccggcgagtcggggctagggcccgcgcgcgcctggccgaggccggggaaggaggccgcgcccgccgctcctggccgggccacccgctggcgagccggggctgggggctgcgccagccgcaatgagaccgcgccatggccgggtctggcccgtcgccggggccgaagcgctcggctgctcaggctcgagcaccgcgcgaggccgcgctgtggcctgcctgtgcgcccgcgtggcagcggcttgcgcacccgcgaggcggcggcggtggcggcgccctgctgctggtggaagagagagagggccgcgacaagacgagttaggaaaccctaactgcttgcccacctcctataggccgcaaatgggctggctgttttggcccatttcgacaaggattattttttttggctgaatatatttacaattattatcatcactgtatctatatttaaatatttagattattgatgatatatgtaattgtgcgtacttgtctggtttcataatgtatattgcagactcgttcatgaattatatttgtttttacatttaannnannnnnnnncnannaaa

SEQ ID NO: 59469 - DNA, 161 bp, Zea mays
  Clone ID: MRT4577_154231C.1
cgtgctctctgcagaggcacggatggtctgcggccagggccgaatgatccgccgcagggatggttcctgtctgacgggctggctggtcgaacagtccgctcgtgcacaggggcggtgaattttgtcggcggcgccgggatctaactcccggaaaagatccc

SEQ ID NO: 59470 - DNA, 176 bp, Zea mays
  Clone ID: MRT4577_154232C.1
gatacgcatgcttgaaccctatgtttcatattgggacccatacttgtagagtggcggggatttgatctacgataagttctatctctagctctacaggcagctgatcctgctgattaacaacctagtcatcgatcaggtgctttgtcaagctcaacatcatccacatcgacgatctt

SEQ ID NO: 59471 - DNA, 522 bp, Zea mays
  Clone ID: MRT4577_154233C.1
gtgccttatgaaaaaagaagtgagtcaggaatctcattcttatcgctcagttactcccttcgcattccattgtgacttaaaactcctctccatgaatagcatcatcatcgccatcgccgtcgtagtcagcatcatcagaacctaggggcatctcagacttgatatagtctttgaaacccttgctcatcttgaccacggcacgaacgtgcttctccccaatagtaatagtcgggagaccttcctcgttagagtcgctctcggccaaagccagcgccgtctgcatggcgttacgaatctctcgtccattccacttgagcgcgcgaacttcctgactggaccagataaactggcgggccacggtggcgacgcgaatcctgccgtgagaatcacggttcaggcggtcaaagttgtgagtccagatgcgctcgcggtcttcgtcgctgaggttcttgtagtgcagcgcgacgtggatgcggctgaggaaagcagtgtcgaaagatcggacacggttggtggtgagga

SEQ ID NO: 59472 - DNA, 411 bp, Zea mays
  Clone ID: MRT4577_154235C.1
gccaatttcttttggtgattagtgcttgataaaatagtggaacagaagtaaatggtaagcttgttatcataatggttggaaagagctaacgtcacactcttgataacagaaaatcagtaaataaaattgctaggtatgacaacagaaaagtaatgataatcttcagaattgtagcgctgtgtttgatagtactctcgtgtgatgccatctaagacccgaccactatactgaaaacttcttcaaacatttttctttctttcggatctacttatgtttcaaggtctataggtgatgcatactttaagaatcgagaattctctgatgatccatgcacagctcgtctccacctctaggaacctctccgccatgctgttctgacgtcagaaccatctatatcttgaagaattcttg

SEQ ID NO: 59473 - DNA, 273 bp, Zea mays
  Clone ID: MRT4577_154236C.1
ttgggtttttttaagactagttggggttttaacccgcattcacaccaaggcgacacggatgggattgaaacagaactcgcctgcaaaaagtttatgggcctgatagaacacaattgccaaaatttaaccagctcctgggcaaccccacataaaccggtatagttagggcacaaaatgggaaaccgggagtgaacgtaaaccacaccagcaagacgaggagttcttttgaaccctcgagctaacaaacctgaaataaagaacgccccctaaaac

SEQ ID NO: 59474 - DNA, 432 bp, Zea mays
  Clone ID: MRT4577_154237C.1
ctccctgtgctctactgctcttgcgccttgctagcttgcttgcttccctgctccctccctcctcctcctcgtcgcctcttctctggttcttcctggtgtttgccggagcgaggctaggcgcaggggagggagctgcgctcagccagagctcatcggcgctacgcaagcgcgctgcctgggtacgtatctcttctcgtctctctcgaggtctgccttgtctggtcggagccggaggtttcgtcagcgcaacttctttgctcgtctctcggtggtctctgtagtagtatccgtgcttcttttcaactcttttgcgtgcgattgagccggggacggccgcctctcacggtgaatttagtgcgaatttgtgggcggcgaggagatttcgacgcgcttctgagaaacgcggaaccgttctgctcttttctgcgtgga

SEQ ID NO: 59475 - DNA, 312 bp, Zea mays
  Clone ID: MRT4577_154238C.1
attcggctcgagcgtgcatgcacactgattcatttggcataccgttcatcccatggctgagagccatgctgcggctcctgcgtctggatgctgttccatatctcttacttacacgcctcctactcattacttgacactggtcaagaacctagtgcttcccaactgatcgatcatgtgtacaaagctctcaagcaggccagacagtaactgtcttacttgtgacccaccacgggactgtaccaggctagatacccagatctctacgagggcttgcatgttattgagcactaaaacccgcttgctagcttaatc

SEQ ID NO: 59476 - DNA, 673 bp, Zea mays
  Clone ID: MRT4577_154239C.1
gagagttgtcgtctgctgcagggatggccggcgtcctgccgaggtttggccccttcggccctctgccgccatcggatgagttcgggatcagggagacgagaccccgtctcgccggcaggcgggccggcgggtacgacctcgtggagcggatggagtacctgtacgtgcgcatcctcaaggcgcgggacctcaagtggactggcagcttcgacccgctcgcggaggtgaagctcgggagctactcctgcgccacgcggcacatcgagaagacgacgagcccggagtggaacgacgtgttcgcgttctcgcgggagaggatccaggcctcgttcctggacgtcgtggtcaagggcaagggcttcgccaaggacgacttcgtcggccgcctgcgcttcgacctggccgacgccccgctccgcgtgccgcccgacagcgcgctcgcgccgcagtggtaccacgtcttcgacaagaaggcggagcgcgggggcgaggtgatgatggccgtgtggttcggcacgcaggccgacgagtgcttcccgctggcggtgcacgccgacgcctcgttcgccgtggacgccaagctggccgcgcacatccgctgcaagcagtacaccgtgccgcgcctctggtacgtgcgcgtcaatgtcatcgaggcccgcgacatcgcattcgc

SEQ ID NO: 59477 - DNA, 809 bp, Zea mays
  Clone ID: MRT4577_15423C.1
cgtacgcttgggagaacataagcggagagttcgtgctacacacctcacgcctgaaggccagatcacgaccaaacaaaacagagcacgaccatcggtctctaagcaaaacgcgcagcacgccgggcgctccacggccacgcacgtagcagagcgcgcatggggcttctggaccagctgtgggacgacacggtggccgggccgcgcccggactccggcctcggcaagctccgcaagcacgcgtccttctccccctcgtcggccgcgccgtcgccgaccgcggagggctccgcgccgcccgccgtgacgcggagcatcaccatgctgcggcccgcggcgctgtccgtcgtcacgtcgccgcgcagcgagtccagctccgcgccgtcgtcgccgtcgcccgcaagcggcgctcccgactcgcccttcggcgcagcgacgacgcccaggggagagggctggaagaagctgcgccggaaaggcaggatggccgacggcgccgacgcccccggcacgccgaggagccccaccgtgtacgactgggtggtgatcagttcgctggaccgctgaagcagccggccgggccaagacgaggacacagcacaaggatggaggaagccagccaccatcagcagcagctagcggactgaaggaggatcggaacagagagcccccccccggccatgcgacctgcttaacagagcttctggtcacggttctgttatactacgcgttaacggtgtatgtatatatgtcatcttcctgtaaatctccgtggtgtgaggtgctgctgattttgaagagagtgatgctcc

SEQ ID NO: 59478 - DNA, 297 bp, Zea mays
  Clone ID: MRT4577_154240C.1
gccggccgggtccggaacacttgttcattacccaggcacatgtacacaggtgatcacgcttacatgatccgactgctgacgctcgcatgtccctacgtactgacagagcgcgacagtatctcgctgacactgcatgttgtcgccggagccagagattgacatcgtctagtgaattctatatagacgcgcaccgagcagctgatccatagtaatatggtggagagatatcatgtcttcatctatgcatactgtacatgaccgttctgcttaactgctttcaaacaacagggccctacc

SEQ ID NO: 59479 - DNA, 278 bp, Zea mays
  Clone ID: MRT4577_154242C.1
ctatgtcggcccagctccattgcaagatatgccaatgcaaatagctgcaccctatggccctactgcctatcatatacatcacccgttctcaatggacaaagcattaaccatcattagccacgaagattattcgatcatacaacttgcaaacaatttgaggacagcactgaactgaacaactgataccaacatcactcgagccaatgctaccctgaaatcacattccccttttgtgcacctgtcctccctttcaaaatgcacacttgtggactccaaat

SEQ ID NO: 59480 - DNA, 374 bp, Zea mays
  Clone ID: MRT4577_154244C.1
ctcagatgctgagagaattgaaaaacttgatatggaatggaatctgtaaaaaaattatggaagaagagatttgtaaaaaaaacaaactgctagagagaaattcatcaatgagggtgatgaaaacaccaagttctttcatcttttggctaaaggccggaggaggagggttagaattcctttcttaaatcaggatgatgtccctgtgagtgatgccgatggtattaataaaattgctacttcttattataaagatctttttggtcattcggtgatatctaatatcaatatggctcagcgtaacatggaacaattatctgacgatgatagatctttcctgacggctcctttctcagtggaagagatcaagaaagtta

SEQ ID NO: 59481 - DNA, 352 bp, Zea mays
  Clone ID: MRT4577_154245C.1
ccccactaagcgcccccggagtggggtatttcccccttatagtgcgcgcgcgcgacgcgcacgcgtgaagctaccgagataaagcagagccctctcttctagggcgtgaactggactgtcatgtagtgcgcgagacctcaggacataccagcagcccatctagctcgagtgtggcccagagcaagtgccatcagcatacgcagaggcggtgcccgtcagtatccatgagggccaaaattattatctagagctccaatgcttctagtccttggcagataggttgtgccatgttctagaatcgagagagtgcgcctgagctgaagccgagaaacatagcgaaatatgataccat

SEQ ID NO: 59482 - DNA, 305 bp, Zea mays
  Clone ID: MRT4577_154246C.1
gtgtcgtcctgatggtggtcatcgtcacaaacacggaggagggccaggtggtattggtagaagtgggactggagaggtgagacgacagtacgaggaagaacatgaaggctgaggctggatatcaagggtctgtaagtggcgatcaagtgaaagaacagaaacggcgagtacgagacaaaggccgtgagtgagatccaaaatttaggagacttcagagtaccactagtagacgacctacacggtgatgactgacacgcgcagtttcacagtgccgtcaataacacgcattgccctgggcaggagcc

SEQ ID NO: 59483 - DNA, 365 bp, Zea mays
  Clone ID: MRT4577_154247C.1
ccggaaaagcggccgccctccacgggggggggaattaaaagattaaaacgcacggaaagcaaaaaggaaggggaggggggggaggaactagaaaaagcggccccaacggccacagggacaaaaacattggggacagacacaaaaaaagagacaatccaacggcacgaaagccaatggcaagatggggcaaaaaaaggaaaacactccacccctgcgggggggacaaaacggacataacgggccccagggccgccacatcgggcaccggacgccagggcggacgccagggaagaagcatggggggacccggagaaaccggaccgggaccaggaagcgcaccagacgaccctaaagagaggcgaaaa

SEQ ID NO: 59484 - DNA, 175 bp, Zea mays
  unsure (1)..(175): unsure at all n locations
  Clone ID: MRT4577_154248C.1
gtcttcttcaacttagcatatagaattgtttttgccgattcatagccagaattacagcatagttgatagaacaaaaaaagggagctgctcgattctccatcggcaggaggggggggggggaaatttatcatctttnatactaattaacatccccatctcctnataaccctcatcc

SEQ ID NO: 59485 - DNA, 247 bp, Zea mays
  Clone ID: MRT4577_154249C.1
atcagatgctgatatactttgctttgttttgttctggcccaccgaactgtggcaagaagctgtgtcttacaggctggggttagaactcttgaactgatagtcggcttaggagggtcttattgtgcacacagttggttggatgtttttgtgtggtataaaaacgatttcgcgcgtagaaaaaaaagatacaaacaaaaaaaaaaatacagggcggccgccctctattttttattttttaaataaaagg

SEQ ID NO: 59486 - DNA, 777 bp, Zea mays
  Clone ID: MRT4577_15424C.1
atggcttcgcaagaagctcaagcaccttcggctacaaagctggtgctcccaatcacgggcagttcaagctctaagtcagctaacaagaagcagaagaaagaggcacaaagaagggtacatcatgttggagtgcaaggacccttcatcaagtccaagtggtcacacataccaatcaccttctctcaggaggaccatcagctcaaggactacccccataatgatgcaatggtcatatcttgtgttatcaaagggtttctagttcacaatgtccttgtagacacatgcagtgcaacagatatcatcttcacaaaagcctttaggcagatgcaagagcaggatgataagatacatgatgcaacacatcccctttgtggcttcggaggaaggcagatagtggcacttgacaagataacaatgccgattaccttcggctatgttcacaacacaaggacagagcaagttgtctttgacattgttgatattgtaacacccctgagtaagatctattgctcgattgagggtagttgctatagcagaattatagctggtatgaagggctacaagtttgctacagatgtattggcaagttgttgcacaaaaattcaaaatctggacattgcaattcggtctaacaggtgctctgaatcgggtttcaatggtacagtgaccagatcagaacgccagctcagagaactcaccgccggcgaccgtgcgcccggattcgcgcctgccatggggattcgtgctcagcgcagttggataacacagagggagtaa

SEQ ID NO: 59487 - DNA, 289 bp, Zea mays
  Clone ID: MRT4577_154250C.1
aaaaatcttaaaaaaaaaaaaaataaattaaaaaaaataaaaaaaataaaaaatggtagcaaaataaaaaagggctgcgggcatttaaaattacaacaacgattgctaagaacaacattaccattgctccactgttctatactcatttacacatgtcaattcctcttcacaatctatacacactctttatacaaaacttatatcatacacaaaccttaatttttacactcgctactcttccgtaccaacatccaatctcactcgatataaatccctttcactatgacct

SEQ ID NO: 59488 - DNA, 212 bp, Zea mays
  Clone ID: MRT4577_154251C.1
cttacaatgggggtattaaaaaatataaggggcggtaaacaaaaaacacacaaaattaaatttaacaaccaaaaaataatattagcaccacgtaaaaaacaaaacggaacgttgcactaaaggtctcgggaaaagcatgaactaaaacattgtaagtagccataatataccacacaattgtacggtcccattaaacccaacaaaattaaccc

SEQ ID NO: 59489 - DNA, 355 bp, Zea mays
  Clone ID: MRT4577_154252C.1
cggacgcgtgggcggactcgtggtcacgcacactctgtgaggataacgacgcgggggatgttctaatactgttgcacaaacaagttccccctgggtgttttctactagctcacgctattgccctcatgcctatgatccatcaaggtcctaaaaaggatgctattatagcagactaccctcaacaagctactgtccaccactacggcgaaagaagctgttcttgacgacgaggtctttattcataacgccgaccacctgatgtttttcaacagccaaatgaggcgcctgcgcaggaggaagctgcaccacacgttccggtactactcccaccactggaggacctgggccgcgtgct

SEQ ID NO: 59490 - DNA, 106 bp, Zea mays
  Clone ID: MRT4577_154253C.1
tcgcgcacgtggtatctgtcactagcgcaagacgacagcaggctagttctgtagcgtgctagacacggccacgcagagtagggatggcgtccttctcccggtaaac

SEQ ID NO: 59491 - DNA, 327 bp, Zea mays
  Clone ID: MRT4577_154254C.1
gggacacggcacagctttgaacaggttttgagcgatctgagacgacgatatataccaggtgcttatgggagactgcgatgaatgtcgaatctagactcccaacagagcacacagagaggctaacactggtactgcactatatacacattattctcttggtcataagcctacgtagtacaagccccataccctaaatactgaccgagctcgacagaaagagagaaaaggtactagacgaatacaacctgcagatcacatcgatcaacacaatctatgtactaacaaaggcaatcatggacgagcgaatataccacgatgggcaaaaga

SEQ ID NO: 59492 - DNA, 467 bp, Zea mays
  Clone ID: MRT4577_154255C.1
tttttttttttttttttttttttttttttttttttttttttttttttgggtttttgttttaaaaaaaaaacagcttggaccatccatatataccaagtccaaacaaagggtgttgggtgaaaacaaaaacatgttaaaatggacaaatcgggggggtacaaagcaggaagcaacccctaaaacatgaagggatattgaccgaaagctaccttaattagtggacggggatcttgcccaccattccggctccttgatgggggtcgaaaaaaaaaccctaggttcccccccccgggagggtaaccgaaaaggttttgcctggggcctttaagtactccccctgcgaaaatttgggggggaaaaccccccttgggacctttttttttttaaaaaaaactttttgcgggaagcccgcccttttcttgaatgggaagggggcccccgcccttaccggaaactgggtgggcttc

SEQ ID NO: 59493 - DNA, 434 bp, Zea mays
  unsure (1)..(434): unsure at all n locations
  Clone ID: MRT4577_154256C.1
cttttgtgtcactctgcattttttaagattcaaaaaacatgtttttcttattttatacatgatgaaacatgaaccttcataattcattggatcttcttagtattatctctaacaaaataataataataaggttcttttcccacaaatgtaaacatagatcttagtttctgacatgagcaatcagtttagttagcataaaaagttggtgattttgacaactatacagtttgtaggaacaacaagaaaaatacacttaagtagatattaggattcttttcctttgtgatcacaatggtgattagggaaacaaatgagaatcatacagtaatagcatcaacggacaatgacaccaaagtaatatttttataacaacagagacaatanaaagagcagtaaacaaaataaatagtcacaaactacagttctagccataa

SEQ ID NO: 59494 - DNA, 298 bp, Zea mays
  unsure (1)..(298): unsure at all n locations
  Clone ID: MRT4577_154257C.1
ttttcgagctgtaaccttataaatgtctgtaattanaacactaaaatttgtagtgataggatcaatttgggaatatctgctgagagaccaaaaagttcatttttttaagtaccttggttaaagagtaaagattattcctcttatttcctaaagaagaatgcactttaacaaacatagagctgcatgggcaattcaaacaaatctgtgaagtgcagtacccattcagaaatcacacttcctgaaaaccgttcaaaagcagagtccagacgggctgttgatctcactgctgtaggttgaa

SEQ ID NO: 59495 - DNA, 2746 bp, Zea mays
  Clone ID: MRT4577_154258C.1
tactcctctaatacaacaattgtacatatctcacaatttacatgaagctaaaaagcctgggaaattcttttctaaaaagtcttgggtttcccaagtagcttcatctcccgtgtgttggttccattgtatcttataaaacttgagagttctccttcgggtaatcctgtccttttgatccaggactcgaataggatgttctaaatatgtcaagtctggttctaaggcaacatccgtcacttcaacggttcgatttggaacccgaagacacttcttcaattgggacacatggaacacattatgcacagcagacaatgtttcgggtaattggagtcggtatgccactggtccacattgctcaagtatagggaatcgaccaatgtaccgggggtgcaagctttcctttaaccctgaaacgcgatacccccttcattggggagacctttagataaacgtaatctcccactagaaaatatatgggcattcgccatttgtctgcataactcttctgacgagcttgagctttcttcatattatgtattattctctgaaccttttcttcagtttcttttaccaggtcaggcctgaagaagtacctttcacctggttcagaccaatttagcggagtacgacatcgtcgtccatacaaagcttcaaagggtgacatcttcaaattggcctggtagctattattatatgagaactccgcatacggtagactcttatcccaactaccaccatgcttaagggcacaagctcttaacatatcttccagcacttggttggtcctctcagtctgcccatcagtctgtggatggtaagccgaactaaaatttaatcttgtatccaaggactcgtgcaacttcttccaatatcgagaggtaaactgtgatccccggtctgacacaatcttctttggtacaccatgcaggcatacaatctgtgccatgtacaactctgccaacttggctcctgaatacgtggtcttcactggaataaagtgggctaccttagttagcctgtccacaatcacccatatagaatcatatccagtagacgtgcggggtaatccaacaatgaagtccatgccaatctcttcccacttccactcgggtaccttcagtgggtgtaatagtccagcaagcctttggtgttcgaccataactctttgacacacatcgcacatagccacatgtgtagccacatctctcttcagtccataccaccaatatttttgctttaaatcctggtatatcttagtacttccaggatgaatagaataaactgaatcatgtgccccccatatcgtgccttgctcatcctctgtgaattccgggcctcgaccttcagtaataagatccttaatctcttgtattttagcatcaccaatttgtcctttgcggaattcttgctccaaggtaggttccacatcaataataactccttcagtatgagcaactatccccaggttaagtctcctgaaatcctcaacaatctcatcgggtagctgggcaacaacagctgaatgaacatgctcctttcgactcaaggcatctgcaaccaaatttgccttgcccgggtgatagtgaatctccaaatcataatccttaatgagctccaaccaacggcgttgcctaaggttgagatccttctgagtgaatatgtacttcaaactcttatgatccgtgtatacttggcacttagttcccatgatgtagtgtctccaaatcttaagtgcatgcacaactgctgtcagctccaagtcatgagtggggtagttcaattcgtgtttccgcaactgacgagatgcataggcaatcacatgaccttcttgcatgagcacacatccaagtccttggcaacatgcatcacaataaatgtcaaatcccttctgtagatctggcataaccaataccggtggagacatcaatctctccttcaattgatcaaagctttcttggcacttctcatcccacttgaattctcttcctttctctaaaagcgatgtcataggcttagcaatcttagaaaatccttcaataaatctccgataatagccagcaagtcccaagaaactccgaatctcagtaactgtagtgggtactctccactccattatctccttgactttagcaggatccattgatattcttccattagaaatgatatgtccaagaaatggcaccttgccaatccaaaactcgcacttgctgaacttggcatatagctggttatctcgtagcttctgtagtaccaacctcagatgttgttcatgatcactttcattcctagaatagatcagaatatcgtcgataaacaccacgacgaatctgtccaaatactccataaacaccttattcatcaaattcatgaaataagctggtgcattggttaatccaaatgacataatagtaaactcgtataatccatatcgggttgagaaagtcgtcttaggaatatccgatggcctaatcttcatttgatgataacctgatcggagatcaaccttcgagaatacccttgcatctctcatccgattaaataaatcctcaatgcggggtagtggacatttgttctttacagtgacatcgttaagggacctataatccacacacattctttgtgatccatccttcttctgtacaaacagaactggcgctccacaaggtgaagaatccgaatgaatatactcagcctcttgtaactccgttaattgtttcttaagttcctttagttcttctacggacat

SEQ ID NO: 59496 - DNA, 351 bp, Zea mays
  Clone ID: MRT4577_154259C.1
ggacgacccacgcgtgcggtggcgaatgtctcacatcacacaacaccttttgttttacaactatacatggcacatctagcgaggcgtacgatcgcaacgcaacatctacaccaatagctaccagcacgtgagccacctatgcctggtgaaccctgccgactactttccacagcagttgcttggatgaaacccacttgctctggcaaacgtaggtggaaaccaaccacaacatcagctcggacactttgtgtcaccgctgacctaactaggcatggtgaacactgccggatacctacaacagcaacaactgcttacatctagacagctcgctgtttgaaatgcacctacata

SEQ ID NO: 59497 - DNA, 1372 bp, Zea mays
  unsure (1)..(1372): unsure at all n locations
  Clone ID: MRT4577_15425C.1
gccggccgggtcgggaaatccaagaagaaaggagcatagaacataagaggagagaccgcactacacacctcacgcctgaaggccagatctaagccttctcgtcctcgcccaaggacaacgataaacatctaagaaccaaacaaaacagagcacgaccatcggtctctaagcaaaacgcgcagcacgccgggcgctccacgcacgtaggctagcagagcgcgcatggggcttctggaccagctgtgggacgacacggtggccgggccgcgcccggactccggcctcggcaagctccgcaagcacgcgtccttctccccctcgtcggccgcgccgtcgccgaccgcggagggcgcggcgccgcccgccgtgacgcggagcatcaccatgctgcggccggcggcgctgtccgtcgtcacgtcgccgcgcagcgagtccagctccgcgccgtcgtcgccgtcgcccgcaagcggcgctcccgactcgcccttcggcgcaggtgaccaccagctctcgccgtcaccttctcttcttttttttcccccagttctcgtcgtcgctggcgcggtgtttgactgtttcgttggagctcgcggaagggatctttgggtcagtcagcgttgtaaaaagcaaaaagaaaaaaagaaaagaaatatacggtatctggttaataatttcgcagctgcgcgcttcgttttagcggaattctgtagcgaatttgaagctacttttgtatagtcgaatgttggagatctgaagcatacacacgcacacccccggctgatgttgtggtctctttttctgtacgtacgttgccaccgtgatgctgcagcgacgacgcccaggggagagggctggaagaagctgcgccggaaaggcaggatggccgacggcgccgacgcccccggcacgccgaggagccccactgtgtacgactgggtggtgatcagttcgctggaccgctgaagcagccggccgggccaagacgaggacacagcacaaggatggaggaagccagccaccatcagcagcagctagcggactgaaggaggatcggaacagagaggcccccccggccatgcgacctgcttaacagagcttctggtcacggttctgttatactacgcgttaacggtgtatgtatatacgtcatcttcctgtaaatctccgtggtgtaaaaaactgctgattttgaagagagtgatgctcctgttatgtgctactagctagctagtgctgttgctgtatgagtacagtgtagtctactattaagggttgtcgtttggactgttagtctatagagacagaaaaatgtagaagtacgtattaaagccaatcgaatagacatgtttgtcnnnnnnnnnnnnnnnaaaaa

SEQ ID NO: 59498 - DNA, 273 bp, Zea mays
  Clone ID: MRT4577_154260C.1
actacacaaatttccatttcatttcacacgaccttaacctaactacggccacgtatcaactaaaactctcacacacatccaacttcaattactacaaaacaatcactcctctcatctcctacataccctttttcctcaatcccatactaattcttttcatacttatacctttcacctctcatctcctcctacctccaatattacactactcctcaatctatatttctattcaccttaacttactccattgtctacaaataccctcccctacta

SEQ ID NO: 59499 - DNA, 421 bp, Zea mays
  Clone ID: MRT4577_154261C.1
aacgcgctctgttctccctcaatctcgacacagacgccgaccacgtctatcaaagagtcgaagaccacagcaaacccagcgacgagcgcatcaaagttcttgagacaaaaggacctacccacggccataccgatctaagtttcgtaacgaagccctttgaaaaaaccgtaaatcgagccgttgaaaacgtcctcgacggaaaaaaagtcgtatcaaaagaaggtgaaataacatactcgaccaccagctccggtacaacacaatcaaaaggacgagccacacgcaacaacgaagaacacgacctctcttccgaccacgacgaacccagcaacctaaacattgtcagcaaatccacagcgacgctctctaaacaagaaatacgacacttcctgacctctacaacacactcatatcccaacct

SEQ ID NO: 59500 - DNA, 228 bp, Zea mays
  Clone ID: MRT4577_154262C.1
cgggtggaagttcatcagacgatctgtgtttttgacttgggatctgatgatcgaattgaaacttgaaattaagattcaaagacttttggtcgaattctggatgtccagctggtattgaattgttggaaatccgatgctaatagccaatctaaaggccaacagttatataactaacactcctacatcttgtgaaaccgacaataaaccttctgagctatgctacgagac

SEQ ID NO: 59501 - DNA, 131 bp, Zea mays
  Clone ID: MRT4577_154263C.1
cgaccaagtctcccgtccctttcgagtttcaccacttcatcgacgcgcaactccctgagcttattccagtctaggtctacgatgactacaagctcatggtgtgatatactctttacacctaccgattgatc

SEQ ID NO: 59502 - DNA, 116 bp, Zea mays
  Clone ID: MRT4577_154264C.1
cccacctttatcccaacaggtgaaacccccccggctggagtgcccatatcttcgtcaggagactgacactgtgggttttggccagacccacaagagcaaagcatacttcaaaagat

SEQ ID NO: 59503 - DNA, 668 bp, Zea mays
  Clone ID: MRT4577_154265C.1
ccggtcgacccagcgtccgggaagttgttgccctagctagctagtgtagagtgtgtagacgaagccacacaccatggccgcagacgaaggccaggtcttcaactactgcaagctcgcgcaggccgcctacgccgcctacgacgaccacaatggcacctgccgctactccctggccgacatgctgcccgccgtcggcctcggcggcagcggctacgtggccacctcgttcatctacgccaccgtcaacatcttggccggcgacggcgtgaacgagggaaacgacgacgacggttgccagcacgagcagcactggatcggatacgtggccctcgcgaccgacgccgagcgcgaccgcgtcgggtaccgcgacatcgcggtcgtgtggcgcggcacgtcggcgctggacgagctgctcaaggacctgcaggcggtcctcgttccgatccacggcgagcagcaggccgggacagtgcgggtggagaggggcttcgagagcctgtacacgtccagctgcgaggcctgcgccatgcggaccagcgcgcgcacccaggtgctggccgagctgacccggctggtgacgtacgtgaggagcaggcaccccggcgagaagatccgcgtcacggccaccgggcacagcctcggcggcgcgctggccctgctggccgcgt

SEQ ID NO: 59504 - DNA, 346 bp, Zea mays
  unsure (1)..(346): unsure at all n locations
  Clone ID: MRT4577_154266C.1
gcgattgggtacctcgaggccggncggggttgcttcaaaaagaggagacggcagtcctccttcccctcctcgtcgatcgccccggttgtctcctcctcgacctcccccgtagggactccgcccgatctctctagcgcacggcgggccggagaagaggaggaggagggacgatttcattcatcggaccggcgtgcctgcgccgcctgctgtctgcgctatttgctttactcttttttttcctcctttgcttgttccattcgatcaggatattaagatctctgatttgagggcggctcgccatgggattagtactggggatataatagggggggggcgagttcctcga

SEQ ID NO: 59505 - DNA, 224 bp, Zea mays
  Clone ID: MRT4577_154267C.1
aaaaaacaaagcggccccactctatcatgatcccaacttacctaccccatcattccacctaaaaactattctatagcttcacctaaactccattcaatctccgtcatcttacaacactccttactcggaaaacccttgccttacccaacctaatcaccattcaacataatcccctttcttccacctgccttataaccaaaaaaccctcacccaacctcctttcc

SEQ ID NO: 59506 - DNA, 280 bp, Zea mays
  Clone ID: MRT4577_154268C.1
ctcaggtgcgcggaaagtgaagcgccgtgaagatggaggtgggccaggcggcgtctggtaccgatggtgtccgggagcggaggggctcgtccgcagctagaaggaggagccaagatgagcccgttcagtcggggatgaacgggattccgaaacactcctcctggctggatctctggctcttcatccttttcgacctggcgttgttcatcttcgtgtacctcttgccctgattggtttgctgagagtctagaacacggctggcttctggagtgaatcctga

SEQ ID NO: 59507 - DNA, 385 bp, Zea mays
  Clone ID: MRT4577_154269C.1
gcgcggacgcgtggggtccactcatgagaggcacggcaccagagctgcagctgcacatggccaggtcccgggccggacctcgatcgcccaggccggcctcctccctcgccgccggcgccgccatggaccgcaagagcaagtacgccaagggcgccgcgagctcggcagccgcgttcatggacgcgctcgccgcagccgccgcggaccccgacagcaggtcgggccccgcccgcggcgggtgtcgatgcggcagggggaagctgccctccgaggtgccactcggagcggtgcaaaaccaacccggtgaccgccgggaattcgaacaaccggacgaacctggagagcgacgggcactccaaggcccccggagatgctgtacgcgctc

SEQ ID NO: 59508 - DNA, 1010 bp, Zea mays
  Clone ID: MRT4577_15426C.1
aattcggcacgatcctcaccttccccctgactcgtgcgtctgtttctcctgcctgggtctggggttgtccagttgccattgccaccaccaaccgagcctagagggaaagaaatcttggaaaggtgtggtgtgacccctgctgctgctggtgccagatttgctcgcgttcgaggcctccttttgtttccgctagattctgccaagatcagcgattccctccgccagcagaatcgctcgctctctttccatcgagcgtgcattcttttctgctgctgagtcgggcaggatcggcgtaacccctccatccaaaccccagacctttgtccagcagcctcgcgccctcgccgcatcggtatggtttttccttgccccccgtcctagttgctctgttcgcttgatttcctggtcgaggttctcgtgcgctgttccaatttcgagctaatcgtcctgctcctgcctaggaataggattaatccccttctgttcttggagttcacacacatcccgtgcgcgcggattgctggtgcagcagtcggcggcggcgcgtgcattttgcaaccgctttccaagcaccagctgcaagctttggccttttcatcctcccctccccgaaatcccgcaagaaactcgtcccttctcacgagtcacgagtttggtgaggctttgaagcgagcatagttctcgtgaatatcgcaggggaggtttggaatccggcatctctgtcggtcaggctggggtgggagtttcctcgtcggagatggatgggaatttgccgccgcgcaccctgatgccaggcggaggtccaggccacttcgatctggggcagccgttccacttcgccgcccagccccaggcggtccgggttcaccagggcgtcttcgccgtccccgccgcgaaccagatgccggagctcggcaatgtggtgaaggcatcgctgagcgacgaggaggaggaggacgacgacggccacctcgaccacggcaaggcggcggccgccgacagaagagctc

SEQ ID NO: 59509 - DNA, 249 bp, Zea mays
  Clone ID: MRT4577_154270C.1
aacttcttctccttacaaacaggaaaccatacgtgcataggctgcccctaaacatgctagggctggcgtagtgaagcgacatactatggggggtgttggcggtcatatccaacatgcccacctccctacacacttccccctcaccggggtgcggcttggcatatgcaatttcggcccggggcccttatttttctggctgtaaccaccaccagcccctcaaactaagtccgggcgtgtcccttggtcttt

SEQ ID NO: 59510 - DNA, 474 bp, Zea mays
  unsure (1)..(474): unsure at all n locations
  Clone ID: MRT4577_154271C.1
ggtctggacctttgggctgcattatgtgcttgtttatgtgcttggtcctttagagatcttagctacggtgactctttagactctatgtacgaccttcggttacttcctcttcggttgttgttcctgttgttgttttagtcgtgtccgtggatggtgatgatgcggcggtttccattgaacttatgcctgagaaggaggctggaaaggattgtggtgtttctgctgagcctcatgtttttcggcgcggctatcgtaagaagtccgtcttcgagcacgaaagatccggcgtaagccccaagaaagtcaaactcgctccgaccgtcaaggtcgaccgcgacgagtataagagcccgcgtagtaagcacggagcccttgggcacttaataacttaacggcctttgaaaggacttccggagtttaaaaagcacgaaagataatgtatcgtagaagtttcngtcgaaccctctaacatcg

SEQ ID NO: 59511 - DNA, 375 bp, Zea mays
  Clone ID: MRT4577_154272C.1
cttgatagagagagagagagagatccgtttggggtgtgtcgctcttgtgtgcttggttttcgcaatcgtgctttcttcttattctcaagtgacatgtaatcaaagcaagagacactaagtttgtagtggtccttgcggggtctaagtgacccgtttgattaaggtcggtctaggtgaccgtttaagagagggaaagggttgaaagagacccggtctttgtgaccacctcaacggggactaggttctttggaactgaacctcggtaaaacaaatcaccgtgtcatccactttattttcttgattgatttggtttcccctctctcccagacttagaatttattctaacgctaacccctgcttgtagtgtgtttaaag

SEQ ID NO: 59512 - DNA, 255 bp, Zea mays
  unsure (1)..(255): unsure at all n locations
  Clone ID: MRT4577_154273C.1
cttttcttcttttttttttttttttttgacaccagcttaaaaccccttttgttaatccaagtagatagaaggtccaactacaaaactaccagaattcagccccatcgataaagatactgtttagcattgcgcaagaggagccatcgtttataccatgcactaaattctggtagttttggagttggaccttctatctacttggattaacaaaaggtggtgcatggctggagtcatnncctaaaaagggccaaataa

SEQ ID NO: 59513 - DNA, 579 bp, Zea mays
  Clone ID: MRT4577_154274C.1
cgggctctgataccaattgaaagtcacctagaggggggtggataggcggaaactgaaatttacaactttaaacacactacaagtcggggttagcgttagaacaaatgttaagtccggaagagaggggaaaaacaaatcaaccaagaaataaagcggatgaacacgatgatttgttttaccgaggttcagttccaaagaacctagtccccgttgaggtggtcacaaagaccgggtctctttcaaccctttccctctctcaaacggtcacctagaccgagcgagctttctccttaatcaacgggtcacttagaccccgcaaggaccaccacacacttggtgtctcttgctttgattacaagtcacttgagaataagaatgggaaaagaagaaagcacgatagcaaaagccaagcgacaagagcgacaaataacacacagatcactctctctcaagtcactaatcgctaatgatcacttgtctcaattatgaaacttggagagattggaagctttgattgtgtctttgaatggattgctagctcttgtattgaatgtgaaggattggagtgcttgtgttaag

SEQ ID NO: 59514 - DNA, 1216 bp, Zea mays
  unsure (1)..(1216): unsure at all n locations
  Clone ID: MRT4577_154275C.1
accggtaccagaacctcccgggcttatgataacgggatagtcgaggcagtgtatgtaacactaagggaagcagagatgcgtagcacttctccntataccaacatgggaaatacccatttggaaggacatttccccacggcagaagaaggtcaacgaagctctcaagttgataaatagtactctcgatgaactaattgccatctgcaagagacttgtagagcaagaagatcttcagtttcatgaggaatacatgaacgagcaagacccaagtattcttcacttccttttggcatctggagatgatgtctccagcaagcaactccgtgatgatttgatgaccatgctcattgctggtcatgagacttcagcagctgtcttgacatggacattttatcttctatctaagtatccaaaggtaatggccaagctccaagatgaggctgatagtgttctaggtgatggtttgccaacaattgaggatgtgaagaaactaaagtacacgactcgggttattaatgaatcattgagactatatccacagccgccggttttaattcgtaggtcacttgaggacgatatcctgggagggtacccaattggccgaggagaagatatttttatttctgtctggaatcttcaccactgcccaaagcactgggatgatgcagaagttttcaatccagaaagatggcctttggatggaccaaatccaaacgagataaaccaaaatttcagttacttaccatttggtggcggaccaaggaaatgtgtgggtgacatgtttgctacttttgagactgtggtggcaacagcaatgcttgtcaagcgatttgactttcagatggctccaggagcacctccggttgacatgacaactggagcaacgattcactcgactgagggattaaaaatgactgttactcgaagaacaaggccaccagtaattccaaacctggagatgaaaattattaccgattcacaagaatccacactttctgccccatcgatggttgttagtgctgcttctgttgcttcaggagaagaccaagggggcatctcctgagagaacgagcatatccatttatattgctctggaagtatttagctagtttacagcatttggttacgcaagcagtacaaaacagagatagtctcctggcgtgctacaacgaaaaactccaaacctttccgcaaaaaaaaaaaaaaaaaagcggcc

SEQ ID NO: 59515 - DNA, 2404 bp, Zea mays
  Clone ID: MRT4577_154276C.1
ctggcgtgctacaacgaaaaactccaaacctttccgcagacttgttacagatggatggcacagcatactcctatagaaccatggtgtgtttgtttactttctagattatataagttggattatggtggaagggtaatatggtaaaatatcactttaggactgtaaagctgaaataatctaacattgggtagtttatttcagtttaattgtgattgtaaagatgtattttaccctattattctttcaccataattcaacttatataatatagaagggaaacaaacagggcctaggtctccttgctgatactcaaaagcaccatggacatatctacatatttacaagaagtttctgacttccatgcatggatttgtgcgctcctaaatcttcagcatgccttccaacacacgaagaacatcagcacgggcaactatacctgttgatagtgtttagaaccccattaggcttgcaacatactctgtgttgtcaatgttgattaaggataatacaaatcaagtatgtacatgcagttttttttatctctagtttttcagcattctgattctttcctgcccctgtacgacctattcctcactcacgggggcatctttcgcctcaacggtggcccaaagtcgtttcttattgtctccgatccggctatcgctaagcacatcctgagggagaactccaaagcttattccaagggaattcttgctgagatattggagtttgtgatgggtacaggtttgatcccagctgatggggagatttggcgtgttcggaggcgcgctatcgtccctgcactgcatcagaagtatgtgactgcgatgattggtctctttggggaagcttcacaacggctctgcgagaaattggacaaggcagcagtggatggggaggacatggagatggagtcgctgttctctcgactcacgctggatgtcatcgggaaggcggtgttcaattatgattttgactcattatcttacgataacgggatagtcgaggcagtgtatgtaacactaagggaagcagagatgcgtagcacttctcctataccaacatgggaaatacccatttggaaggacatttccccacggcagaagaaggtcaacgaagctctcaagttgataaatagtactctcgatgaactaattgccatctgcaagagacttgtagagcaagaagatcttcagtttcatgaggaatacatgaacgagcaagacccaagtattcttcacttccttttggcatctggagatgatgtctccagcaagcaactccgtgatgatttgatgaccatgctcattgctggtcatgagacttcagcagctgtcttgacatggacattttatcttctatctaagtatccaaaagtaatggccaagctccaagatgaggctgatagtgttctaggtgatggtttgccaacaattgaggatgtgaagaaactaaagtacacgactcgggttattaatgaatcattgagactatatccacagccgccggttttaattcgtaggtcacttgaggacgatatcctgggagggtacccaattggccgaggagaagatatttttatttctgtctggaatcttcaccactgcccaaagcactgggatgatgcagaagttttcaatccagaaagatggcctttggatggaccaaatccaaacgagataaaccaaaatttcagttacttaccatttggtggcggaccaaggaaatgtgtgggtgacatgtttgctacttttgagactgtggtggcaacagcaatgcttgtcaagcgatttgactttcagatggctccaggagcacctccggttgacatgacaactggagcaacgattcacacgactgagggattaaaaatgactgttactcgaagaacaaggccaccagtaattccaaacctggagatgaaaattattaccgattcacaagaatccacactttctgccccatcgatggttgttagtgctgcttctgttgcttcaggagaagaccaagggggcatctcctgatttaagcagtattgtattttaccctattttcaacttatataatctagaatggaaacaaatagggcctaggtctccttgctgatactcaaaagcaaaccatggacatatctacatatttacaagaagtttctgacttccatgcatggatttgtgcgctcctaaatcttcagcatgccttccaacacacgaagaacatcagcacgggcaattatacctgttgatagtgtttagaaccccattaggcttgcaacatactctgtgttgtcaatgttgattaaggataatacaaatcaagtatgtacatgcagttttttttatctctagtttgtcagcattctgatactcccctattacttgttcatcctgattctcagctggcc

SEQ ID NO: 59516 - DNA, 595 bp, Zea mays
  Clone ID: MRT4577_154277C.1
ccggccgggatttcccatcactacagctagctagcgatcctaatcaccgacagaataatgcacttcttcactctcactaacaccgagctagcagctcgctctgacctgcaacaatggccagatcgctcctcctcccagcagctgaccgcggcggcggtactggcagctgcgctgctgctgcaggcggcgccggcccggacggtgttaccgggccatagctgcggacatggcgacgtcacaggctgcgccgtgcctcggcgacacaccgaggagtgctgtgtgaccatccgcatcggcgccgcagctggggcagcgctcgactgcaacttagcgtgcctgaaggcgcgtcttgacctggcaaggcacctgcgccctgttcaagagcatgacggcccgcttcagcacccgggtcacactctcgacgtgctgcgccatgccatgcccttcaaccagcttcccatgagcttccatgacatcatgcgcgaactggtatacatactgcgctggaccaagccaaacaggcaggaggccgacttgacactgttcgacgagaggcgcgtggtgcgcaccatctacgagctcttggccgacaccg

SEQ ID NO: 59517 - DNA, 596 bp, Zea mays
  Clone ID: MRT4577_154278C.1
taggggccttttttttttttttttttgacagaagggcaaaactttatcgggtccggatagattttacacatgacgatgcgttacaccggggcggggcggggcggcgagactctcatttacacaggtctgctggaagaactgatctcggatcggagcactgcttaagctagctactactcactgataattttaactaaagacaccgctaatccaggacaagcccatggttcttggtctcacacggaggaagggggtgccaaggcgcggcggcggcggcaaaccggcgaagcgagcgagttcacatgacggagcaggcgttggggttctcgtcgctgaacatctggggcgcgtggaggtgggtggggccgtacgcgtaggctggcgcgggcgggtaatggacgccgccgccgttggggtagaagccggcgtggtggttgggcggtggggcggcaccgtagtagccgcctggagccggctggtggtacggcgcgtacccgtagtgcggcggcacctggtacatgccggcgtcggccaggggcggcggcgccaccgacgcggaggcggccgcggccccggccttgtccttcttctcctcg

SEQ ID NO: 59518 - DNA, 188 bp, Zea mays
  Clone ID: MRT4577_154279C.1
tcttctgctagcactacctttcattactgctgttccagtccatcaagaacgaatcggaaagcattgacatcgaaccctacagcacacattactgggcttatggctaactatttcctgagacgttcaccattttcatcacaaaaaaataaacctcggatgccttctgttgatatcgacgtacattaccc

SEQ ID NO: 59519 - DNA, 1215 bp, Zea mays
  Clone ID: MRT4577_15427C.1
ggtacccccgaggttcggccgggaagaagaaaggagcatagaacataagaggagagaccgcactacacacctcacgcctgaaggccagatctaagccttctcgtcctcgcccaaggacaacgataaacatctaagaaccaaacaaaacagagcacgaccatcggtctctaagcaaaacgcgcagcacgccgggcgctccacgcacgtaggctagcagagcgcgcatggggcttctggaccagctgtgggacgacacggtggccgggccgcgcccggactccggcctcggcaagctccgcaagcacgcgtccttctccccctcgtcggccgcgccgtcgccgaccgcggagggcgcggcgccgcccgccgtgacgcggagcatcaccatgctgcggccggcggcgctgtccgtcgccacgtcgccgcgcagcgagtccagctccgcgccgtcgtcgccgtcgcccgcaagcggcgctcccgactcgcccttcggcgcagcgacgacgcccaggggagagggctggaagaagctgcgccggaaaggcaggatggccgacggcgccgacgcccccggcacgccgaggagccccaccgtgtacgactgggtggtgatcagttcgctggaccgctgaagcagccggccgggccaagacgaggaggacacagcacaaggatggaggaaggcagccaccatcagcagcagctagcggactgaaggaggatcggaacagagaggcccccccggccatgcgacctgcttaacagagagcttctggtcacggttctgttatactacgcgttaacggtgtatgtatatacgtcatcttcctgtaaatctccgtggtgtgaggtgctgctgattttgaagagagtgatgctcctgttatgtgctactagctagctagtgctgttgctgtatgagtacagtgtagtctactattaagggttgtcgtttggactgttagtctatagagacagaaaaatgtagaagtacgtattaaagccaatcgaatagacatgtttgtcgccatgtaaaaaaagtataatcctacgtatactcgtacgcaacgatagtaatgcgtgcttgagtgttgtggacactttcgccaacaccttggcttgcgttgccttgcctgccacagaaatatcttaccatgggcgtggattgtttagtgctttcgggtcccaataattcagtaccagcatgtccatcgc

SEQ ID NO: 59520 - DNA, 382 bp, Zea mays
  Clone ID: MRT4577_154280C.1
gaaagacacaattatgccaatatttatcagccatttatttacaatccaagacaggcagacgggctttatatatttcagttgatcacgcctttaatcctcaaagattttttgaatttttggggcaagataacagttcaaattcatctcaagaaattgggcaaagattgttagtacatcgagagcttgaagctaatgttttacactcgtttataattgagcgcttaggcgaagtcattctaacagaaaacattggtctcttagtgattgattctttagcgtcggcatttcgactaagtgaaggctttgaagaatcggttcttttgtttcaaattgctacagagttgcgaaaaattgtttcagatcgcggatgtattgtgctgtg

SEQ ID NO: 59521 - DNA, 299 bp, Zea mays
  Clone ID: MRT4577_154281C.1
ccgacgcaatcgcctccaacgcctgtttttagtcagctcaccatcaacacctataggggggcaccaccggctccagtgagctcaccaccttctatggcgcaatgacctccaccacctgctccagtcagctcactatcagcacctgagacatcacctccttcagcgcctccagttagctcagcaccacctgctgtgaaatactcttgaccacctactacaggcaactaaccgtcaccacctgataaagtacctcctgcactagcttcaatggttttaccatcgtgtaccatgaaataccc

SEQ ID NO: 59522 - DNA, 252 bp, Zea mays
  Clone ID: MRT4577_154282C.1
gtaagctcggaattcggctcgagagcaaatccagctggctctgtgttgaaggagagagagagagcgcgggagagggagagatgtatgaccgaggcgcgcagggaatattgggaagaagacgaacccggtgatgatcgaccagggagtgctgaatccactcatatggaggcggggaagacaacaggaagatgggcatttctggcgcgcggacagaaacgacgaagagcagactgctaatgcgccccagtacgg

SEQ ID NO: 59523 - DNA, 246 bp, Zea mays
  Clone ID: MRT4577_154283C.1
gcacgaggtctcgcgtttttttttttttttttttttaaaatgcaactgttctttatttcattacaagcatgacatcacaagcatgacagcatgacgcactacttcttgatggggtaggctacgctgatagtgacagtgttattctattctctccagacaagctcacgctgtgccgagtaactgcttttgcgttgtacacttgcacaccatgccacacgcacaatcgacgctcaccaacctccggca

SEQ ID NO: 59524 - DNA, 574 bp, Zea mays
  Clone ID: MRT4577_154284C.1
ggatccaatctgatttcaagctctctctttattatgtgatatatacagactcatggaataaaagcaaactccatacttatgactggtataagatagtctagcactagtctaaaacctaacctgaccacaataatctaagatgccagtttaggagctggcagacaaaactcatactactatgggcttgacatagataagctatacactaaagatgaaagcgatgcactttttggatcttcagagaagcttgttctgtgccaccgcttcgcaaagctcctcctcgtaccgtaaaactctgggcgatgaagcagctttacacgcatgtcttggcagccacggtggcacccagcgtcggagacgcttcgaaggaaaaggtgtcgaagactccgggaagagaacagccgtgattggcttcacgtcgaccagcttgaggcgtgaaaggcgagcagcgtgttttggagccctcggtgtccttggggtggaaacgtgcacgtccttgccgttgattcttaagaaaggcccaagctcgttggaagagggtttctattcggagcaactccgtctgcttctgtct

SEQ ID NO: 59525 - DNA, 131 bp, Zea mays
  Clone ID: MRT4577_154285C.1
cactgcacgagccttgcctgttgtttcctgctcccagttgcactgatgaccgaattcagtttgccagacgcctgcatgctgttacttcgtccccagccgtccttgaaatccaataccagaatgccaaggcc

SEQ ID NO: 59526 - DNA, 123 bp, Zea mays
  Clone ID: MRT4577_154286C.1
atcagatactgcagtcgtcggtgatctacgtggatccgcgtctcggagatgtacacggtgctggtcatcgacggcgtgcagatgtacatcatctagaacgggtgcctggtgctcctcaactag

SEQ ID NO: 59527 - DNA, 1279 bp, Zea mays
  Clone ID: MRT4577_154287C.1
ccggaaatccgtcccccagttccctccgtccacactcgcccttctccttcgttcccggctaagtggccaacggacgtgcgatccggcgcgcttcctcgccgtcgtcgatcggaggcagaggaatgtcaggggcggcatccgtggagcgcgtgaaggaccgggacatcggcctcgacaagttcgtgctccgcgaggcccgcggcagctccgtcgaggtatatttatacggaggccaagtgacattttggaaaaacaacttcggtcagcaactgctttttgtcagtaacaagctaggtaaccatggagtgcttgaacagcatggatttgcaaggaaccggttttggagtgtcgatgaaagcccacctccttttccagttgctacttccaattgtcatgttgacttgatactcaagtcatctcccgaggatttgaagatctggccacatagttacgaatttcgtctgagagttgctctgactccaaggggagatcttattcttacatctcgaataaaaaacatcagctcagacagcaagccattccagtttacatttgcataccacacctacttttcggtgtctgacatcagtgaagtgagggttgaaggtctggagaccttggactatcttgacaacctgcaatccaagaaacgttttactgaacaaggagatgcggttgtattcgagtccgaagtggacaaggtatatttgagtgctccgccaaaggttgtgatcatcgaccacgagaagaaaagaacgtttgtgctgaggaaagagggccttcctgacgttgtcgtttggaacccctgggacaagaaggacgaggagtacaagaggatgctgtgcgtgggggctgcggctattgagaagccagtcactttaaagccaggcgaagagtggatagggaagcaggaaatttctgctgtgccgtccagttacagcagcgggcagttggaccctgaactgattcgtcgaatgcacacaatataaagtttacccgcgattgcatcgatcctacgttccaaactagcctgtgttttttttttaattctgaagcagcgctgggattggaatcatcaccctgttaattactagacaaattgggccggaggtgccattcagatccgtatacaatattctttttctctgtttttttttttgtattgtaccactagtccactacaaaaggaagccccaagtttgtactgcatgtggcaaacaaaactaccaagatatatatactaattgagttgtataataaagcgtcacacgtttctttc

SEQ ID NO: 59528 - DNA, 1493 bp, Zea mays
  Clone ID: MRT4577_154288C.1
accctcgaggccggccgggaaagccttcccgtgctgacacttgctcaggttcaggctgcccgctctgccgccgccgacgccgacgactataaatgagtcctccggtcggccggacgagaaaaatccgtcccccagttccctccgtccacacccgcccttctccttcgttcccggctaagaggccaacggacgtgcgatccggcgcgcttcctcgccgtcgtcgatcggaggcagaggaatgtcaggggcggcatccgtggagcgcgtgaaggaccgggccaccggcctcgacaagttcgtgctccgcgaggcccgcggcagctccgtcgaggtatatttatacgggggccaagtgacattttggaaaaacaacttcggtcagcaactgctttttgtcagtaacaaggctacttttaaaccgcgaaaagcagttcgtggtggcatccaaatttgcttccctcaactaggtaaccatggagttcttgaacagcatggatttgcaaggaaccggttttggagtgtcgatgaaagcccacctccttttccagttgctacttccaattgtcatattgacttgatactcaagtcatctcccgaggatttgaagatctggccacatagttacgaatttcgtctgagagttgctctgagtccaaggggagatcttattcttacatctcgaataaaaaacatcagctcagacagcaagccattccagtttacatttgcataccacacctacttttcggtgtctgacatcagtgaagtgagggttgaaggtctggagaccttggactatcttgacaacctgcaatccaggaaacgttttactgaacaaggagatgcggttgtattcgagtccgaagtggacaaggtgtatttgagtgctccgccaaaggttgtggtcatcgaccacgagaagaaaagaacgtttgtgttgaggaaagagggccttcctgacgttggtgagctacaaaattaggacgccctttcattcttcgattacaacgtttggtttgtgaaatttttgcagtcgtttggaacccctgggacaagaaggacgaggagtacaagaggatgctgtgcgtgggggctgcggctattgagaagccagtcactttaaagccaggcgaagagtggatagggaagcaggaaatttctgctgtgccgtccagttacagcagcgggcagttggaccctgaactgattcgtcgaatgcacacaatataaagtttacccgcgattgcatcgatcctacgttccaaactagcctgtgttttttttttaattctgaagcagcgctgggattggaatcatcaccctgttaattactagacaaattgggccggaggtgccattcagatccgtatacaatattctttttctctgttttttttttgtattgtaccactagtccactacaaaaggaagccccaagtttgtactgcatgtggcaaacaaaactaccaagatatatatactaattgagttgt

SEQ ID NO: 59529 - DNA, 216 bp, Zea mays
  Clone ID: MRT4577_154289C.1
ttgggctcgcggtctccataatggacgtggagacggaggtgatggtaggtcagtagtatcgagtagggatcatcgaccattgaacacggtggtaggattgactagtgagggtaatcaactggtgggagtggagaccatcgctccggttgtatatatctaatctaccagaacctattttaggagatcttgtctttctcaaaaaaaaaaaaaaaaaaa

SEQ ID NO: 59530 - DNA, 344 bp, Zea mays
  Clone ID: MRT4577_15428C.1
tgctcccggccggcatggccgagggattagcgtggccgccgccgatgtgccttactaacaaactgcttacggaaagaatattggaaggaacgtggggggagccgttgccatttccgaactacttttccaattttagttgtcattccagagagctcatacacatgattcaaaatcagcagcaatgtcaggtgccggggataccaactcggaatctataagagcattatgcaaaacaactacctattcaaacctctgcttcagacccttatctagacgtgcaactgctactgcagcttgcacttggctttcaccccatgattcccccgcagtaagcctcaacacag

SEQ ID NO: 59531 - DNA, 314 bp, Zea mays
  unsure (1)..(314): unsure at all n locations
  Clone ID: MRT4577_154290C.1
ctccagccaagcagttgctaggtcctttgaaccagcaactgaagcttcctcgtctcatcatcgagaccagtaagcaacactggcggctaactctacagtcggcctcctcgctctagcgcctgtttgtccttgtcttttcctcccaggtggcccccctgcactttctgtctctcctcttgctcctcgcctcgctcctcgtcttgcggcccgccgtcctgcactggtctcttcccgccttttttctcctgacgtgcgctccttggtcttgccttcctgtgccctgcctatctgcnctctgctgcgccctgtgcggg

SEQ ID NO: 59532 - DNA, 680 bp, Zea mays
  Clone ID: MRT4577_154291C.1
gggaccctcgggtctgccgtggaccgtaattgaaagcaacgcgtttgcctgctgctccgactgcgatagctagcggcaatggacgccggcaagctgccccaagtctacacatataccaggcgctggccgagctctggaccgccgccgcggctaatgagcgagcttacttacattaactgcgcggctctcactacctgtatcatgaaaatgcataacctgtgcatgcgagactgaggaagaagatacaacatgaagagatgagaggcggctaccaactaaggcgcctctctgatgcataattaactgactggctaaaccatgcaatcgacaatatggggagctgtctgaatggacaaaaacgcggcaaaactgctacgcacaatcataccatggatcgcgggtaagaacataccatgaacaggcaagaaagcaggcattaacgaactatacgtgggcaggaatgcaccaatctataccttcatgagagctgtaccagatacatcagatgatgaccatttgatacttgagcagagattgaatgatctttatgatgaagatatgagtgctgtactagctatgcagctggacaagatggtgggacccggaatgacagcgaagatgcattcaacaagcatgcatgtcgagggaaagatattatctcggagcgaaatctgtacgga

SEQ ID NO: 59533 - DNA, 323 bp, Zea mays
  unsure (1)..(323): unsure at all n locations
  Clone ID: MRT4577_154292C.1
gggggncaagaattggttgggcttccctccaaggtcagaatcaacctttttttggccaagcaatgtttaaccctacctttcccctcaaaatacaacttttttttgcccgggtcagcttaaggcccagcttttaaggggccccgcccccctttaatttgaacaaaacccccaggaacaattttgcccctgcccctaacattttttgggggcccctttatcctggcccatatccttctgactttttggattgcccaagggggccattagcccgtcaatacctttttatttgcaaaccttttgcccggcttttgggttaatgggcc

SEQ ID NO: 59534 - DNA, 373 bp, Zea mays
  Clone ID: MRT4577_154293C.1
gtttgcgacaccccgtgcacccgcgcggggggggttgaacgaggtttcgttggcctccgaacccgcgccgccgccggctgtagccatgtccgacgaatacgtgtacttgcccgtctgggacgaggatgaagaagagctccaatatgacatcgatgatggtgatggggacagtggtggtggaagatcgaagaaaaaggccaaacagcacatggagcagctcaagcggctgcagcaaaaggatcccgatttctatcaatatttagaatagtttgataaagatttgttggaatttgatgatgatgatgatgaaatcaagaactaccggaagactggggttgaggagaaagagcaatatgtatgtaaagaggaactg

SEQ ID NO: 59535 - DNA, 468 bp, Zea mays
  Clone ID: MRT4577_154294C.1
gtggatgtgtgtatgcgccactcctactccaggattatactttctacacctactgtactacttcagggtggtacctgtaacgaatgaagagctggtgaacgtccaccagccagagtgtgctgacagctggcacacgctctccgacactaagtgactggaccaccaccaggagaggcctttcgtgttcgaagcaagatgaccgtgcaccaggccgtatacatgctctagctgggcattctctgcgacgacgccgtgttagacgcgctgtgcgcgcacctgctcatctagactacgcgtcgaaagaagaccgacgggtggagcttctcaccgtgcccgacctgatactggagctggagcgcctgcaactgatacatgacgtcgtaccagattgtgggcgcttgtgaacgcccgcgcgtacctctcatgaggcgtcctgtgagctgagataggacttgggctccctatact

SEQ ID NO: 59536 - DNA, 551 bp, Zea mays
  Clone ID: MRT4577_154295C.1
cacaactccattttttcaagagatttttattttcctaggagaaaataaattaatttcctctcggaaaatagaaactgtcaaaagaagtcaggcacacttcctacaaatacaagtcgctagagaggactccctgaaaatggttgcgggtttcagccaaacttttttttagcagaaatggttctgctgaaggtcaccggacccagctgattctgaagtctgtttgccaaagcctaggcacgctctccgtcatcctgcactacctctacaatgacaactctcaagcaggtccatcgcttccactatccgtccatgtgacggcatcagctctacaccccttcttcatctccaaaacaagattcatgcccccatccacacttccatgcctgcagaggcagccgatcagcgcagtgtagtgtagctcacagcatctagcaccacaccagcattcctcatctcctgaaacaccgacctcgctgcctcaatgtctgctagtgcccattaaccagcgcgacataattgaaggcactgagctcacattcgttcttcctcaa

SEQ ID NO: 59537 - DNA, 356 bp, Zea mays
  Clone ID: MRT4577_154296C.1
aagttcggcacgaggctgctcaattctcagccgccgccaattccttcccgtgctccgcaaccgctgagcgagaacaagagatggccggcaagggcgatggcccggctctcggcatcgatctcggcacgacgtactcttgcgtcggcgtgcggcagcaccaccgcgtcgagatcattggcaaggaccagggtaaccgtaccacgccctagtacgtcgacttaaccgactgacgagcgcctgatcgtagatgcgggcatagaaccagggccggcatgaaccacctctgcaccgggtatgatgccaagcctctcatcgggcggaggttcagcgatgcctgagtccagagtgatataaac

SEQ ID NO: 59538 - DNA, 303 bp, Zea mays
  Clone ID: MRT4577_154297C.1
tctgggaggccgatcatgtagagcatggtatcacataccagatgccaggcgatcggtcttccgcccgatgtgcatgacatagctatggtcagagatacaatggctaaccgtgatgggcaataggttgcagacgcacagatgcaaacaacaacagttttaagtgaacagtttctgggaggactgtttcaggctttgaatatagcacccgtgttgcatacggtttttatgctcaatttgcaggggggaaacatcctgttaggaagaataacaaactgttaagagacacaagatgtgctctttgtt

SEQ ID NO: 59539 - DNA, 3306 bp, Zea mays
  Clone ID: MRT4577_154298C.1
cactgtgacttcgagctgggtgggcaccatgtggaatccaaaaagaggctctccccccctcgccctgctgttccccctctcccgcctccactccatctccgtctccgcgcccttccgacctcccagtcctcctcatctcgcgattggcgaattatagggtttcgcggcggccacccggatccagctcggcttggcgagcgcctccaaagcttcagatggcgagctggcgcgctgtgctcactcgctgttccgcggccaccgcctcgacggcgacgccgggcttctgtgcgcaagtgccggggtccggaccccccgtcccccccccgctggccaccatcttccagctcatcctgtggaaatctcaactgtaaatccgctgtgcttgtgatattctgactgtgggggcctgacagaattctcattgtgcaagattttttcgctcgtgccgctatgctcccctggatctcccgacgtccataatttagacgaggaaaatgttaagttggaggatcttctcgatgaggatgaaataattcaggagtgcaaagcactgaatacccgcttaatcaattttttgcgggataaggttaaagtgcagcaattgctctgctacatggtggagaaggctcctgaagatgcagtaacgaataacctttttttgtggcagaggttggtggaaataataacaaccttttactcgttagtgatcaatctgttgatgagctaggatgaagatcttatgaatttgcttttctccttcctaaaacctgaccaccctcatgggacattgttggctggttactttgctaaggtagtaatttgtttggcgatgaggaagacacttcaactagttcattatgtgcagggccatcctgaaatagttagccagcttgttgatcttattgggattacttctatcatggaggttttgattcgcttaatcggtgcagatgaaactatgtattcaagccatgcagattctatgcaatggttagatgacatacaagtccttgagatgattgttgacaagttcagcacatcagattctgctgaggttcacgcaaatgctgctgaaatcctttgtgcagtaaccagatacgcccctccagcacttgctgcaaagatttccagtccaagcttcgtagggaggttatttcaacatgcttttgaagattcaaggcctaaatcggtgctggtccactcattatcagtgtgcatatctttgttagatcctaagagacttgtatcggcttcctaccaagctttccgtggccaggtgagtcacggaacacttgtcactgcaagttcagagaaagtaaatgacatgctgtatacccaaagggatttgttgaaactactggatgttttatcagctgaaattgttctacatacaacatatggaagctaacaaacttcacttgggaaatatagcttaaagactgttgaggacacctctgttgtactatcaattggtagtcaagctgctatacaaccaatgattcaactaggagctatcaagcacattaaaaatctatttggagattgcagtgcagaaaatttcgagtgctaacaggactagtttattattcgatcttgtttggagcgtaagcatgctccactgtttggccatgtccatgataagtgtacagtctctacaggtgttcaggaagctgaaaagaactctaggctctgtcgtctaggattctaacgtaagcatacattggtctacagagggacgatgtcgaccaaggataggaatagttggtcaaatgacacgaatagccaacaagctccttcagctggccaataccaacatcatggtccaatcatatttgcagcaaaattctgattggattgagtggcacaccagtaccctaacgaagcgtaatgcattagaaaatgtttaccagtgggcatgtggtcgaccaacatcactacaggatcgtggtagggatagtgatgatgaagacttccgagatagggactacgatgtggctgcacttgctagtaatttaagccaggcatttaaatatggtatctacagtaacgatgacattgacgaggctcaagcatcacttgagcgggatgatgaggatgtatattttgatgatgaatctgcagaggtagtaatctcctcccttcgccttggagacgaccaagaaagtggctcgctctttacaaattccaactggtttgcatttgacgaggacaaggcactgaatgatggtttggttagcccagaagcttccccatctccaaattcagaaatatccgcactaaaagaggatgatgaagtcattcttggcgaagtaatagatgacacagaaggttctgaaccaactctaccagtctccaacaaagacgcaaacgaagagtctggtcacaccgtcttggcaaatggtaccattgacaaacaggaagatgatatcaggccactgactccggatgtaaaagagagtcgacccgagtttgtggaatggaaggaggaagaagctgaacctggtgatgttgctgagatggagatgataggttatggctttggcgatgcaaagttaggagaggaaaagaagagtgatgagcttggcctatgaagtgcattgtaagaggagcagaatttcagaggaagcacttggaactggtcagaccattattgcacaagcagtctgaggatcatatgtgggttctctgttgtacacttgaaggtggtcccggactgtgagtgttatggagccgcaaacaatgaacttgtcaaatggatgggttatgaaatgaatttgagggcagcagagttccgctcacgtgatggcggatgatgatggacgtgacaaagcacggagcacttggaactggttggaccattactgtacaagcagtttgaggatcatgtgtgggttttctgttctactctcttggaggaaggtggtcccggaacatgcatctgatggagcctcaaaggttccacttagtctcatggagatgcttaggttcgatgtgtaacatattcatggagacgcaaaattcagaaagttgacttccctgcccttttccttaatcagtggggttctggttgtgtcactctggtaaatagccgataattgaataggtgatatctggtctggctacatgtccattactgtagttggtgctatttgtacgaaagttttggctcaaatgcagtcagttgattcttgtcatatttagaacttgtttgaaatttgtgtaaacgaaaaaaatatagcttctatttttcccaggtgcttggtgcttaattcatctgttataaatatagattttattttcccctct

SEQ ID NO: 59540 - DNA, 478 bp, Zea mays
  Clone ID: MRT4577_154299C.1
ccggccggggaactacgatctctcccatttcgagtgccttctccttcttcttcgtgcgccgccgcttccgctgtttccgcccggcgagtgacatgacgtcccacaagaactctccggatcctcaacaacctggactacaagatgagcctcaaccgccccatcacctagtggatctgcatgggcaccgacaacagccatcaggtcactaacgcctagcggatgatactgaggggctcaccagagtcgaatatctgaatggtggaagaaatggtgagtaatgacacgtgtggtgcataggactctgacgtgtaggaatgtcttggtaacattattgtgcttgacgaaactgtacatgaaggaccatgctatgactggtggttgaagagccgcctttatgatatggagaagtcatcatatgttgcattgcactcaacaatcgatctgctatgcgattattttctcgacaggaatggttgat

SEQ ID NO: 59541 - DNA, 902 bp, Zea mays
  unsure (1)..(902): unsure at all n locations
  Clone ID: MRT4577_15429C.1
tctaccctctatccaatttgcttcagggcaggagaagctgggatgtctggtactgagcttaccctgcgtgcccaggggaccggccgtcgccaggcgctgcatttcccatggggctggcccggcgctgtgatacgcaggggtcagtgcactggaggtgcgattggtgacgactacttgatgacagattttgggccacgtggaagacactgcgcctatgttggcagtcaagatcgaccacctgcggccagtctcagtctgcctgcgcgaattacaaataaagatggcactgacattattttttcaattttctgtacgaggggtagaaagtttttcatagatggtctattatgtcccatgggcaaccctaaatatgtgaaaggaagaatcccaacttgaaactgaaaggattgctttcaagaagaagagttgtttctggcatgcctccaaaaccagaatggtatcatctgcatattgaattatgggaaaattttgaccacatctttgttgaattgggagattgagtatgcccatatctttggctttgttgattattgactaagaagatctgctgccaacacaaaaaggaggggggagagagggtctccttgccgtactcctcttttgcacttaaagaatttaccaggtactccattgaggagcattgcagatgtgccagatttcataatcatttccatccacttgagccatttgggaccgaancttttgtgttgcaaaattttgtagatcacatcatgttctattttatcaaaagttttttcaaaatccattttcaggatgaccatttccttctttgatgatttacagaggtgcaagtattcgaaagaccacgctagacaatcttgtattgacctgtccttgatgaatccatattgatttacatg

SEQ ID NO: 59542 - DNA, 496 bp, Zea mays
  Clone ID: MRT4577_1542C.1
tttcacgcgtccgcccacgcgtccgcccacgcgtccgcccacgcgtccgcggacgcgtgggttcggatatgattttatggtggagtacaagcctggcaaactcaatggcgcagctgatgctctctcacgtcgtgccgagtcaggcatggcgctcaacaccatctctacaccttcttttgagctgtttgacagtttgcgagccgaggctgcaacggacctacaaatccaggatgtgcgccagcagcttgctgctggcactgtttcaccaggttggacagaattggatgggttgctccttttcaaaggaaaagtctatgtgccagatgcctctactctttggccgatactattatccagtgcccatgacacaggacatgaaggtatccaaaagacaattcacaggttgcgggtcgtcattctataatcctcatgcattacagagggttaaggaattcataaggggtgtttcagtctaccaacgcaatataactgaaca

SEQ ID NO: 59543 - DNA, 300 bp, Zea mays
  Clone ID: MRT4577_154300C.1
gtttttctttctggttattatatctgccgcaggatgtatattttgatgatgaatctgcagagggagtaatctcctcccttcgccttggagacgaccaagaaaggtttattctttttatatttgatttgactactgttcttccttttgtaagcacatttggtgtttgatacaagaattggctaatgaagatgtcatttgcagtggctcgctctttacaaattccaactggtttgcatttgacgaggacaaggcactgaatgatggtttggttagcccagaagcttccccatctccaaattc

SEQ ID NO: 59544 - DNA, 1304 bp, Zea mays
  Clone ID: MRT4577_154301C.1
gggcacaagaggccggccgccgacctgcacgccagaaccaaactaccaaagcgagagacaaccgctgcgccactgcggaaacgatttcgtcgccatgaccatgacgtctcgtttcgttgcggcggcctcttcctcctcgtcctcgtgccccctcgcctgcctaatctctcgccgcggccttgccggtgccgcagacggccatggacctgcgaaggtgcccttgtggaaagatccgttgagcccgagcaagtggaaggaagagcactttgttctagcaagcctctctatgtggggggctcttttttatggtggtttcaagttttttggtggaaagaaggaagacaagattgaggcggcatcaggacagacataggtggctgggatgggagttcttgcctatttctgtggccaggcaacaatgttaaataaaaggaatgtgttatattgtgctttcaagttgataaattgtggcaaccaggttttgattatgtaggcaatattttgacaagctactcttatccagcatgaatgacttcacgtttgtgaatgctgcaaatgttgtacttctttcatgcgattgagtagatgttttacttctgttgccatcaccagttcaacgctgtacttttaattgattcgatcacgtgctttctagtttgcgttgttacagatgaatttagcaaacgttttattggtggttttatttgaaaattggtgtattggttgttggatgtatttacgtgcctccgtaaggcctacacctcttccgcagtgtgatgtggagaaaattttggatcccggatttttctgattttggaagcccccacaacttgaggtacacggagttgaccttgtggccgcttcagcccaccaagcaccggcaggggcaacaaccacaacggtggcactaggaactcaatccggctcggcgcaacatttcttcactatcggcgcattcggggagctgcaatcgtcagtagcctcttcaccgctgctatagctgccggcgcctcgttcgccttggcacgttgtcccatctcgtgactcggtgtcacactcggtattgttgagctgtctattttccttcgtttcttcatgcttgtttaatattagttcaaatgtatctctgtctattttttataggcactcgcttcaaaactcctattcattttattcgtttcttcatgcttgctcgttgccattcatcttcttgtactcatcacatgtgggagcaatgcttttatttgatgaagtggcttctttatgacctatctttcatgacatcttaaatgctactagattgc

SEQ ID NO: 59545 - DNA, 297 bp, Zea mays
  Clone ID: MRT4577_154302C.1
cgttccaacttaagtaacaccatgaaacaggtcatatagatgtgacactaagtcttgtcacatcaagttgtggagtctcaatttatggtctcttggacacacattttctaacctgttagtcatattacagatggtctggcgctaagtcacacagcatcaaaccatcagtagggtactactatttatcaggttctgcaagtttgagctacccctccctaatcacacttattaatgaaaggggttgcatttagacccgaccagttgcctccaagagcacaagtgcatgattagacacat

SEQ ID NO: 59546 - DNA, 797 bp, Zea mays
  Clone ID: MRT4577_154303C.1
gggtacctcgaggccggccgggccagcccagtccagcccatgtacattccgcagaccctagaaacttgcaggttgcagccgcgtctctgaccatcgccgaggaaccaaagctagagacaaccgctgcgtaaacgaatccgtcgccatggcgtctcgtctcgtttcgttgcggcggcctcttcctcctcgtcctcgtgccccctcgcccgcctaatctctcgccgcggccttgccggtgccgcagacggccatggacctgcgaaggtgcccttgtggaaagatccgttgagcccgagcaagtggaaggaagagcactttgttctagcaagcctctctatgtggggggctcttttttatggtggtttcaagttttttggtggaaagaaggaagacaagattgaggtggcatcaggacagacataggtggctgggatgggagttcttgcctatttctgtggccaggcaacaatgttaaataaaaggaatgtgttatattgtgctttcaagatgataaattgtggcaaccaggttttgattatgtaggcaatattttgacaagctactcttatccagcatgaatgacttcatgttagtgcgattgagtagatgttttacttctgttgccatcaccagttcaacgctgtactttcaattgattcggtcccgtgttttctagtttgcgttgttacagatgaatttgacttaagttttattgataattctatttgtattgcttgcaattagaaattgcaatgtgggtttttggatgtatctacgtgccaccataatttggtgtt

SEQ ID NO: 59547 - DNA, 398 bp, Zea mays
  Clone ID: MRT4577_154304C.1
tggttacgcgtccgcccacgcatccggcgggggggcttgcaataaagcaggggctatgacaataccacccggccaagctcgtgcctttcagcacagaccaggaggactcgttagtgctgtggacggagagcaaggacgtgggcaagggcttacgctggatccgcatggttaacaacacccgccttaacttggacaccttacacggcgacaaggaccactgcagcgtgcaccacggcaccgacgtcttgctctgggagtggtgcaagggctagaaccagagctggaagatcctgccgtggggtcccgaggccaactactccggggcccacccaggaggaccgcacgccttgcgccgtttttgcaaggccggcggctaggactacagccctacggtgcgc

SEQ ID NO: 59548 - DNA, 1088 bp, Zea mays
  unsure (1)..(1088): unsure at all n locations
  Clone ID: MRT4577_154305C.1
gggtacctcgaggccggccgggcgggccgggagaccctagaaacttgcagccgcgtccctgaccatcgcagaggaaccaaagctagagacaaccgctgcgtaaacgaatccatcgccatggcgtctcgtctcgttgcggcggcggcctcctcctcctccctctcctcagcgtcccccctcgctcgcctaatctctcgccgcggccttgccggtgccgcagacggccatgggtctgcgaaggtgcccttgtggaaagatccgttgagcccgagcaagtggaaggaagagcactttgttctagcaagcctctcaatgtggggggttattttttatggtggttacaagctttttagtggaaagaaggaagccaagactgaggcggcatcaccacaggcataggtggcggagatggagttatacccgtatctgtggcctggcaacaatgttaaataaaaggaatgctttatgttgtgctttcaagttgataaattgtggcaacaggagattttgctttacgtaggcaatatattgagaagctactcttactcatccaccatgaataatctttgctgcagtggagcttcatgtcggcgaacaatgcaaacgttgtacttctttcatgcgattgagtagttgatgttttacttctgttgccccccccagttgaacgctgtacttgcagaatgatacgatctccgtgctttctaaaaaaaaaaaaaaaaaaaaaaaatgtttgcgttgttactgatgaatttagcaaacgttttattggtggtattatttgaaaaaaaaaaaaaaaaaaaaaaaaaaaacaaaaaaaaaaaaaatttaaaaaannntagtttgcgttgttactgatgaatttagcaaacgttttattggtggtattatttgaaaattggagtattggtagggatgaaaacggtcggaaacggtatttattcggtactaaagaaaatcacactgatattactgaaacaatataataaaaaaaaaaaaaacaagacacgcatgtgcaccaaataaaaatactacagaaccgctgaataaattccgatccgtgccaacgggggtgatcccgatttaga

SEQ ID NO: 59549 - DNA, 843 bp, Zea mays
  Clone ID: MRT4577_154306C.1
ggtggaacaaagctagagaaaccgctgcgtaaacgaatccatcgccatggcgtctcgtctcgttgcggcggcggcctcctcctcctccgccctctcctcagcgtcccccctcgctcgcctaatctctcgccgcggccttgccggtgccgcagacggccatgggtctgcgaaggtgcccttgtggaaagatccgttgagcccgagcaagtggaaggaagagcactttgttctagcaagcctctcaatgtggggggttattttttatggtggttacaagctttttagtggaaagaaggaagccaagactgaggcggcatcaccccaggcataggtggcggagatggagttctacccatatctgtggcctggcaacaatgttaaataaaaggaatgctttatgttgtgctttcaagttgataaattgtggcaacaggagattttgctttacctaggcaatatattgagaagctactcttactcatccaccatgaataatctttgctgcagtggagcttcatgtcggcgaacaatgcaaacgttgtacttctttcatgcgattgagtagttgatgttttacttctgttgccaccaacagttgaacgctgtacttgcagattgataagatctccgtgcttcctttctagtttgcgttgttactgatgaatttagcaaacgttttattggtggttttatttgaaaatgagtatgatgaaaagaaacgggtaaaaaattggtgtattggttgttggatgtatttacgtgcctccgtaaggcctacacctcttccgcagtgtgatgtggagaaaattttggatcccggatttttctgattttggaagcccc

SEQ ID NO: 59550 - DNA, 673 bp, Zea mays
  Clone ID: MRT4577_154307C.1
atgagcggggtactcgggcagaggccgtcgcggccgtggccgccgggggaccccgcgtccacgccgccgtcggagcccgccacagccgccgcggacgcgggcgcgaggggcgaggcgtccgcgctcagggacctgggcacgtccatggacgccatctccttcgggttcgcggccacggccatcctcatctcgctcttcctcctcatggccatcttcgagcacctcatcaagccccgggccttcccgcccgactcccccgacgacggcggcagcctgccgcacgctgaccgcctgcacggccgcctctcgcctgggaagcttcggagcccgcccatggtggaggccgtgctgcaggcggcggacctgtcggtgctgatgccggggcagcggtacccgacgtacctggcgcagccggcgccgctgccgccgccgtgctccagggaaggcgtgcactactggccaccgcacgaccaccacaactcgtacatgccgccctgatctggtcctcatcctccacggccaccacgagagcatgcatgtttccacgcagatacgctgcgtccacggtccgtacgacgcgctcgttcatcgcgcttactatagttttgagaggttgtaaattcagttgttcaggtgatcgcgaatccgatatggacgtcctgtccttgctgcc

SEQ ID NO: 59551 - DNA, 328 bp, Zea mays
  Clone ID: MRT4577_154308C.1
ctccttcaaaagggcataggggggaaataacactaggcaaattcaaaacgggaaccaagggcaaaacggaacacaacaacaaaaccctggggggcggaaccaaaaataaggagcatgggcccggcaaaacagccagaaccgggaaaccacaattccactagaaaaagcccccacaccacccccgacaggggcaactaccgcaaaacccgaagaacagaaagaggtaaaacaggcttaaagcgggaccctcaggcggggggggcgggcgcccgacggcgaccccactaccagggtacatggggaaagggccaaagaccaaaaccttccc

SEQ ID NO: 59552 - DNA, 161 bp, Zea mays
  Clone ID: MRT4577_154309C.1
cccaggcgtccgcccacgcgtacgaaatatattcggcattgctgctcactacaagtctactgatcgccccattcgcagagactgttggcagtatgtatacgaaaacatggcttctgacttgtacatcgtactttggagattgcaggtgctgcgttaatcaa

SEQ ID NO: 59553 - DNA, 566 bp, Zea mays
  unsure (1)..(566): unsure at all n locations
  Clone ID: MRT4577_15430C.1
ccccctcgagnttttttttttcttttttttttttttttttttttttttttttttttttttttttttttttttttttttttttttttttttttttttggcccgaaaacccatttttgcccgggggttttggggaaaaaaccccctaaaacaaaattggggaaaaaacctttttctttggaaaaattctagggccccccctttttttttgggggggagcttggccccaaaaaattcccttaaaatcaccgttaaattcaaaagttgggggtttgcccctaaaaaattaaaaaacccccaaacccttttccttttgccttttttggggggcccccccacaaaaggggaaaaagaggggcccccccccccaaccggagagaaccccttttttgggttggcccaagggtccaaaaaccaaggggttccctttggggaaaaccccaaaaacggcccccagaatttgggggggagggccgaaaacaaaaggagggatgggcttcccccccccggctaaatattctttgtttttacccccccctttcccgcgtgggataaaaaaaaaacccccc

SEQ ID NO: 59554 - DNA, 280 bp, Zea mays
  Clone ID: MRT4577_154310C.1
gtatgcaagaagctgcactgcaggatctctgaactcgactctagtgaagggaactgtggtgctttgcttccaaacaagggcacagagatcagctgcagtggcagtggagactgtcaagaaagctcgtggcgtaggagtcatcttcgcccagttcttaactaaggacatagcgaccttcatcgatatgccctgttttcaagtagactaccaggttggaacagctatcctcgcatacaccactagcacgagaaatcccaccgtccagtttggctcagcaaaa

SEQ ID NO: 59555 - DNA, 557 bp, Zea mays
  Clone ID: MRT4577_154311C.1
ggggggaggagggggggggggggggaaagggcgaggaacatgggagggaaggaaacatactggtgctgtacgtgggggttcagccaagcaggtgggtggatgcaccggtggggctgagctgaggcagaggcggtgggcaaaagtgaggaccaggggctgagggaagtaactgggcaaccaaatgtgcaagcataatgttgtttatgtgggccggagaatccagaccacgacaggggaaactggtgacaaacatgaccaggtgaccaaagtgccgggcaaaaacgacatgcatactggaatacatgtgcttgacaggggatctagagggagggaccatgggtaaacagggatgatagctgtgagtgggcttgaggggcttgggaggggaggcggggggctgggctgtgggacgaccagggctgctaggaggggtgggaccaaccttgtgggcaggggggggatgacggggagcagtggggagcgtgaccaatatggtgagggtggcctagtgcgggggagtgctccacagggggtgatggggcacaccacgcgcctta

SEQ ID NO: 59556 - DNA, 150 bp, Zea mays
  Clone ID: MRT4577_154312C.1
ttgcagttcacagcgcccgcccggactcaaggggggcggtttagaagcgcttaacggcatctttggcagcaatatggtggcgcggttcatccttttcgttgcggcgtgctgtcaccatttttttgtgccctttccctaaatcgctcttgc

SEQ ID NO: 59557 - DNA, 472 bp, Zea mays
  unsure (1)..(472): unsure at all n locations
  Clone ID: MRT4577_154313C.1
aaaatgcaccacctacgcccccaacgactcgtcgtttctcctctcacccggggaaagagaaagagagagaccgcggccagattcatccctccctccctcccaagtctcccaagagtccgctgcaaatcaaacagcgccccgctattccaacccaccttaatcacactattaatccggctccaaccctgcagcagaggtggtttggaggtttggtggtggcaggattcccctcccgcgggcggctcggctccctcccctccgcgcgcgaatcgcctcctcggtttcctgaatcgggngggncngctcgngagggctgcaaggggaggagaagaaaggtgggctgaggtcaatcaagtccgggccaagcaagcgatgatggagaggaggtcgctcatggaggcgctgaagacgccgccacaaggaggcatccacggacacgtcagcgatctccatgctcaagtacgccgtgctg

SEQ ID NO: 59558 - DNA, 398 bp, Zea mays
  Clone ID: MRT4577_154314C.1
ggccgagctgagcagcattcttatttttattacatggcccgtgcacgtacatgaacaccaccgcactggcctgctgctccacacactacgtgatacatttatctatcatctatgggcacatttacgatctacttagtgccataagcctcataaccatatgggcatggagtttactacagtgatattgcaaaacttagtcgtcgtcatggagctgcaagttacttacagtataacggacgctacggttttaccggtggtaactagctataactgaagagtctgcaacaaactgaaagtcacacgctatagtatgtgctcactgctcgtgcccctcgacggcggcacggggctcgccgttcacggcgcgcagccattaccttcttggctatgtcacgtgt

SEQ ID NO: 59559 - DNA, 414 bp, Zea mays
  unsure (1)..(414): unsure at all n locations
  Clone ID: MRT4577_154315C.1
atgcacgcgcaggtacgcttgcatcctttctagcgaggcgcccttcctttttttttacaccacncngnagacaaccatgcagcgcctcttaattaataacggcgtggcaaaacggggcggacataacctgaaagtctcacaacataatgggaagcgtaccacacaaggtacttgattacctatacattcagacgagccaccgcctaaggatacttaaagaacaaatgaccgtcattaaaaaactccccatgatgaaacccagacccaacctacttgtagtcaatggaccgcgatttcagactctcaccgggctcagagaactcgaactcctccataccatgaccgacataccagcgcaacaaaggcacgcttggtcctcatgaggtcgcactcgaggcagacgcacaagaacac

SEQ ID NO: 59560 - DNA, 435 bp, Zea mays
  Clone ID: MRT4577_154316C.1
aatcatgtcgtcgtaaaaaataggatgttaatcaattgttcatatgtaagaaacgacgagatgtcggtcctattaccatcagccaatcaaggagtctgctctggggacccagacacagagctcgaccccgatccggcgaggcggcgacccccctcccccctttccttcgctcgtccagcactgaacactcgcatccccgtcagccatggcagcggcagcaggtggaggcgcggtccatgcgctgtcccgcggtccatgcgctgtcccagaaggagcaggacatatagatgatgctcgccgctgacgtccaccttggcaccaagaactatgatttccagatggagcgctatgcctttaagcgccgcaccgacggtatctgccttcgctctcgcatcaatgccttcccccccccccccccccgcatgccaatccacg

SEQ ID NO: 59561 - DNA, 785 bp, Zea mays
  Clone ID: MRT4577_154317C.1
ctgcaagaaatctagatgtatattattaagatacatacacactctattgtagtaaattgtatctagagaatgtaaaagttgtatctaggtgtaccatgcccccacaaataataacacatacaattggagttcaactttgaaggttttattcgacgacgaacattttgtcccgagataattaacagatgtgctctacaagactacaactaatgcttaattagcgtggaagagacgacgtctcactgcgcgtggggcgccatgtccgtgtacccgatgctcttcctggtggtggggaagatcatgaacaccatgctcgacaggacgcctgctcccagcggcaggttcaccagcagctcccgcacgtccggcccggcgtccgggaacaggcacccctggatgctggcgtcggcgagcgccacggcgaggaacacgagcgccgagaagaaggcgtgcacgaagtccagcgccgtgacccggaaccgggagaggtcttcgtcatcgaacgccgcctcccgctgctcgcgggtccccgtgtagttaaacgggtagaagccccagaaggtggcggcgccgtggtagagcttgccgtcgcggccgacgaggctgtcggtgaaggagaggagcacgcacgagacggcgcaggcgccgatgagcgacaggaccaggtaccggttcgccgcgtggcatacgccgtggttgctgaaggatggcgccagcgcctggaacgccagcacggtgcccgtcggcaggagcttcatgaggtccgaggcgcttgacagggccgg

SEQ ID NO: 59562 - DNA, 498 bp, Zea mays
  Clone ID: MRT4577_154318C.1
cccacgcgcccgagaggactaggcgcttcggggctccgcgcgcggggatggacatggacctggccagcggcgccgtcgaggtgatcaacgacctgggcttcgacacgctcaccttcctcggcgtcacggtcctcgtcgtccccgccttccgcgtcgtcaatgccagcccaattctcggcttcttctgcgccggcgtcgtgctcaaccagttcggcctcatcaggaacctcaccgacgttaagctgctctccgagtggggaatccttttcctgctgtttgagatggggctggagctctccctctctcgcctcaaggctcttgcgaggtacgcctttgggatgggcttgcctcaggttcttttgtcaacccttgctttcacggcgttcgagcttcctcctaatgatgccataggaacaaagatattgcagtttctctttgattcaagacctgatcttgtgaacatcaggagtatcgatgaagcaatagtaattggagctg

SEQ ID NO: 59563 - DNA, 267 bp, Zea mays
  unsure (1)..(267): unsure at all n locations
  Clone ID: MRT4577_154319C.1
tcttcctgnttctaattacagagatctattgagaggagattttttcaaatctaggatggatcttcatttcctcaaccaacctatagttacatttcatttttttttttgctctcgttccctgtcttttctacctcatcttccttcctattccattcttcttcccatgctactctttatacccttcttctttcttcacctacccttttctctaatgatctctctattcgcacttttccatattctttattagctttaatcaccttctct

SEQ ID NO: 59564 - DNA, 556 bp, Zea mays
  unsure (1)..(556): unsure at all n locations
  Clone ID: MRT4577_15431C.1
gggtaagtcactggcattcctgatgccgccaacanatgagctatactttctgctaaaactaacttcttaccattagcgtgggagcacaagagtgcattattaacacctcatgagtctcttcattttggcaacacttctcacagcacaacatgattactcagattatgtcactccttcaactggaacttctacatgaggggggggaactaaaaatacaactgctgctggggcacctacatgagagtccgctaatcgtgctaagaagagaggagagttatacactaacttctatgataaagctagggtttggaagaggtgaaactacacacgaaggccaaaaagagggaaaaggaacaataacctttaacacaactgcagaataacttggtcattctagcaaaacccatcccaaggttctagcaacagggacccccaccaaatgctgaacttaagaaggtgcctccaacttgtgccatcccaccaaaacatactcagagaaagagctgccgtgtaacccgtcatacaccagcaggtactaaatgtcagtgcactatgc

SEQ ID NO: 59565 - DNA, 461 bp, Zea mays
  Clone ID: MRT4577_154320C.1
ataagcaggagagttcaatgctgccaattggttgaatggaagaaattgccgggggtaggcagcagctagctggctaaatggtagttgtagttgttgttgcaaataagcagcagagttcaatgcacctagttggttgaatggcagaaactgttgttgctgagagtaggcaacaaggtttgctagcacgagttgttgtagttgttgtgccctgatgttttgtgccaacacatgcaccaaaggtaacatagagggatgatcagagtatgcatcaaggaatggctaacacgagttgttgtatttgttgttccctgatgttttgtgccgctgaatgcaccaatggtaactgttgaaatcgggctattgattaaatggagaacattggtgataaagagaatatgcatgacctgcccggccggacggtcatacatgttcataccattaaggcgcagggtttggagcaa

SEQ ID NO: 59566 - DNA, 440 bp, Zea mays
  Clone ID: MRT4577_154321C.1
cggacgcgtggggtgacacgcaaggagcagcagcagcagcagggctcgcccgacggcgacggcgccgacccggggcggttcaccttcgactcgtcgccggtgttcgtcccgccggcggcgctcgcgatgctgagcgtcgtcgccgtcgccgtcggagcgtggagggcggttaccggtggcggcggcggcggcggcggcggcccgggcgtcggggagttcgtgtgctgcgcctggcttctgctctgcttctggccgttcgtgaggggcctcgtcggcggcaggggaagctacggcatcccctggagcgtcaggatcaaggctgccctgctcgtggccgcgttcgtgcacctgtccacgcgcaagtaacttgcccgacccaggcgtcgactcaccactgctactagtgctgcggatggttcacgtcagagacccgtaataat

SEQ ID NO: 59567 - DNA, 347 bp, Zea mays
  Clone ID: MRT4577_154322C.1
caaagactttcgcccttctccactttccttccgaaggttgtcgccccacccgaacgacgacaccatgaggtagggtattctccatccacctcggccgggccggcaccaagcgcccgaaacacgcgctggccagctgaactgcctggagcatggcattcaggcagacgaccagatgaccgaggacaagaccatagcgaagaggtgatgatgctctcaagaccttcctcgatgagactggtcgctgtgaatcacgagtaccatgctgctttggctgacctcggacccactatcatcgatgaggtgatagctgggacctaccgccagatcttctaccctgagcagatcat

SEQ ID NO: 59568 - DNA, 283 bp, Zea mays
  Clone ID: MRT4577_154323C.1
aaagatacgagagggtgatccgcgctgacaagagatggctgagatccccgcggtggctgctgacgcgctgtgacttctggccctacgtggtcgtggccgcactgccaaggcgaggtcgatcggcataggctcagggacctgcagcgctggcaggaggttcaggaaagcccactcgacgcgtgccgacaggtactggatcgacagctaacccgacgcggcggcggcggcggcgttggccacttccaggagcgcaccggactgccgatgcagggctagcaacagc

SEQ ID NO: 59569 - DNA, 309 bp, Zea mays
  Clone ID: MRT4577_154324C.1
ctccgttgggaatgtgacggggcaatatggatgattaagagaggtgtaccaggggaagatcattgatgatcatcacattgggaccctcatgagatctctgaaagcgaatgtacaaatgcgcttcaagggcttcagagagtggcctttgaagcttggtacatgacagaattccattattgccacggttgcccagatcaaaggggacagggctcccgtaattgaagccctacatggaaaattggttatggacataatgcgtgagaagacaaaaaatgcggcaatgcagagtatgctgaggatctttgatga

SEQ ID NO: 59570 - DNA, 1069 bp, Zea mays
  Clone ID: MRT4577_154325C.1
cattgggtacctcgaggccggccggagactggagagggcgagagtcctcccatccacaagttcttagcttttgcgagattgagatccggctgggacagaccgacagaggaaggaggacagaaaaatggggattggagatggatcttcaaatgggaaccagcaaccggtgcataaggaaatacgagatgagaccacaccacttcttccagtcaaggtggaggaggacgaggggtttcatgagttcaatggagcttcattctctggggcagttttcaatctgtcgaccaccatagttggggctggaattatggctcttccagcaagtatcaagatgctgggcatcatcccggggattctgttgatcatccttgtggcactgctcacagaggcatccatcgacatgcttgtaaggtgcagccaccagggcaagattacatcatatgggtggctgatgggcgaggttttcgggcagtgggggagaattgcgctgcaggcctccgtcatcataaacaatgttggcgtgctaattgtttacatgattatcattgggtgatgtattatctggaacatcatcagtgcatgtgcatcatccgtgattatttggatggtctcctgcgaagctcatacttaggattctctacggaatcgccatcaagcgcgacaagattctggctgtacccatgatcgtgcttgctgtcctgtcaaattctgtcgccctatacagtgacgcgatgaacatcttccgtaagaaggaagtggcctgatctcagatttcaaagtagtcagtgctggatgaagaatggtctcgcaatgcaagactcgatggtacaaaggaaaacgatgcgcttggattccgtgaagcaacgatttctttgtcagcaactcagaatttggccacttgaaagagtctgatgcttgaagtttcctggttctgtgtacacaagtcggctcaatgtcagaattgagccgcttgaaatatatatatttatattctatgcggagagtaggtcttggaaacagccttttccacaataatgtacagttattatgccaatttctgagttcagtt

SEQ ID NO: 59571 - DNA, 237 bp, Zea mays
  Clone ID: MRT4577_154326C.1
ggacttcaattcctatccacagcatgtgtacgccaattcttttgcaataggaaactatctcactagcaaaagactctttatttaaactgttggaaccgatatccacctcgttctctcaaatctccgcccccatctcttgactttattcacaaccttaacacctaccaatcttcaccacattacatgaaacaagaactcttgcctctttgacacactaacattttctcccggtctacc

SEQ ID NO: 59572 - DNA, 191 bp, Zea mays
  Clone ID: MRT4577_154327C.1
aatcctagtcactgctgcagagcggctgccgtcgctgctccatcacgacgacgccaaccacgtgagctcactagctcccgcggacccgactgagcgcagccaaaaccggggatcccaggcgcagcagctagcatggccgcgccatgcaaggacctcacgggccttcgccgggggcttgacgcggcgaggct

SEQ ID NO: 59573 - DNA, 270 bp, Zea mays
  Clone ID: MRT4577_154328C.1
ggaaccggcgatatggctgccgctgtgccccgcgccgcatttctctccccgctgcttccccttctcctgggcttcctgctcctctccgctccgcatggcggcagcggcctgcacaccaagggcgcccttcccctggatacggtcactttctacaaggtcattcccaaaagcaagttcgtcttggtgaagttcgacacccagtacccctacggtgagaagcaggatgagttcaagcgtcttgctgaaaactcggcttccagcgatgatctc

SEQ ID NO: 59574 - DNA, 242 bp, Zea mays
  Clone ID: MRT4577_154329C.1
tacactcgttcagatgcacttgatccggactaatgtacatcagcagcagaggacccagctggggtggtcgccacgcacgtcgtatcgcccttgttgtcgacatgcgccagtcattcggattccatgccaggcaagccggaatagggctgtcaaagcactgcatgcagataagtgtgcttgccgctgatgactgcgctactcgtgctatctgtggtcgtcgtgcacgcatgagtagcggccta

SEQ ID NO: 59575 - DNA, 414 bp, Zea mays
  Clone ID: MRT4577_15432C.1
attcggctcgagggaagcgtctcgggtgatgtttttcgccaacgtgagattcatgagtgtggggggaattgttcctcgcatgcatgctgtcatggcaatgggtgctgatgaggaacctagcaagggcacactgccaaagatcggggagatctcagcgatcgaagagattgctctcctcaagatctaagcgctaatgtctgtctgaagttgcaagcctggggcgcaattctgatgtagctagcaatgctgaggaccgatggttctacttgaaataagcttttaggagtatttctgcagaggcgctcttgaatatggactggtatcgatgcctactttagaacggcgcgcctattcataaaaacttatatctcaatgcttggctcaaaaaaaaaaaccaaaaaagggcggacgccg

SEQ ID NO: 59576 - DNA, 1587 bp, Zea mays
  Clone ID: MRT4577_154330C.1
aggaattgggccacttgaaagattttgatgcttgaagtttcctggttctgtggcaccaagtcggctcaatgtcagaattgagccgcttgatatggacatgggcgtcttgtctcgattaaaattaagaatggtatgactgtaccaaaattaactgaactcataaattggcataataactgtacattattgtggaaaaggctgtttccaagacctactctccgcatagaatataaatatatatatttcaagcggctcaattctgacattgagccgacttgtgtacacagaaccaggaaacttcaagcatcagattctttcaattggccaaattctgagttgctgacaaagaaatcgctccgttggtgagctttaagcgcttggattcattaagatacacatctgcgctatcagttgccctggcagtagtttttgtcgtaattactgctgggattgccatcatcaaactcttcaatggaactgtagcgatgcccaaactttttccagaattagatggtcttaattctatctggaatctttttacagctgtccctgttcttgttacggcctatatctgccactataacgttcacagcattgacaatgaacttgaagacagaacacagatcaagccgattgtgcgaacatcgctgttcctgtgctccagtgtttacattgccacaagtttctttgcttatctcctcttcggtgaaggcacactggacgacgtgctcgccaactttgacgcaaatcttggcattccattcagttcagtcttcgacgacatagtgcgagtgagctatgcggcacatgtcatgcttgtctttcccattgtcttctttgccctccggctcaacttggatgggttgctcttccccacatcaaggcacatctctcgtgacaacaagagattcgccatcatcaccgtctctctcctcgcagtaatttatcttgctgccattctcataccaagcatctgggacgcgttccagtttactggtgccacagctgctgtcctgattggttttatatttcctgccatggtcatacttagggattcttacggaatcgcgagcaagcgcgacaagattctggctgtaaccatgatcgtgcttgctgtggtgtcaaattctgtcgccctatacagtgacgcgatgaacatcttccgtaagaaggaagtggcctgatctcagatttcaaaagtagtcagtgctggatgaagaatggtctcgcaatgcaagactcgatggtacaaggaaaacgatgcgcttggattccgtgaaggaacgatttctttgtcagcaactcagaatttggccaattgaaagaatctgatgcttgaagtttcctggttctgtgtacacaagtcggctcaatgtcagaattgagccgcttgaaatatatatatttatattctatgcggagagtaggtcttggaaacagccttttccacaataatgtacagttattatgccaatttatgagttcagttaaattttgcaaaaaaaaaaaaaaaaaaaaaaaaaaaaaaaaaaaaaaaaaaaaaaaaaaaaaaaaaaaaaaaaaaaaaaaaaaaaaaaccaacaacac

SEQ ID NO: 59577 - DNA, 725 bp, Zea mays
  unsure (1)..(725): unsure at all n locations
  Clone ID: MRT4577_154331C.1
gacgtgcgtctcaaaagggagaaggggaaaccacctctaccaccaccacacctgataagaagggggccttcccgctcccgtcgctacgccatggacgcctgggaggccaccaaggcggtgttcgaccgggtgcgggcgctggacccggataacgcgtccaagatcatgggcctgctgctcatccaggacaacagcgacaaggagctcatccgcctcgccttcggccccgaccacctcctccacgccttcgtctccgccgcgcgcgccgacctcgccgccaagcccgcgtccccgccgtcgcccgtgctgggcccgctccaccagacctggggagcgccgccgcacccgagccctaccgctggctccgaccaccaacaccaggcccccttcgccgccgacctcgcgctcggctacgacttcgacggcgccggcgccggcgctgacgcgttcttccccgacgactacgactgctggtcaccggccggcgccgcccaccgccgcagcttctcgctcagcgacgccgaggccaccgccgccgccgccggaggcgctgcgtggaggccatgcatgtacttcgcgcgcgggttctgcaagaacggctcctcctgccgcttcctccacggctttccggaggacgatgacgccgccgcggagcgcgagatggtcgtcatgcgcggcaaagcttgtggcggccgccgccgngcgcccccagcagcagcagcagc

SEQ ID NO: 59578 - DNA, 1209 bp, Zea mays
  unsure (1)..(1209): unsure at all n locations
  Clone ID: MRT4577_154332C.1
cccacgcgtccgcccacgcgtccgcccacgcgtccgcccacgcgtccgcggacgcgtgggtgatactttgataggtgatgtattatcctggaacaacatcaggcgatgttcatcatcgtggtatattggagggctggtttggagctcatttgtggaattctcgtgccattgttcttcttgccacagctcttttggtgttcgctccgttggtgagctttaagcgcttggattcattaagatacacatctgcgctatcagttgccctggcagtagtttttgtcgtaattactgctgggattgccatcatcaaactcttcaatggaactgtagcgatgcccaaactttttccagaattagatggtcttaattctatctggaatctttttacagctgtccctgttcttgttacggcctatatctgccactataacgttcacagcattgacaatgaacttgaagacagaacacagatcaagccgattgtgcgaacatcgctgttcctgtgctccagtgtttacattgccacaagtttctttgcttatctcctcttcggtgaaggcacactggacgacgtgctcgccaactttgacgcaaatcttggcattccattcagttcagtcttcgatgacatagtgcgagtgagctatgcagcacatgtcatgcttgtctttcccattgtcttctttgccctccggctcactttgggatgggttgctcttccccacgtcaaggcacatctctcgtgacaacaagagattcgccatcatcaccgtctctctcctcgcagtaatttatcttgctgccattctcataccaagcatctgggacgcgttccagtttactggtgccacagctgctgtcctgattggttttatatttcctgccatggtcatacttaggtaactcaatgtttagttcttggtgtatgttgcctactactagccaagccattttgtatagcatgtaatatcgtggcttgaatttctgcagggattcttacggaatcgcgagcaagcgcgacaagattctggctgtaaccatgatcgtgcttgctgtcctgtcaaattctgtcgccctatacagtgacgcgatgaacatcttccgtaagaaggaagtggnctgatctcagatttcaaaagagtcagtgctggatgaagatggtctcgcaatgcaagactcgatggtacgagggaaacgatgcgcttggat

SEQ ID NO: 59579 - DNA, 2658 bp, Zea mays
  Clone ID: MRT4577_154333C.1
gttggcctcctcgggagaggccgggaaagggagtgggccaggcaaagtcggctcttgcgtcgacatcgacggggagaaacagctgtgggcaggcgatgaactgtagcgcgtgacagtgaggggatttggttggatccaatgtttggtcggtctgcttgcatcacctggttgcagctctgcatttcctggctataaagcgacggggcccttgcgctgggcccggagactggagagggcgagagtcctcccatccacaagttcttagcttttgcgagattgagatccggctggggacagaccgacagaggaaggtgaattgtgggaaagaggacagaaaaatggggattggagatggatcttcaaatgggaaccagcaaccggtgcataaggaaatacgagatgagaccacaccacttcttccagtcaaggtggaggaggacgaggggtttcatgagttcaatggagcttcattctctggggcagttttcaatctgtcgaccaccatagttggggctggaattatggctcttccagcaagtatcaagatgctgggcatcatcccggggattctgttgatcatccttgtggcactgctcacagaggcatccatcgacatgcttgtaaggtgcagccaccagggcaagattacatcatatgggtggctgatgggcgaggttttcgggcagtgggggagaattgcgctgcaggcctccgtcatcataaacaatgtcggcgtgctaattgtttacatgattatcattggtgatgtattatctggaacaacatcaggcgatgttcatcatcgtggtatattggagggctggtttggagctcatttgtggaattctcgtgccattgttcttcttgccacagctcttttggtgttcgctccgttggtgagctttaagcgcttggattcattaagatacacatctgcgctatcagttgccctggcagtagtttttgtcgtaattactgctgggattgccatcatcaaactcttcaatggaactgtagcgatgcccaaactttttccagaattagatggtcttaattctatctggaatctttttacagctgtccctgttcttgttacggcctatatctgccactataacgttcacagcattgacaatgaacttgaagacagaacacagatcaagccgattgtgcgaacatcgctgttcctgtgctccagtgtttacattgccacaagtttctttgcttatctcctcttcggtgaaggcacactggacgacgtgctcgccaactttgacgcaaatcttggcattccattcagttcagtcttcgatgacatagtgcgagtgagctatgcagcacatgtcatgcttgtctttcccattgtcttctttgccctccggctcaacttggatgggttgctcttccccacgtcaaggcacatctctcgtgacaacaagagattcgccatcatcaccgtctctctcctcgcagtaatttatcttgctgccattctcataccaagcatctgggacgcgttccagtttactggtgccacagctgctgtcctgattggttttatatttcctgccatggtcatacttagggattcttacggaatcgcgagcaagcgcgacaagattctggctgtaaccatgatcgtgcttgctgtcctgtcaaattctgtcgccctatacagtgacgcgatgaacatcttccgtaagaaggaagtggcctgatctcagatttcaaaagtagtcagtgctggatgaagaatggtctcgcaatgcaagactcgatggtacgaaggaaaacgatgcgcttggattccgtgaaggaacgatttctttgtcagcacctcagaatttggccacttgaaagaatctgatgcttgaagtttcctggttctgtgtacacaagtcggctcaatgtcagaattgagccgcttgaaatatatttagttatattctatgcggagagtaggtcttggaaacagccttttccacaataatgtacagttattatgccaatttctgagttcagttaaattttgtgaaatatggacatgggcgtcttgtctcgattaaaattgagaatggtatgattgcacattacgtcgctaaaaaaaaaaaaaccgcctagtgaaccaaattccggttatatttcccggcccgtcctcccacgcgtccgggaatcgcgagcaagcgcgacaagattctggctgtaaccatgatcgtgcttgctgtggtgtcaaattctgtcgccctatacagtgacgcgatgaacatcttccgtaagaaggaagtggcctgatctcagatttcaaaagtagtcagtgctggatgaagaatggtctcgcaatgcaagactcgatggtacaaggaaaacgatgcgcttggattccgtgaaggaacgatttctttgtcagcaactcagaatttggccaattgaaagaatctgatgcttgaagtttcctggttctgtgtacacaagtcggctcaatgtcagaattgagccgcttgaaatatatatatttatattctatgcggagagtaggtcttggaaacagccttttccacaataatgtacagttattatgccaatttatgagttcagttaaattttgtgcaatcacaccattcttaattttaatcgagacaagacgccccatgtccatat

SEQ ID NO: 59580 - DNA, 1416 bp, Zea mays
  unsure (1)..(1416): unsure at all n locations
  Clone ID: MRT4577_154334C.1
gggggnatcgacaaagcttcagtcacaacaggaaggaaagttagggtcagagttgttgagggcagggcacttacagctaatagtaaatctggaaaatgtgacccttatgtgaaactctagtatggaaaggctctataccgaacaaaaattctgacacaggcggtccgaccagtttggaatcacaagtttgagtttgatgagatctctggtggtgaatatctgaagatcaaatgctataatgcagatatgtttggtgatgaaagcattggtagtgcgagagttaatttggagggacttttagagggtgctacccgtgatgtttgggtcccacttgaaaaagtagattcaggagagataaggcttgaaatagaggcaataaagaatgatcacaacaatagcttgcagagctcaagcagtaaagctggatctggttggattgagctagtcataatcgaagccagagatcttgttgctgcggatctgagaggcactagtgatccttatgtcagggtgcactatgggagcaagaagaaacgaaccaaggtcatttacaaaacactgtctccacagtggaaccagacattcgagttcctggaaaccggagaacccctgattttgcatgtgaaggaccacaacgccgtccttccaaccgccagtatcggccattgcaccgtcgagtacagcatgctgtctccaaaccaatccgctgagaaatggataccgctccaaggcgtaaaaagcggagagatccatgtaagggtggcactgaaggtatcagtaccaggttcggagaagaagaacatgctcggggcaggtccgttcggcaaggggcacaagatgtcgacacagatgagagacagcctgaagagattcacgggcttgatcgacgacggcggtgacccggaggcactggcactagccgtggcggagatggaaggcatccagggcgagcaggaagagtacgtcgaaaccctggagcgggagaaggcgatgctgttgcacaagataaatgagcttggttccgaaatcattaggacagcatctggtcctccaaggacgccgtactagttagatctgcaaatgcacacccccccactactgaatgaacacgcatttatttatcggcaggcgaagacctggttgtacgtagaactctatagtgtgcatgtacaagtgagcagtacagctcgtgtaagtaggccaggcgtgtaggaagcacaggtgtatcttgtagtgattgataaaaactgctcaagcatcaaccggctggaagcttacagaagttggtcgactttgtacacagttagggcatgtttgggaacaatgtttttttaaaaccacattttataataccacagtttactgaatgttagaacaagaaaatgggaaaaattttacatcacctgttttgggggg

SEQ ID NO: 59581 - DNA, 478 bp, Zea mays
  unsure (1)..(478): unsure at all n locations
  Clone ID: MRT4577_154335C.1
tggcccggaacctttggtctgatttatgtgcttgtttatgtgcttgtttatgtgcttgtttatctccttgaccttaggccgaccccgatttagggaggcgctccgactgagtcccgacatgcccacgtctaaaacccggagaccactataaggagatatttctactgcctagcccacttttatgatcactaacacccttttaacccacacccaacccgaggtgcctctagcccgcctaggcccccaacaatagcttcgacgaaatcgtgcaccccaggacgacgccggatagagagaacgcaattaacatagccgcgacgacctaattcctatccacacttcacctaccctaactagggttagagttagcctctccggacgtaatcgtaaccgtcctcgataagacttccccaccggatctccaccgcatcggcgctacaccttacggngcaattaccgtgtagcggtgaaacgtcgg

SEQ ID NO: 59582 - DNA, 239 bp, Zea mays
  Clone ID: MRT4577_154336C.1
cctaacgaggatgcgtgcacgacgcgtgggggttttaaacaggaccacccagggatgcaaggacaaaaggtggggccaatgacatggcgtaaacccggaaatgcgatgcaggctagtccgataaacgcccagacactgaggcaaaccaatataagctaggaagaagatcaaaacagcttgtgaacaccatacccggcgttgacgctgcctgtactgccgtatggacaatacaattaaag

SEQ ID NO: 59583 - DNA, 299 bp, Zea mays
  Clone ID: MRT4577_154337C.1
gttagtatatacttatgttttctaaatacaagagactgtataatacaaacacagcggtgcaacgtgcgcaacggtttttaagcgaagataattgcacgagcataaaactggggtaataaataaatcacgctaccaaagaagagtgctgatgcttgcaactaagtgtacatgattccataatgaacatcataaacgtagcgatggccctttctattgtaatgatctcttaaaattttagcccgacatacgaatacctggatctgttatctgggctgacagttttgaccaaattgaacgtg

SEQ ID NO: 59584 - DNA, 394 bp, Zea mays
  unsure (1)..(394): unsure at all n locations
  Clone ID: MRT4577_154338C.1
tcgcgcgcctctgaagcccggggccgccggcccgtccgcctccctctccgcctgcgggccccaaggccaatagttttgaagtggcaatggcggaccaggctaaccaacccactgtccttcataagctcggtggccagttttattttctctcgatcatctctgaatgtgttgggggggggggcatatgcccatctgtctcattttatgaaaggagatttggcacagggaactacatgacccagagcctttggggcccttcaatgtgtggtagcggtggtttgaatgtgccagtgatgcagacttnggtttgtgctaatgctcctgttgagaaaggtggcgtgatcttcatgattgttttnatgatgggtggtgttttagttggtgtttcaaatgt

SEQ ID NO: 59585 - DNA, 155 bp, Zea mays
  unsure (1)..(155): unsure at all n locations
  Clone ID: MRT4577_154339C.1
tagatcccccaccacaatggcggtcacgcgctacntacaacaccctactcgtctatcagccctttccttatggggggcagaaaaggccgaactaattttctacacctcatctacggctcactacacgagaccctcctgggaaggcgctcaacatc

SEQ ID NO: 59586 - DNA, 585 bp, Zea mays
  Clone ID: MRT4577_15433C.1
taccctaacgcggctgtggcggaggggcctgagacgagctcacgggctccggagagcgactccagagctggccccgctggctggcgaccgggccaggctccagctgccgctgctgcataggctcggcctgggaagccacctgctcccgagcagtcagagggccgccgcctcagggcgggagtgggcgaggcgctcattggcctcagtaagcacagcccactgggaccgcagtgattcccaaacgctgctctcacggcagaggaacagcgacttagcggtgctcatgtccgcgagctcctgaaaagaaaaatagaatatcacaaagaatgccctgatcacacgaggtgtgcgtctaaatccttacctggaagaccttgggaacgtctttagaaaggatttccatggtcattcaaagcgacctcatcgccggctcgctatattcacggaaattttttcccgcaacttttcctccaactcatcattaagggcaaggagaggctccgaggtgtcacgaccctggaacaccagctgctgcccttcccactcattgggattgagctgcgcggggataaggccggtgctgcc

SEQ ID NO: 59587 - DNA, 425 bp, Zea mays
  Clone ID: MRT4577_154340C.1
gtataaaggagagcagagctgggctcttggcaattcttccaacaggcattgatatctcaacaacaactacacaaatggataatggatttgatccaacaggatggaaacttgctctagttactacaaggagcaatgctattccactgtctatggagagtaatttggccggtggatttagacaagctcacatgggacagcctatactatgatggaacctacaggcaaatgcagcagcaacagttatacggatcactccctactaatccatgcatgacaagcgatcccttagccgtatcaaatgaagtggatccatcaccatcagttaaaatggaggcaatggttacacatccccagaatttgcgcatgatgattgaaccaattccctgtcaaccactacagcagtattacgcgggcgtcgcttctgc

SEQ ID NO: 59588 - DNA, 173 bp, Zea mays
  Clone ID: MRT4577_154341C.1
atgcttaatgtttaatactttgagttgaagttattggatttgttttggattttaagttaaaggatttgcagatatatggtttaaaagtcacataattctcttctagatgcaatatttgtgtttaacaaagtcatatgctcttttacacaaaaaaaaaaaacaaaaaacaaaac

SEQ ID NO: 59589 - DNA, 599 bp, Zea mays
  Clone ID: MRT4577_154342C.1
aaagggggagaagcacacattgggtccctcgaggccggccggaaaaaacattatcagtatcttccacaagcacctgctatagttgtgtggtgcaaacaccaaaatgttgcctgccaaagtgtcatttgttttcctgatagtgtactgcgcagtaacattttcgctaggtcagatagctgttggcgaggcatgcacagtggatcagagggacaagatcacaacggactgcagagagttcatcaagctgaaaggccccgtcacagccccgtcgtacaccgacgactgctgcgtcgccataagagcggtgcccaatctcgacatggagtgcatcattcgcctgctctccaataaacagaagaagaagtacgacgtggacaagatccggcggctcggcagcgtcctctgcaatccacatccggtgatgacgtaaaatggggtgtggcagtagtttctgatggagtgcatcgcgtcaacaatatggagcttgaactatacaaaccctactgataatgtgtcaccatttcatatgtatatgtactccattcattaacaaaaaaaagtgtcttatatatcataaaaaaaaaaaaaaaaaagcggcc

SEQ ID NO: 59590 - DNA, 221 bp, Zea mays
  unsure (1)..(221): unsure at all n locations
  Clone ID: MRT4577_154343C.1
cccgccgctgcattgcctccccggcgtctctcaagtccctcgtctccgccatgtcccacggcgagctcccagcgcgggccggcgccgccgtcgtgctccgcgaggtcgcgtcgtcggcacacgcgcacacactcgaggccgtcctgacgaccccgggcatgtgcgacacgctcgtcgacctcgtccggaacnccgtgtccacgcaggccaccaaggccgcg

SEQ ID NO: 59591 - DNA, 249 bp, Zea mays
  Clone ID: MRT4577_154344C.1
ctgacgctgggtgctagctactcgatcggatcctgaccatgcccgcctaccagactactaccaccatcactaatatcatccacaaatccccattggcgatgtgcatcgtcgtggcggccacgttcctggcgttggccgtggtggctcccgtcgcgcttgcgcatgctctcgggtccgcggcgacgccgagtgggccgctgaacgtgacggcgatcctgtagtagtgtgggcagttcaccatgctcatgc

SEQ ID NO: 59592 - DNA, 1412 bp, Zea mays
  Clone ID: MRT4577_154345C.1
cctcgagccggcaggacaatccttatcctcgtctcccagtcagcacaggcacggtgtgcctcgaggcggtggttttgaccgctaccctcgatcccccgatagcagcagcagcagcagatcctcggcggcgacatggacacccccacggcgaaggcggcatggaacgccaactacggcgtcgtcggcagtggggaccgtcgtcttgccttctcccgccaactctcctccaacgccaccacgccgcgcctcgctcggtccgactcctccatctccatgcccgccccccttccccttcccccagtctacgaggggcccaagcccagcaggaagctactccgcctcgccacggccagccgccccatgcgccgcctcgccctcctcctcgccctcaacgttgcctactctgccaccgagttcgccatcggcctcttcaccggacgcgtaggcttagtttcagatgctttccatctcacctttggatgcggcttgttaactttctcattgtttgctatggctgcatcccgaaccaagcctgataacctctacacctatgggtacaagcgattggaggttctggctgcctttacaaatgctctgtttctattgttcctgtctttctccttggctgttgaagcattacatgcatttatgcaagatgaatcggagcacaagcattatctgattgtttctgctgtcaccaatcttttggttaatttacttggtgtttggttcttccggaactacgctcgtgttaacatagtttacaggaatgcagaggatatgaattaccactcggtctgtttgcatgtgttggcagattcaatacggagtgcaggcttgatactagcttcttggtttctttcattggggattgagaatgctgaggttctgtgcctgggaatcgtctcagtggcagtgtttatgcttgttttgccgttatttaaagctactggtaatatcctactgcaaatcgcacctagcaatgtgccaccttcagcctttacaaagtgctcgagacagattgctgcttgtgaagatgtctccgaagtatggcaaggtcgattctgggagcttgttcctggtcaggcagttggatctctctccattagggtgaagagcggcgctgacgaccgggcagtccttgaatacacgcatggtttatatcaggatttgggcatacaggatctgacggtccaaactgatgagtttgtagggcctgttagttagacggtaggggttctatcccagcttcacgaaagtgttgttttcagtttttttttcctaccaagtagtttctttcgcaaccgtgtctatctaaacactgtttttttattaagttcatctcacaacaaaaagttttttcacagctattttctccgagaagacaaacggttataaaaataggttcatcg

SEQ ID NO: 59593 - DNA, 316 bp, Zea mays
  Clone ID: MRT4577_154346C.1
acagcgatgagcgctcaggggtactgaatagtattactacagttaccactagggttacaggctcacttaactggcgcaggggcagctccggctaggaaccggaccagtccatgggcacggaggtctcttccacctggttacggctcctgcacggcgacttgatgggctgcagggtgtcacccatgatccaggggatgcttcagaaccgcttctccacgaggtggtccgggtggatggtcacgtggtgccatgccggcgccaccctggacgcgtcgtgctcctaagcacgagtgagccaccccctgacctgcacgtg

SEQ ID NO: 59594 - DNA, 1348 bp, Zea mays
  Clone ID: MRT4577_154347C.1
cccccctcgggagcagcagcagcagcagatcctcggcggcgacatggacacccccacggcgaaggcggcatggaacgccaactacggcgtcgtcggcagtggggaccgtcgtcttgccttctcccgccaactctcctccaacgccaccacgccgcgcctcgctcggtccgactcctccatctccatgcccgccccccttccccttcccccagtctacgaggggcccaagcccagcaggaagctactccgcctcgccacggccagccgccccatgcgccgcctcgccctcctcctcgccctcaacgttgcctactctgccaccgagttcgccatcggcctcttcaccggacgcgtaggcttagtttcagatgctttccatctcacctttggatgcggcttgttaactttctcattgtttgctatggctgcatcccgaaccaagcctgataacctctacacctatgggccagtctcctcattccctcccgcctttcaggctctatttctgttcgtctgtgcactaattcacactcacttattgttgtctgctttctttcaggtacaagcgattggaggttctggctgcctttacaaatgctctgtttctattgttcctgtctttctccttggctgttgaagcattacatgcatttatgcaagatgaatcggagcacaagcattatctgattgtttctgctgtcaccaatcttttggttaatttacttggtgtttggttcttccggaactacgctcgtgttaacatagtttacaggaatgcagaggatatgaattaccactcggtctgtttgcatgtgttggcagattcaatacggagtgcaggcttgatactagcttcttggtttctttcattggggattgagaatgctgaggttctgtgcctgggaatcgtctcagtggcagtgtttatgcttgttttgccgttatttaaagctactggtaatatcctactgcaaatcgcacctagcaatgtgccaccttcagcctttacaaagtgctcgagacagattgctgcttgtgaagatgtctccgaagtatggcaaggtcgattctgggagcttgttcctggtcaggcagttggatctctctccattagggtgaagagcggcgctgacgaccgggcagtccttgaatacacgcatggtttatatcaggatttgggcatacaggatctgacggtccaaactgatgagtttgtagggcctgttagttagacgctattttctccgagaagacaaacggttataaaaataggttcatcgaaaaagctatttttggagtcaaagataacaaagatcggttcactaccaaagaggacttattagttatt

SEQ ID NO: 59595 - DNA, 315 bp, Zea mays
  Clone ID: MRT4577_154348C.1
ccacaaggcgacaagagaccagcacaccaacagggggcaggttacaaggccaaaacgcgaaaaggaacacaaagcacctgggacgaccgagaaactcaaggacagccacagcgcaaagggacggagcagggggagcaacgctggaaggggcagcaaaggacatccaagccacgtacactaaatggcagaaggggcgagacgagcacccccggcgtgagagcaccgaaaacgccggcatcttcaggaacaagaacaaccgggaactcagaggccgcgaaagctctcgggaaaaccgatggcaacgcaaaaaaagga

SEQ ID NO: 59596 - DNA, 463 bp, Zea mays
  Clone ID: MRT4577_154349C.1
ctcgaggccggccgggcgcttctattaaggatggaggaggtgaagctgaggagcgcgtcaggcatggccaagctgactggtgtggcgttgtgtctcgccggggtcttagtcatcgccttctacgccggggagctgctgagcgccgtcaaccatcaccatgccttcggtgctcctgctcccacccatgctgcctcttccaccgcagcggcgaaaacgatgacgggagccgcgtggatcaaggggacgttcatcacggtgctcgctaccctggcgtggtccctgtggctcgtcctgcaggccgccgtgctcaaggagttcccgaacaggatgcttgtgatggcgacgcagtgcttgttcagcgtggtgcaatcgttcttcgccgcagtggtagctgagagggacttgtcgatgtggaagctccggctagacgtcgccttgctcgcggtcctttactcggggtttg

SEQ ID NO: 59597 - DNA, 499 bp, Zea mays
  Clone ID: MRT4577_15434C.1
ccccctctcgagtttttttttttttttttttttttttttttttttttttttttttttttttttttttttttttttaaaggcaacactgggccgccccgcattgggggggacagaataaaaacgatgagggtcgatgaaggaccccccgatcgagtacatacgtacgtacgaacagggggcttgaggaacactaaaaacagttagctcctatttccaatttttgaggggggggcgagcgttgagcgtgattttaacatttgggcgcggcacaaaaacaacgtcaacggttttatcgccgtcagcgccaatatcaaacagcatttgggggatgcacagggaaagttttattttccgggttttcccggggccggaccccggaacgaaggaaaattttccggggtactccttgtactgggggcctacctgcaacgttttgtccgggggcaggttgatggcaacgtcaaacttattgttcgcctgggggtcgaactcaatgccc

SEQ ID NO: 59598 - DNA, 410 bp, Zea mays
  Clone ID: MRT4577_154350C.1
gcttgacagatgatgatacggtcctgttgttgtttgttgttgttgaaaaatattgaacagggcaccgggccgggcggaagggggaaaaggcaaaaaacagggcacgggcggacgggactagcggatccgaccccggcaccaagcaagaaggaaaaaagggcatagctggggaaagagtgaaatcgttaaccactcacaaaaacacacaacacacgagccaaaagcataaagcccggggcccgaaaagccgaacgaaacacccaactaacaggggggggcccagcgcccactgcccaatgggaaaacgggaaacccgccgtgccaaaagaataaaggaaacggccaaggggaggggagaggcggtataggggattgttcgctcttccgcttacaaaatcactgactcgctg

SEQ ID NO: 59599 - DNA, 311 bp, Zea mays
  Clone ID: MRT4577_154351C.1
cccacgcgtccgggccgccgtggttatagtggcgcgcgcaccgacgccgggtgatggcggagatgagcctatatcgtcgccacccgccaacatgttcacacaagctaccgactcagtttctgctactgttcctttcccaacgcatgatgtaggcgacaattcaaggttgagagggccagctcgaagaccatagcgattgataaattttacattaaggtggatcataacatgtacgaatcctgtcatttctagcttgttttccgacaaatgcctacatagcagtgctagaagagtatattttacttcaccta

SEQ ID NO: 59600 - DNA, 615 bp, Zea mays
  Clone ID: MRT4577_154352C.1
tttttttttttttttacgacggatatgaccttcgtaattatattgggctatcaaccttcgtccaaggcccattatccccaagggaataatgcttcgttggacgaagaacattaacatttaacattttatgttgtcttgttattaattcatagtatttgagaacaagttcccaacacttacaaaaaaaaatagtattcgtaatacttaaatcatgaaatgtttcctacgcgcgcaacgcgcgcgctagacaccatttactagtttatacagccgacgaaggcatacttgcagcaggtcaggctacgacgcctccttgtccgtcgctgtcatccggagacctgagagcgcagcgcaacgacgccgctaagggcagaggagagatgggattcagctggtgtgtgggcggtgccttcctgccgcgcaggaccgccgaacagcgcgaatcggccaccgtcttgcattgcattgcagctggatggctggacttggacctcgagtactgttgtctgttggtggtggttggttggggcaccaactccgtacgtaccttcctttgctccacatgcatgcacagatgcagttttcatctcttctgatagatcgatcggtcgcccg

SEQ ID NO: 59601 - DNA, 311 bp, Zea mays
  Clone ID: MRT4577_154353C.1
atcagggatctgcagtccaacgtggagcacctgacggagaaaatgaagaccaccatccagagaggccttgtgctcagaaatgagagctgcagtgaaaactacaccaccgacttcatttaccagctgtattcagaagagggcaaaggcgtgtttgactgcaggaagaacgtgctgggtcacatgcagcagggtggggcaccctctccatttgatagaaactttggaaccaaaatctctgccagagctatggagtggatcactgcaaaactcaaggaggcccggggcagaggaaaaaaatttaccaccgatga

SEQ ID NO: 59602 - DNA, 404 bp, Zea mays
  Clone ID: MRT4577_154354C.1
ctcaagcattagcggcagcggtagcggcaggagctctgggcagggtgcgcacgtggcgtacctatctggctctgctagcttaccatgggtgattaccaccgggacgcgacgtgaggtgaaaaagaatacacgggacctccagcgcgaaggcaacaatgcacgtacaggctgaccagcagaagaagcagggcgccatgatgacggagctcaaggccgagacggccgtgaccttcggcgtgtcgatgctgttgctgtccggtctgatcctggccgaaaccgtgatcgcgctaacggtggccacccccgtgctggtgatcttaacaccgaggctggtgagcgaagttgcgcccgaagccttctggcggagggcacgtctgcctgggcgtcacgccaaaagacactcc

SEQ ID NO: 59603 - DNA, 385 bp, Zea mays
  Clone ID: MRT4577_154355C.1
tgtaattccagtggacaaagaaaatgaatgcagcagctccagctttttgttaccattgtggattttgatagcttaatgatttcgaggtgattttactgtctactattgtcaagtccaaagtatgtttcgtgattctgttgcctctattatcttcaggtattaacgcatggccaacctggtgaggaagtaagcttggagttgatcttaagggtagttgctgatgttggccttgtggtatgacgttttactaatccacacatctcgagttttagggagaaagaaattgttttcaccattttgttaaatgtttcatgttcatgtatcatataccagagtcaaccctgtttccttttaggatgcagatgtttgattatccaaattttga

SEQ ID NO: 59604 - DNA, 244 bp, Zea mays
  Clone ID: MRT4577_154356C.1
ggtgaagagtcgtagcggacggacggactgatgtcgatcgccgctcgaatcgcggagccggtacccggggatgagggttcagacggggacgtggacgcggcgggaggtgaccgccgccacacctgtgttcgctctacataccgccgcttcgggcacgccacccgcgccctcgaggtggtgaggacctgtcgcggggcacactcacgtgtaccgcggccgatctttacaccaatgctcccagctc

SEQ ID NO: 59605 - DNA, 831 bp, Zea mays
  unsure (1)..(831): unsure at all n locations
  Clone ID: MRT4577_154357C.1
cattgggtacctcgaggccggccggggagccgacccgacctcgtgcggtgtgtaggtcgagagagagagagggagaccctaccgggcgggagagagccaggaagaggagggcgacgatggcgtccggctggggcatcaacgggaacaagggccgctgctacgacttctggctggagttcagcgagtgcatgagccgctgccgccagccctccgactgcggcctcctccgcgaggactacctcgagtgcctccaccactccaaggaggtgacctatctacccccgcctgtccctcggcttcctccgcttcattcgattcgtcgcctccgactccgaaccctagcgtcagatccccaccaatcctccctcgtcttagctgtgcgtgttcggccgcctagatctgccgcgctcttgtcttccctcctttgccatgcgtgatttttaggtctcggtcgctgttgccatcgtcttggtcactgatagtatggaggaatagatgcggcgttttgccccgatctgttagcgggatttgatcacgaactgacgataatccattttggagaggtctacttcatgcccgttgtagcgactagggtacggcatttgtgatccatggaagtaatcgggccttcggattggtcaggaaaagtttgggtgatgttttatgctagaagctcgtgtcatttgataaactaaaattgtataanatttctgattagaagactctgcagtactatttagtacttgcttcgtttcaaaataagttctttctagcccatcttttttcgttcacattcgaataaacgaggatggatgtagacatacatacaac

SEQ ID NO: 59606 - DNA, 840 bp, Zea mays
  Clone ID: MRT4577_154358C.1
accctcgaggccggccgggagtattgtcagagggcaccaccagccaaggagggagggagagggacggacgaaggcggccgggagaaaaagagagccgacccgacctcctgcggcgtgtaggtggagagagagagagagagtgaccctaccgggcgggagagagccaggaagaggagggcgacgatggcgtccggctggggcatcaacgggaacaagggccgctgctacgacttctggctggagttcagcgagtgcatgagccgctgccgccagccctccgactgcggcctcctccgcgaggactacctcgagtgcctccaccactccaaggagttccagcgcaggaacaggatctacaaggaggagcaacgtcagatcagagctgctgctcgtaaggccaaggaggaagctgagggtgcccctgctgttgcagcacaccattagtctctctgtctattttttgtgttgttgttttctgttaactcatctttggttcagttatgatgctaagggcaaggcaataatctccagctgttggactacacagattttttcccccatgacttaaatatcaagactcattttgtgctaaaaaaaaaaaaaaaaaaactcgagactagttttttttttttttttctctcctggtgcagaagcaccattttttccttaagattaacttagaataaagcctgacgggggtaacagcatccatcgatccgcagtccatgctgtttgatgcatgggtctgctgaaaccgaggatgaacacagcactaacaactgacacagagcgaccttgcaatcaaaaacacagatgggcaacaacaaacacgacacgaac

SEQ ID NO: 59607 - DNA, 385 bp, Zea mays
  Clone ID: MRT4577_154359C.1
ataccttcactcgtgagatagacctcgcacactttatcgttcacaactcctcatacatacctatgggcggaattcaccaccatctggtgaatctccttactactattctgaactattctatattgactatcccaaccaccaagctcttacctacattcagctactaaccttatacccatctacattctaatctcctgctctttctcacctatgcaccacttgctttcataatcatgccctatctagactatgactctcatcactactcacctcaatatctaaatcactgtcttatcagtaactcatatcattaccgggcaatcatctaagaacatgatacttacgattggaaatcataacgtcaatgaaccgtaaatgttctcat

SEQ ID NO: 59608 - DNA, 271 bp, Zea mays
  Clone ID: MRT4577_15435C.1
cttggcggggagcctattcttgatggcatattgtatggcaaccgggtgaaaggaaattttttcgggggcatgcaaaaggatgccatggattgctatgcataggtgcttggagagggttccaaggtgagggtcggcgctgtgagctacaacatggtgctagatgcactaagaaggaatggaatgttggatgatacactcaaccagtatgatagaatgtgcatagagcattactcccccaggacaatcacatgtaacctcgtatagctataat

SEQ ID NO: 59609 - DNA, 338 bp, Zea mays
  Clone ID: MRT4577_154360C.1
tctcgatctataactagctctatgttgttttttgttcttgtcgaacttaaggcgtgtacttgatcgaaaggcgctgtcgtccatatgagagttcgatgccgctgtattggtgatcgaagagacggcgaggaaggtgcggtactataacgtgctcgtcgatgcaaagtgtaaagccggcgactttgtccgaacccgtgaggtgttcgatgaaatgatggaggtgggagtgttaccaaaaggtcatcacgtgtatctaccttttaagatgcatgataaagaaggcgaggctaactgaggcgtgctgcctagtttatgcaatataaagggtgaggcacagg

SEQ ID NO: 59610 - DNA, 521 bp, Zea mays
  Clone ID: MRT4577_154361C.1
gagcggagtggaagacggacgagaggaggaagaagaagacgcggcatcatggcggcggctcatgcggaagcggcgtcccccacccaccgcgcgtccatccaggcgacgtcgaccccgccgtaccccagcgcggcgcggatcgccgactcctcctgcttcccccagtacaccgcctccctcaagtgtctggagaccaaccaccaggacaagagcaagtgccagcagcagttcgacgactacaaggagtgcaagaagagagagagggaggctcggctggaaaggaaccggagccggacattgttcgggtgagcaattggaggagcactgtgcagtgaactggaagagttaatgctagtgaaaccatgactcgtttgatttcctgatgttaatttaagctgttaaagttagagaacagtagagcactctgggttcagagagatgcaaggacaatatgtcactagagagtttcttcaataaaatggtactcctggaaacgcctgaaaccgcgccaggccttttgt

SEQ ID NO: 59611 - DNA, 541 bp, Zea mays
  Clone ID: MRT4577_154362C.1
cgcctgcgtgtaccgggcccctattacaggcccgactccagcgttcggtaggctcggcgtggatatgcggttatactacttatcacaaatcggtggaagactgatgcgcactactgatgaatagagagatggccgtgtttggcccactggattttttgtcatcatggctgcacaaccaggcctggggagaaatccctctcttttgttcctctgtgggaaaacgctcctaagcacgacacaatagacattttataagcatgccctgaaccatgctcaattcattgctggcattctccttttgataccggcactctgaagcattagggtatgggtacaaacactgagcacatgttccatttaccatatctgctggccagccgctcattgagaaacaaaagccggtcttacagatagcctggtcaacatggatggacatatagctacatttactgaactcaataaatgacgcacaaagtgtgggtatgtgtgggtatcaaggatgctcatggtacactagaccgcctagagaatggcgctggtg

SEQ ID NO: 59612 - DNA, 637 bp, Zea mays
  Clone ID: MRT4577_154363C.1
tttgttttttttttttttttttttttttttttttttttttttttttttttttttttttttttttttttttttaggcataaaaagggcgataacctagaagggataatgggaagatacattgacatgagaacgaagcaagctaaggaagaagccacacaactagcaaaagggagggaggaaaaggaagtgagtcaagttgcagacttctcaatcaagaagtgcatatccattattggtacaatggaagttacaaaggaggaaaaagcgaaagcctataatgtcttcaaggaccttgacaacaggcaaattttcttgagtgcatgtgatgatgatgccgagcctgcactgatttggctgagaaacgagatggcttagctggtggagtcgtcccacctgaattgcttgctggatagccagtatgttatgttgttcaaatgaaaaattagctctctccctttggtttgttcttaatctaaatgcacacactctattgtaatgtaataagagacaaatgagtggccaacttctgattttgatgcttcaaatttcatccgcttcatagacctaatatgatggacactgatctttttatatgcatgcaacaaattaatgtatccatgtggtgtaaccaaacaat

SEQ ID NO: 59613 - DNA, 471 bp, Zea mays
  Clone ID: MRT4577_154364C.1
taaacagcggtcatagaaccgccgggcggcggacgcggctgcggcggccgagggcgggctgacgaggctgctcctcctgatgcagagcgggtgctcgccggcggcgagacagatggcgctggagctgctgaagatatacagggtgaacgccaagagctgtctcgccggctacgactccaagaccacccacatcatgccgttccgaggaaccgaagcggacgagagtggtttgccgcgatcctgggtggctgttttgacatgatgaaatggattcaattcagtgaatcaattaaatcgcatggaacaggggaatgtgttcttgttcctgtgatgtttattgatttccactcccccctcctcttttctttggatgtaagtcggtagagaaacaaacaagaattagttcacgaggtgagatgaagaataatctgtacagacatgatcagaacaggcatagtggacaatttaacc

SEQ ID NO: 59614 - DNA, 455 bp, Zea mays
  Clone ID: MRT4577_154365C.1
cactcaaagctcgagccttcattttctgtggttgtttttgctttattctcttggtaggggggagacgactactccatctattcttagcctatgagatggagagatccaaaggcaaaagcttcaggtagacatgtcaccctttcccaccctgtgttgcacaccttctgacgaatagctgagcccgtgccttgctggctcgtgacgagataacatgcgtacttgcgcaaatgcgatttattattcgtctttgacagggaatactgacactaatcccttaatcgagctttgcctcaccatagatctttgtttcctacttcgtcgctagttgaactgatgtagctaaccgataattgccatgtggtcttttcttctctcttcttgcacggctatgacaaattctagatctaaccggactaaccagaaaacataaaaaaaggaagaaagcatgagccact

SEQ ID NO: 59615 - DNA, 287 bp, Zea mays
  Clone ID: MRT4577_154366C.1
aaaacacatagcaaggataaattattgagcatgcagatcggataggcatgaaaaaagtaccggactgcaatagacttcattgtgggtttaccctaactaatatcttgccattcgtggctcatattctccagaagagatatggcatgatcaagcaaatgtaacaagtattcctttttggatggactctctgatgatgctcactttttcaaggttgaaaagtcatttctgctgttgattatctggcttttattttcactttctataacattgtgtttagaagacctttt

SEQ ID NO: 59616 - DNA, 1399 bp, Zea mays
  Clone ID: MRT4577_154367C.1
ggccggggccttgactctctatttatcccccgatctccaagaacaacggcactccgctcccccatttttttctcacctcccgtggcagcagccggccaacacccgcaccgcagtccacagcaagaaccaagccacagcgaagaaaagatccaatggtgatggcgccggcggcggcgcagcagcagcggcgccgcgacgcggaggcggagctgaacctgcccccgggcttccggttccacccgacggacgaggagctggtggcgcactacctctgcgcgcgcgccgcgggtcgccgccccccggtgtccatcatcgccgaggtcgacctctaccgcttcgacccctgggacctgcccgagcgcgccctcttcggccgccgcgagtggtacttcttcacgccgcgggaccgcaagtaccccaatggctcccgccccaaccgcgccgccgggtcggggtactggaaggccacgggagcggacaagcccgtggagcacggtggcaggacggtcggcgtcaagaaggcgctcgtgttctaccacggcaagccgccgcgcggggtcaagacggagtggatcatgcacgagtaccgcctcgccgacgccggcgcccgcgcccgcgccaggaagcccggcaccggcacgctcaggttggatgactgggtgctctgccggctgtacaacaagaagaacgagtgggagaagacgcagcagcagcaggagaagaagcagaatcagaagcaaatggagtcggaggcctcgctctcgcactcccactcagacacgcggacgccggagtcggagatcgacgacgacccgttcccggagctggcctcgctgccggcactcgacgacatgatgggcccagcagcagcagcgcctgccggcgccatcttgcccaaggaggaggtggaagacttgggcggcctcggcggcgacgactggctcgcgggcatcaacctcgacgacctgcagatcccgggcgaggccgacttttatggctccatgctcgtgtcgccgatggccgccaagatggagcaggacgccgccggcttcccgttcttctgagaccttctgcgcaacgcaaactgtgtatagttcagatttcttcaggattcggagaaaaaaacagttctgctgatatctggttgtagtggtttagtgcacaagcagcagtatgccggtcagttaagattgaagtccattgtagttcatcaccacttgagctgtgactgtgataagtgacagcattctttcatttctggtctgctaattcttcaatggtcagaatatagtttgtggccttcccagagtggtcacaccactgtggagccttgagatggagtaaattttttcttcaaggtttacggtttacctctttaaaatatcttagtactgtttct

SEQ ID NO: 59617 - DNA, 499 bp, Zea mays
  Clone ID: MRT4577_154368C.1
gggtacctcgaggccggccgggccgggattcttcgtattccttgcctaccattcctcgcctccatgatgctgcaatactcaaagcgtccatggatcagcaatcctggcgggctactgcggacagaacacagatgacctcgtcaaaaatgatgcctacatcggcccccctgccgaggtatccttgctgctgatgactcaattgtgcaccattgagcgagcatactttccacagatcaatggcgagtagaagccgaaatgcaaactgacgagctctccgagtactcctgctctgctgccctgtagccctccagcacataaagggcgctatactcttatatgacaccctctatcataaaagcaaagatggatggccttttgccgatgatgtcaaagattcacgcgcgctactgggcatcaagggcgagaaggacagcgttgaggctgatagaatatacgaggagaatactccacctttacaagactctttctgaaaaagtat

SEQ ID NO: 59618 - DNA, 597 bp, Zea mays
  Clone ID: MRT4577_154369C.1
ccggccgggaagctagccacaggcaagggcaaccaataatagcaagtgtgatcatccgttgatccatcttgctaataaccctgcgtgcccttcgttcttcctcgtctcgatcccgacgacgctcccttcggctccggcaaaccacatcaagtcgcgatggagatgaagaaggtcgcctgcgccgtcctcgccgccgccgcctccgccaccgtggtcctcgccgccgaggccccggcgcccgcccccaccagcgcctcctcggccgcgttcccggccgtcggcgccgtgctgggcgcctccgtgctctccttcttcgcctactacctgcagtaaaattaaaggaggatcggagggagaggctgctggctgccattgcctgtattcggttggatcccgtttatatatatatttatgtactttaagttgggtctgaacatgttgattgatccattcattttatttgctttgccatttctcccttttctgttaatttcgatatgtaaagaggggagaatgggagacactattcgtttggacatgacaattggaaattaatcaatacccattgttagtaaaaaaaaaaaaaaaaaagcggcc

SEQ ID NO: 59619 - DNA, 195 bp, Zea mays
  Clone ID: MRT4577_15436C.1
gccagcctttcctgtccctctccttcgattgctttcaaatctgcatcttcaacattcggtcacggatgtaatcgcttctgctagagacctacatctgatacagtacctataattaccggctgttctagactgtcccaacgatgatcaccgtatgcactacggattactgacccatgctcttgatctaccgctcaa

SEQ ID NO: 59620 - DNA, 126 bp, Zea mays
  Clone ID: MRT4577_154370C.1
gctcatgcccctttcacacacacattcacctttgccaagggctggagtgcgccaagttcggccctgttcctgacacccgggttcgggctccaagggtactgggaccccgtaccccgtttcgaccat

SEQ ID NO: 59621 - DNA, 536 bp, Zea mays
  Clone ID: MRT4577_154371C.1
tcccccctcgagtttttttttttttttttttttttttttttttttttttttttttttttttttttttttttttttttgacgggggttttttgaccctttttttttcttctttttgaaattgaggggtccatacccttataacacaggggctttgcttgggaaaaatcgggaaacccggttccttaaaaagagggtttccaaacccattatttttaatcaaaaaacgtaatgacccggttccttcctaaaaatcggaaaattgtaatcggggccaaagccatgacggggaaattttgggtagggctgctttgatccttttacaatcgaagcccatgattttcatccagttttcgatgtctccaatttccttaagggccgatttgatctccttgggggcccccacccactcataagtttgcctcctgtcccgggcgatcgtaccgagcagggcgcggccctaaagctcaatgccctttttgttaacaaaaagctcccgccccccgccgtaaaccgtgtccacaaggaaatggggaacc

SEQ ID NO: 59622 - DNA, 271 bp, Zea mays
  Clone ID: MRT4577_154372C.1
agcagggccgtcgcgtcctcgtgcccttccaaatcttctctgctgcgccgtatatatacccttccttcccgcccgctgctactcgcattctcgctgcgggcctcgcctctgtgtccggcgccgcctctccctcctcccacgccgcctcggtgttcgtttatgactctcgcggcggccaaggagtcgtcgccgccgtcgaccagcgtctcgccgacccagcagcagtcccggagtacgatagagcgatgcgacatgacggtcgcctcgtccg

SEQ ID NO: 59623 - DNA, 145 bp, Zea mays
  Clone ID: MRT4577_154373C.1
acttccgtagtaccggatcgcaaccatctggagcattcataggtctcattgtgagaggcaaagaatgataagaactaatactttatttcttgatacacagagacgggatgagattcctatatggctgccacccgcaacgcaaggt

SEQ ID NO: 59624 - DNA, 433 bp, Zea mays
  Clone ID: MRT4577_154374C.1
tatagggcgaattgtgtaccgggccccccctctacgcggccgctattttttttttttgtttattttttttcttttttttttctttatgaagaggggctcatttttttgccttattaaattacacaaagaaatatattttttacctgataaaaacaactacatttttatactattttaacacatagcattgcacaaaaataatggatttgaaaatggaccccaagatttaatgcaaaaaccaacccatacaagaaaagtttcaggcttttaacttaactgaatccattactaaacgtgcttgtttatattcctcagatcattacaaacctttttcatttcacagaatacgcataaaatccaaatttgcaagttacaacctgcgctggcaatctgggatcatgatactcgattcttgctggatctctcactgctt

SEQ ID NO: 59625 - DNA, 812 bp, Zea mays
  Clone ID: MRT4577_154375C.1
cggccgctcgaggccgcctggccgcttcagctactccctctgtctcgccgtcgagatgcttcggagcccagccgccgctctgctccgccgcctggcccctcgcctcaccggctgcagtgggggagccggctcatccacgcgtcagagcctccctccttacatatcctcctcctcctccttcctcgcgcgcttctcgtccacgccgacgtccccgccgccaccgtcctccgtcggtgcccgcgacgatgaggcggaggatgacaagctccagggatcatcaagcgattccggcgccaggctcagcatttctgtggaccgcgccggtctatacagccccccagagcactctcacgagccgtcgtcggactctgaccttgtcaagcaccttaagagcatcataaagttccggagtgggccgatcagcatagctgagtacatggaggaggtgcttacaaacccacagtctgggtactacatgaatcgcgatgtgtttggggagtctggggatttcatcacctcaccagaggtcagccagatgtttggagagctgattggtgtgtgggcgatgtgtctgtgggagcaaatggggaaaccagagaaggtgaatttgattgagcttggcccaggacgaggaactctcttggcagatttacttcgtggctcagcaaagtttgttaatttcactaaggcgctcaacattaacttggtagaatgtagccctacattgcaaaaggtgcagtacaatactctgaaatgtgaagatgaatctgttggggatgaaaaaaggacagttagcaagctttcttgagccc

SEQ ID NO: 59626 - DNA, 497 bp, Zea mays
  Clone ID: MRT4577_154377C.1
cccacgcgtccgcaaccacaagatactgctgctccatggaaggctcaagatctgggacgtcaagggaaagctggtggctaatgtggcgcgcgcagcaaatcgactctatgtcctagagctcgaggtcgcgcgcccgatttgcctctcggtgcggggcaacagtgcagcctggaggaggcatgctcgggttggccacctcaactttcgaggattgcggcgactacctgaggagaacttggtgcgagggctgccacagattgatcacattgatcaggtctgcgacagctgcctcgccgcgaagcaacgtcgacgcccgttcccgactaatgccaagtacagagcagcgcgcaagatcgagctcgttcacagggacctctgtggtccggagacgccagcgactccgaatggcagccggtatttcttcctgctagtagatgatttaagtcgctttatgcgggagacattgatgtcaacaaaggaccaagcgacgagggcct

SEQ ID NO: 59627 - DNA, 1318 bp, Zea mays
  unsure (1)..(1318): unsure at all n locations
  Clone ID: MRT4577_154378C.1
gagattggtatcatgtcgcagtgttgcttggataaaaatgttagaagtgcaggccctgcatattttgctaatcttgctattaagatcaatgccaagtttggaggaagaaacttagaatttgctaatcccaaagaaagcttaccgggtgttacaattgaaccaacaattatatttggtgctgatgtcacacaccctgccgctctagatgataccgccccttccattgcttccgttgttgcctcccaagactggcccaaggtggctaactataatgggattgtccgtgcacaaggtcatcgtaaagagctcatcaatggcctggaagacattgtcaaggaactcctacttgcattcgaggagaggtctaagcggagacccaagcagctgatcttctacagggatggcgtaagtgagggccaattcaaacaagtgctggaacaagaaatccctgagatagagaaggcatggaaagctctttacaatgagaagccaaagatcaccttcctagtggtgcagaagaggcaccacacaaggctcttcccaaacaacccaaatgatcgccaatgggcggacaagagtggaaatattctacctggcactgttggtgacaaggatatctgccacccaacagaatttgatttcttcctgcgcacccatgctgggatcaagggaactagccgtcctgcgcattcccatgtcctgagagacgacaacaacttcactgcagacgcgctgcagtctctcacatataacctatgcttcttgtattcaagctgcactcgctctgtgtcaatcgctcccccagcatactacgcccacaagttagcgttccgcgcccgcttctacgtcaaccaagactctgatgcggcgacaagtgtcggctcttatggttcatcagctccctctgctgctgctgctgctgctggtccgaagccgcttccggagatcaagggtgaactgagaaggctcatgttctactgctagtccttgaccacgggaaaccctttcctgaacaaggctttgctcttctgaagactgaacaaggctgctgcattatttattatgaacaagcctgaacaaggctgcattatactagcttaacgtttgtagtttgcattttatttcatataaacgatccaagtctttgccgaacttgattattatattcagttattcagcattcacgggacgctagagggaaaaatcgaaattttgaaacgctttggttaaaaaaaaaaaaaaaaaaaaatcngtccgttgttttgttttttttccccccggccnncgcncggttattttaaaaaaaaaaaaaaaagaa

SEQ ID NO: 59628 - DNA, 608 bp, Zea mays
  unsure (1)..(608): unsure at all n locations
  Clone ID: MRT4577_154379C.1
ccgggctggcctattaaccctgcccgctcctacacagtaactgccttgactggggaacatgtagtcaagttgcatgcggatctaacccttcagaggcagttgatcacaatggatccgtatacaccggctgctgcggcgggtgtgggaggtcgggaccatgcatgacagacgggtgaatgggcgcccttgcttgatgtaaggtgacaccatctcaatgttctgtctacgtatgccattggatactgtgcgtgcgtgagttgtgaatgcactgctgtgggtgacctgctgcccatgtggtgaaagaggaaaggtacgtgctatgattggaattcacccaagacctgaggtcgatatctgcagctgaaacatgcatttgattggttataggtacattcacaatagtgcttgagctgttgatcttagcattatacttggtgtcttccaggaagggatacactggttatgtggcctaactgccagggatgatcaataccattccaatgcggactacattcttgtatggcatgccttttacaatgtgtcatatgcatgattccactctggatgtagattgccgtggccatagcaaatgttggntgatcgacttg

SEQ ID NO: 59629 - DNA, 1469 bp, Zea mays
  Clone ID: MRT4577_15437C.1
cgccgccgtgtgatggattctgcagatttcccttgcgggtcgggccgaggtactgcctttatatctcttagtatatattgtaggaataattaaacgattccttacaacagtctggcacatttacgtcctcacaaataatgatccttgtagtcataaccgtagaatagatcctaatcgaaatgcatacatttggttcatacgctattggtatggtaagaagagatgtattttacagactagagaggggctatctaaatcctaaagtaaaggtccgcgattgaagtaccaaccgcccaccgccatgaactttctcctttgattcgataaggtggaattagcctccttctcgaatggctacccttgacaaagggtagcattggtatcataatctacatgtagcgggtatagtttagtggtaaaagtgtgattcgttctattaataactgaatttgaaatgatatacttaaggcatccttaagtttttttatattcatattccgatgaaaactttagttcttataaaggatttaatccttttcctctcaatagcatattgaggaagaatatacattctcccgattagtatccaaagactaattgaatttgcatctaaaatacaaattcgattatgagtacgtagtcgcgaagcataattttgcattggattaagtattccgataagtattccgattgaataaatatgagtaaaggatctatggatgaagatacaaaaaaggttatttccaatcgtaactaaatcttcttttgttttgtaggaaatggaagcccaatagctaaaaaacgatggttttggtttactagaaccatcagtatattatattgtttcagctcggtggaaacccaactcttttcctcaggatctcttgaatgaaattagggaacgaagtaagtagattagatagatatttaggagaatttctatctcctattctatagggatcatctagaaagcggagagctttggttccattcagacagaaaagctgacatagatgttaagtggtgagaatatccataaaggagccgaatgaaatcaaaatttcatgttcggttttgaattagagacgtcaaaaataatcaaccaacgtcgactataacccctagccttccaagctaacgatgcgggttcgattcccgctacccgctccattctgtataaaaagactattccatttgtttgtctagacatggtagagacttgtattccacctttttctttcgtccaccagttttcggccctacagagcggagtagagcagtttggtagctcacgaggctcataaccttgaggtcacgggttcgattcccgtctccgcacttagcagtccgtataaatggactattctatttgtatatatatgatagagggctatatccaaccctttttttttatttagcaggcagaaaaaaaaaaaaaaaaaaaaaaaaaaagtacctcgggaacaaca

SEQ ID NO: 59630 - DNA, 334 bp, Zea mays
  Clone ID: MRT4577_154380C.1
gctagggacctactagctcagcgccatgcacacgtgtttgtctactacgtatggacctcgaggcttgtgcggtggcattggcgtgcatgctgatggtatgggatcatgggagtttggagctgctgtggaacacccttccaaagaagctgacttgtggtgtcaatgccacctgataccttgaacagaaacgactctttcctaggctggcgtgtatccacaaatctgtcgtcacatacacatcacgtacgagaagtaccatggaaattgtgtatactacagttgtttcatcagagaggattttacgcaatgactgtcacgccggagactacattat

SEQ ID NO: 59631 - DNA, 2316 bp, Zea mays
  Clone ID: MRT4577_154381C.1
attgggtacctcgaggccggccgggacacctcgcctccgcatttcgatcagaagcagagcacagaggggagggtctgaggcgccgcacccgtcccgccggagacccaagcgagaaccgccgctcctcctccttccctcattgtgaaatcgcattttggcggcctctcacctccgcagcccgcaccatctctccgcggcgtctgctgcgctacttaaccgcctcgatctgctccccatttccccgtccagataaacgccagccgaaaccctagggtcccgcgcctccgcctccttcgtccccgccgctgaagaggccgacgatggcgggcaaggagaacgcagctcccgtgggggccctgggcgtggcggggccccggctcacgcgcgccgccgacgccgagtccaactccgcctcctactccccgccgctcgccacagccgacaccgctttctccgcgccgccgcgcgccgcggcgcccgccgacctccagctctccgggtcctacgcctccgacatctacacctacctccgctccctggaggtggatccgcagcggcggtccagatccgattacatcgaggcggtgcaggcggacgtcacggcccacatgcggagcatcctcgtcgactggctcgtcgccggccgggacccgcgcctccgcattaaagagcccagaggggagggtctgtggcgccgctcccgtcccgccggagacccaagcgagaaccgccactcctcctccttccctcattttgaaatcgatttcggcggcctctcacctccgcagcccgcaccatctctccgcggctgctgcgctacttaaccgcctcgatctgctccccatttccccgccgccgccgccgaggccgagcgctgcgcgtccttctccccgccgcgcgccgccgacgccgagtccaactccgcctcctactccccgccgcgcaccacagccgacaccgctttctccgcgccgccgcgcgcccccgacgtcgagtcaacattcgcctcctactcaccgctgctcgccacaaccgacaccattgtttccgagcccaagcgttgcatcgtgaccctgcagaacacgccagcctacaaagtttcttcccacaagtattgcaacgtcgccatacgtgacttgcagctcaacaggaaatttccatcattaacggcaattcgagacaagtacaagcaacccaagttcaaatgtgtgtcaacgcttcttccccctgttgtggtcgctgaggagtacaagctcgtcgcggacacgctctacctcaccatctcttatgtcgaccgcttcctctccgtcaacgcgctcgggcgtgacaagccgcagctccttggcgttgcctccatgctcattggcgcggaggtgtagcagatcatcccgccgtgcggttctttagtaatctcaatcgagtatcaaatcttgagcacaggcattctcttgttttttgaaatcgattctttgtatgatatcctagtcacatcccgcctgggcctgctgccctccgtggatagtttgttcataagatctgcccatgaagacaagaagggctccatcttgttaatggaattcttggggagctacctcgctgagctgagtctactaggattatggctgtctccgattcttgccatcagtagttgctgcttcagtcatgtttgttgctaggctgaccattgatccaaataccaatccgtggaacacaaagctgcagaagacgactggctacaaagtttctgaactcaaggattgcatcgtagccatacgtgacttgcagctcaacaggaaatgtccatcattaacggcaattcgagacaagtacaagcagcacaagttcaaatgcgtgtcattgatccttgtgcctgtcgtgatccctacttcatactttgaagacttagctgagtagctgctctcggactgtaccgctgtaaggctaacaatctgagctctccttgagctcttagggacaagcagaaaataaccgtttgatgagctttcctctcatttaagtagcgtggtgaaagctatttgtttgaggttctttaggattcgcgccgctgtgtcactcttagtgagaccaggcattctcttgctgtgaatcttgtatcatatcttagtcacaccttgccttggtccgttggcaacgaatgtaatgtttgatacgttagacccttccatctgatctatctatgatgcgtggatactttactcgtgttaaaaaaaaaaaaaaaattctagaacggccgcgggccctcgactagtgagctcgtcgacccgggaattaattccggaccggtacctgcaggcg

SEQ ID NO: 59632 - DNA, 129 bp, Zea mays
  Clone ID: MRT4577_154382C.1
aggaggaggatcggcagccaacaggggaggacgacaccaatcgtagtcgcactcccgccccccgaggcaattgttcgtgcaggtgcgggcaggccggttcttgattgcggagtggccctcctatgaaga

SEQ ID NO: 59633 - DNA, 121 bp, Zea mays
  unsure (1)..(121): unsure at all n locations
  Clone ID: MRT4577_154383C.1
aatttccattgattaacgggggcaaccttccgagtggcatctggataggtgggacggtcctcntngatngttnaaccaccanaaaacatacaagtttgagtagacaatgcttctaccctgg

SEQ ID NO: 59634 - DNA, 249 bp, Zea mays
  Clone ID: MRT4577_154384C.1
gcgtccgaggtagcgcatccgcacgcacaggtcctgctttatggcgcagtggagcagcgtggccgctagcgtggacctttagattgggcttgggccatgccgctgcggctcaccgccggcaccgttccgggcggcgatgccgcggcgcgggcgtgcgaggaggaacggctgcaaggtcgtcggctgcgcgtccgtcccgcaggagcaagccgagctgccgccgcttgccgtcgatggcaccgatgaaga

SEQ ID NO: 59635 - DNA, 437 bp, Zea mays
  Clone ID: MRT4577_154385C.1
ggacgaacttaattattatatgacaacggagggggtgtataaaaattaaaagatcgaaaactttggctttacaatgcgatcagcctcaagtggctgaaatgaacttgagcaattacatattgtacaacaacaaatttacatataatttggctactagtcttgtaaggtaaagaatatcctagcatgttgcgattagcaaacctcaactaggccttctacgagcagtgctttgacagatggactcaagagcatatgttagcatctctgtgcaaaactggtcgtctggtttcaaccatagagccttgtggtaataatttatggcagccttaaaattatccataagatggtaactataagcaagaccaggcaatgcactcaaacttttgttggaaaagtgagtgccttttcataacatgatactgctttctgatattcct

SEQ ID NO: 59636 - DNA, 195 bp, Zea mays
  Clone ID: MRT4577_154386C.1
ttttagtaaggacaaggggcaaaccccattttctgtttcttgtgggccagttaagtgatgcaaggaactccattttcaaatttcctgtgataaaccatttaacacagggccccgcccatcggtaatttcacaaatatgacacaagggcagctgcccaacgcactatgcttctatggaaactacagggattattct

SEQ ID NO: 59637 - DNA, 745 bp, Zea mays
  Clone ID: MRT4577_154387C.1
taccctcgaggctgccggggacttaagtaagcacctagtttattttccccatatgttgtttgaatttgtgtcttgtctgtgctgcctttgttttgaaagtttgtgagatctttgagacttctgttagaaacaactagaagccttttcttgaagttacataggagtgcaaaggactaatttattgtcatcatgtcgctgaacaccagaagacacaatgacacaattggtgttcccttttgatgtcaacattgtgattggtgttatggtgtttgatatggtctcctgggggcgccgcccatggtactagaagaggacctagcctgcttgcctgcgacacaagatgcataaagctgcctgcctccctctatagaccagccacccaataacctactaacaaatcttatcgaagcaaccaattaactcttatctggtaacaatcctgaaacaaactgccaaagtaatgacttgtggaccaaggtgattgcacggcacctgggccacctgggtggatgctgctgccccatgcccccatgtcctgcggccttcatgccagcagtgtcatatctgaaggacctgagtacatgcctacctgaacaatgattgattgttggtttgaccagttgacccaaagagtcacaatcacaaacatgggctagcttatgccattgcatcacatgcttagtgacaaaggatgagtagattgccttaatgtccacctttccccctttagcttggcagtgaactg

SEQ ID NO: 59638 - DNA, 207 bp, Zea mays
  Clone ID: MRT4577_154388C.1
actgctgcttgtttgttgcggactgtgctgtgtgcacggcagcggcagactacacaccactacaccgtccaaccaccccccaacccttcccctccctacccatcatcaatcatcatcatccatcaccactcgccaccgtcccagcccgccatggtctcgctcgctggctcccaaatcccctcgccttcgcgggggcagagcccctgc

SEQ ID NO: 59639 - DNA, 274 bp, Zea mays
  Clone ID: MRT4577_15438C.1
gttccagccaggcagcagaatgtacactggaatagtctgacacgatacatggggcacgactgatacataacgatgtatatgattacactgacactaggggtggtgaccattagttgtagcatgacaagacgtacaagatgacgagtggcttgatgcttgataacgttctgtgtagagaatctatcgaccattcagcagtggagaacacactggacgatgacgtaatggcaactcctgtaatacatctcaatcccgtgtgacactctgtacatat

SEQ ID NO: 59640 - DNA, 257 bp, Zea mays
  Clone ID: MRT4577_154390C.1
ctcacgcatccgtcgacgcttgcgattctgaaactgttcaccatcgagatgacggggctagtcaacatcatgatcaagccgcctctgagatggattctagagctgttgatgctgtggcctctagaatactcacggataacatcgatcctacgcctgcagagatcattgatcctaagactgcagaggataatgtagttatgatatcgaccaatgcttgcattaggccactgaccacaacatctgtattgacgcatctc

SEQ ID NO: 59641 - DNA, 391 bp, Zea mays
  Clone ID: MRT4577_154391C.1
cttagtattgcctttgatacgctgcaggtaattaaatcagggctgatcgaaatgtcactcattttgagtcctttccaatggccatttggcctggaatctttattttggttaatactagctgtctgttacacctgttgtatggatcttaaatatcgctacattctgaaacactatatgtggacctttttgtcattcacaattaattatctctaaagtaaatgcaaaacattcaacagatcatcaagtcatagagattcatattataagccctatgaatacaactgtgcatggttgatcacatcctacacatagcaacacaaataaaataacaatgctcattaaaatcccaaatggtggagcttgtcactcaaatattggatccctaagttta

SEQ ID NO: 59642 - DNA, 436 bp, Zea mays
  Clone ID: MRT4577_154392C.1
cgcgcataagacttgccccgtcgacctccacaccctatgcctggcgactcgtatgatgataagctccagggggagcccttccccgccgacccgaacaacgcctgtgacggtccctgatacaggatccctattgcttatagcgcgcataacctggacgaagtgattctcgctgcgaagatgatcgattggatgcacttcaccgacgggttctgcctcacgttccacgctactgcggctgttgctttctgcgttcttacccagactagggattcgctggacgggccacactccacgcgcatgcataccacaatatggaaagatctgtgtcagatcatgggtaagttggaaagcgacaactggtgcttccatcaaagctatatggccgccgatggcaagacacttgcagaaacgaagcataactcggatgagatagacc

SEQ ID NO: 59643 - DNA, 678 bp, Zea mays
  unsure (1)..(678): unsure at all n locations
  Clone ID: MRT4577_154393C.1
ggaattaattcaacgaaacaaacgggcctaagggttttttattttccaagggaaatcagttcattttcccttgggaaattgaaaatcttatgggaaaatagggtcgccaaactagcccttcttaatggtatttttacgggaccggggcttaaaggatgtacctagcatgcttggctggcttcttttgtgcattattcttatataatcgttctttcaagatgtagctcaaacatagttgcttatattcccttcgcccactagaagatgtttaaggcagcctaattagcattcatgcactgtattctgtcctaaatttcatccttgtatgagtagagtgagttggtagttctcaaagggctcttttgcccacgtgcttcctaggatatgaatatcacagtaataaaatggtatattttccttctttctgctgccatagcatgagttccaagttactaagggtgtatttggttgcgggacagccaggacaacgacgtccctggcgttctctctcgtccctccaattttgagggataactggggacaacactgagagagtcctgtctcaatcattgaccctgaaccaaacaaccttatttgagtgatcgtnccgtcttgtcattgcaaccaaacacatnctaatttgcatgtttttttccctctgcaggtgcttggtatggg

SEQ ID NO: 59644 - DNA, 363 bp, Zea mays
  unsure (1)..(363): unsure at all n locations
  Clone ID: MRT4577_154394C.1
gcgatcgtgctcctgtctctccgatgccccttttgaaacaggggaacactgactgccttgtggtgctgcccccgcttggcttcttaagatgacaagttctttggcttgagctgggcgcacaaagagcccatcttttgaagggacgatgtggacaaactccttcctggctgcatgtttagggcaccgagcttcttgttcctgttgtgtgggttatgaagtgcgcgacaaaatatatgtgtttggtttgttnaaaaaaaaaaaaaaaaaaaaaaaaaaaaaaaananaaaaaaaaaaaaaaatattactataatttaattgcgtaaaaaaataatattatatataataaaaaaaataaaaggggg

SEQ ID NO: 59645 - DNA, 417 bp, Zea mays
  unsure (1)..(417): unsure at all n locations
  Clone ID: MRT4577_154395C.1
ggggggggggnnnnaaaaaaaaaaaaannggggcgaggcaaccgcaggctaaaaattaccagtacaatatttcgtgcagaaataatacagcgccttttctcttctggggcccgcaaaagcttttgtttttacactggaanccnaacaggtggtttgcaggggggtttttttttcaanggaannngaacatnnaacccagggggggggggcggcgncaacnangcacgcgacgggccggcgaggcaaaccngaaccgcgccacgaccagcgaaaaaaaacngcgccancngaaaccgccccaacccccccgggggcgcaaggagancggggagagagaaanggaacaaacacagcccagcactaaggcgggaaccggcaaaacgcaancancaccaccacggggaggaccacaccagc

SEQ ID NO: 59646 - DNA, 286 bp, Zea mays
  Clone ID: MRT4577_154396C.1
gtccgccttcgcctcctctttctctcttttgcttttgtgttgctgtcattttctttgatagtgtgcatcggcaccagcaggagggggagtaattcatactagcgggcggtgtgatagcagcagtgtgatctaggagaggattgcggagttcatccacgaggacttcttgaacaagcgcaacgagtctgtgagggagcataggcgcctggaactgcatacgctgcacgtggagaggaacccccactcgttccgggaggcgctggcaagcccgggagtagcccgagga

SEQ ID NO: 59647 - DNA, 498 bp, Zea mays
  Clone ID: MRT4577_154397C.1
tcattcaaccaggcaccagcatagatctcgttctcgccactattattctgcacagcaacgcatcaagccttctagaaccatctcgccgccgccacaccacaacccgtcgaagcgaagcaagcaatggccggagtcggatcgaaggccctcgccgccttcctcttcgccgccgtccgccactgagccgatggggcatcgtgcctggctacctagcagtacttccgccgccgcctagatctatttattggagtgctatccagtagtagtaccagtagtagtgagatttcttcggtgctgtcgtgtcgtcgtcgcattttggtcggatctggtttccttggtgcagggagggtttctataccatgtcgcggtgtccgttgtgtgatctcatccccccttgtagatagtactctgctatctcgtcgtgatcgtgagtggtgattctgtctggttgctatttgctactgatattggtcccatttgagatacgcgttgctgctg

SEQ ID NO: 59648 - DNA, 631 bp, Zea mays
  unsure (1)..(631): unsure at all n locations
  Clone ID: MRT4577_154398C.1
naccccttccaccagcatagatctcgttctcgccactattattctgcacagcaacgcatcaagccttctagaaccatctcgccgccgccacaccacaacccgtcgaagcgaagcaagcaatggccggagtcggatcgaaggccctcgccgttgccgccgttctggcggccgtctccctctcggtggccgccgcggccgaggcgccggcgcccagcccagcccccgtcgcctccgccgccgccttcctcttcgccgccgtccgccactgagccgatggggcctcgtgcctgcaggctacctagcagtacttccgccgctgctgccgccgccgcctagatctatttattggagtgctatccagtagtactagtagtagtgagatttcttcggtgctgtcgtgtcgtcgtcgcattttggtcggatctggtttccttggtgcagggagggtttctataccatgtcgtggtgtcggttgtgtgatctcatcccccccttgtagatagtactctgctatctcgtcgtgatcgtgagtggtgattctgtctggttgctatttgctactgatattggtcccatttgagatacgcgttgctgctaatctcgtctttctctgcgcttgatttatcgttat

SEQ ID NO: 59649 - DNA, 476 bp, Zea mays
  unsure (1)..(476): unsure at all n locations
  Clone ID: MRT4577_154399C.1
accaggcaccagcatagatctcgtgctcgccactattattctgcacagcaacgcatcagccttctggaaccatctcgccgccgccacaccacaatccacaacccgtcgaagcgaagcaagcaatggccggagtcggatcgaaggccctcgccgtcgcggcgtcgtcgcccttcgccgcggctctcgtcgcctccgccgccgccttcctcttcgccgccgggcgccactgagccgatggggcctcgtgcctgcaggctacctagcagtacttcccccgccgccgccgccgcctagatctatttattggagtgctatccagtagtactagtagtagtgagatttcttcggtgctgtcgtgtcgtcgtcgcattttggtcggatctggtttccttggtgcagggagggtttctataccatgtcgcggngtcggttgtgtgatctcatcccccccttgtacatagcactttgctgtttcg

SEQ ID NO: 59650 - DNA, 201 bp, Zea mays
  Clone ID: MRT4577_15439C.1
agcccaagcatccgtctacaagtctggatcattaacagtggaatacagtaacacaactacagtagcaatgacggccatggtattttccaccattgtgctcgttggtcttgctgtatgtgttgcgtcggcgaccatttttcgtcaagactcagtgactcttatcactgccgttcttaccgcaaaccttgcagcagtgtccgg

SEQ ID NO: 59651 - DNA, 472 bp, Zea mays
  Clone ID: MRT4577_1543C.1
cctggttattttggtcggtttcttgtgggtttccttatttccggacggggggggcgccccgggaatgggggaccggagccggaggggggggggggggggcaaatggggggccgttaaaaagccggggcaaaaacaggggccggaggcgtaacgggggaaaaaggggggcccctaaaaagggcccaaaaaaaaacaaacggggaggaaaaaagggaaagcctggggggccaaaaaggggacccaccccacaataaagggattgggccaaccgccgggtaaagagggggaaaacctggggggccagggggtttaatgaatcccccaacccccggggaaaggcgttttgccctttggcccccggggggggttttattttcaccagggggacgggcaagatttgcccgcccttaaaaaaatggccctgagggggtggaaacggggggtcaccccggggggggcccaaggggggaaa

SEQ ID NO: 59652 - DNA, 141 bp, Zea mays
  Clone ID: MRT4577_154400C.1
attcggctcgagcagaaacagggctgaaggttttattttgtcgaccgcgctgtggcacctagtgtccattctcgtctcgtgctgagtaagaactctgctgatgctgagaccatgtatcatgccatgtaaccgaccgcggga

SEQ ID NO: 59653 - DNA, 797 bp, Zea mays
  Clone ID: MRT4577_154401C.1
gccggaaaaaaaaaaaaaaaaaaaaagaaaaaaaaaaaaaaaaaaaaaaaaaaggaatgaggaaacttcaactgaaagtgagggagaaggtcatgacattgcccaggaagcaaacacagcgtgatctccggagaatggagaaagctgaaagggctgctcaactagaaaggaatattgaaaatgaattgaaggaacgcctgaacaaaggtgtttatgccgacatctataatgttcccttcaaagcgtttgatgaggttcttgatatggaaagagatgaagtggttcttgaagaagaggaggaagaagaaggtgaggtatatgttgaaggcgatgacatggaagagatggatgacatggaagactttgaaggcctcagtgatggaggcacggatgaagatgatgttttggatgatcccgtatcaaagaaacccaagggatcctcttcttattcgaagcaaaatgtcgggaaaaggtctaggaaggttatgactgaggtggaagaagacgaggagataaatacgaggcaaaggcaaagggcgtgagtgcgaaatgtgcaactgcaacgacggttatatgatgttagatgccggcaggcagccacttctgctgtatgttggatcattttatacttgccttcgtactgtaacgcggagtgctgagatgtcaattaattttggccgtggtttacatggcctaatatgttatgagcaagaaaaagaccatctagttttcgaggcgaatttaggtatctatttttgtaagttacagattggtctagctttgttctttgttacaag

SEQ ID NO: 59654 - DNA, 512 bp, Zea mays
  Clone ID: MRT4577_154402C.1
aattcggcacgaggatagatctcgtgctcgccactattattctgcacagcaacgcatcaagccttctagaaccatctcgccgccgccacaccacaacccgtcgaagcgaagcaagcaatggccggagtcggatcgaaggccctcgccgttgccgccgttctggcggccgtctccctctcggtggccgccgcggccgaggcgcccgcgcccagccccgtctccgccgccgtccgccactgagccgatggggcctcgtgcctgcaggctacctagcagtacttcccccgccgccgccgccgccgcctagatctatttattggagtgctatccagtagtactagtagtagtgagatttgttcggtgctgtcgtgtcgtcgtcgcattttggtcggatctggtttccttggtgcagggagggtttctataccatgtcgcggtgtcggttgtgtgatctcatcccccccttgtagattgtactctggtatctcgtcgtgatcgtgaggggggattct

SEQ ID NO: 59655 - DNA, 420 bp, Zea mays
  Clone ID: MRT4577_154403C.1
tcaagcgtccgcacgtgcaggtacaagcttttttttttttttttttttttttttttttatgatatctttcatttttttctttttttttttttttttatatttttttttttcatttaattttttttttttttaatttaatcgcaacattttaccatcttacaatgttttcacaaaatttccaaatgttgtacctactttaaccaaatttttttaaacttttcatccttgtcaaaattttcagtttttttaacaaaacccatattttttttaacccattttttttttaaaaaaccacctatgaaaaatactttttttcaaaccaccatgtatctttagggcccaacaccctctagggaaatttttgtaataattaattaaacggcggtttcttgggttttttttttaaaaacccttttcccc

SEQ ID NO: 59656 - DNA, 1599 bp, Zea mays
  Clone ID: MRT4577_154404C.1
ctcgaggccggccggggaagcactgcccgcccgcgcgccgcattcccaaaccctactataccccgctcctctcctccccgtctgccggctcccttcttcttcgctgtcgacgacgcggactccccgccgcgctccctctctcaggcctcgcggggtgatcagaggcggctgggagactcgtgcgctccgacgagtccggttacggcgcggtaattaagcaggggaggagccggccctgagcggcggagtccaaaatgagtgacgacgtggtatggcactgcatccgccacaaccactgcagcttcatgtccaagatcacaacggggatcttctgtcgcaacccctacaacgcgacgggcatctgcaaccggagctcctgcccgcttgccaacagccgctatgccaccatccgggatcatgaaggtgttttctatctgtatatgaaaaccgctgaaagggctcatctgccaaacaaattatgggagagagtcaaactgccgaagaattatgagaaagcaatggaagtcataaacaaacatcttgaattttggcctaagctacttgtgcacaagatcaaacagcggctgacaaaaatgactcaatatcgtataagaatgaggaaacttcaactgaaagtgagggagaaggtcatgacaatgcccaggaagcaaacacagcgtgatctccggagaatggagaaagctgaaagggctgctcaactagaaaggaatattgaaaatgaattgaaggaacgcctgaacaaaggtgtttatgctgacatctataatgttcccttcaaagcgtttgatgaggttcttgatatggaaagagatgaagtggttcttgaagaagaggaggaagaagaaggtgaggtatatgttgaaggcgatgacatggaagagatggatgacatggaagactttgaaggcctcagtgatggaggcacggatgacgatgatgttttggatgatcccgtatcaaggaaatccaagggatcctcttcttattcgaagcaaaatgtcgggaaaaggtctaggaaggttatgactgaggtggaagaagacgaggagataaatacgaggcaaaggcaaagggcgtgagtgcgagatgtgcaactgcaacgacggttatatgatgtcagatgccggcaggcagccacttctgatgtatgttggatcattttatacttgccttcgtactgtaacgcggagtgctgagacgtcaattaattttggccgtggtttacatggcctaatatgttatgagcaagaaaaaagaaacgggtgataactcagttgaggatgtgggagaccatctagttttcgaggtgaatttaggcatctatttttgtaagttacagattggtctagctttgttctttgttacaaggaaaaccagagtcatgcgtttactaacacattctgagttgtcattgaggatttgggatatcctaagatcctaggtgagtagcctaaaccgtatatttcgttgactgtatcaaggtggcaacagtagctacaaaatcacatcccggtttcgtttctaatgaaaagcactttctcatatctttaaaactagttaatatggagggaaaagaaa

SEQ ID NO: 59657 - DNA, 1224 bp, Zea mays
  unsure (1)..(1224): unsure at all n locations
  Clone ID: MRT4577_154405C.1
nctcgggccgccggccgggaccaggcaccagcatagatctcgtgctcgccactattattctgcacagcaacgcatcagccttctagaaccatctcgccgccgccacaccaagcgaagcaagcaatggccggagtcggatcgaaggccctcgccgttgccgccgttctggcggccgtctccttctcggtggccgccgcggccgaggcgcccgcgcccagccccgtctccgccgccgtcgcggcgtcgtcgcccttcgccgcggccctcgtcgcctccgccgccgccttcctcttcgccgccgtccgccactgagccgatggggcctcgtgcgtggctacctagcagtacttccgccgccgccgcctagatctatttattggagtgctatccagtagtactagtagtagtgagatttcttcggtgctgtcgtgtcgtcgtcgcattttggtcggatctggtttccttggtgcagggagggtttctataccatgtcgcggtgtcagttgtgtgatctcatccccccttgtagatagtactctgctatctcgtcgtgatcgtgagtggtgattctgtctggttgctatttgctactgatattggtcccatttgagacatacaaagaaaaaaaaaacggcattcaatacgcttgatttatcgttatacatcgctcggtgcgaatttcgcgtcgctgtccgtgacgcgttagatttgattctaccagggatccgcgtcgcgttgcatcgacgcaggtccgttcttctgtggttgtgtgtggccaggatttaaaaaaatgaaataaatcattgaccatctgaaaaaaaaaaaaaaaaaaaaaaaaaaaaaaaaaaaaaaaaaaaaaccagggatggcctcttgcagcgcgaaactgtccgtggtctatttgatgggagcctatttgagcgactggaagacgacaccccacggaagaaatcgtcctgaatgctgagcagccttgtacagctcagggaagcgctgtcagtacaaaactaccagatataccattggtcgtgttcaaataacaaatgcttcggctttgttcatccgtcattaactatgagtgctgggatttgtttgtatgtgtgtcgtgctaccagtttcttctcctgtcgtctcacacaggtactgtattacgcatgtgttttctagtgtccgtgcggaagctgtattataagctgaaatatgtgcgtttgaaatttactagtt

SEQ ID NO: 59658 - DNA, 199 bp, Zea mays
  unsure (1)..(199): unsure at all n locations
  Clone ID: MRT4577_154406C.1
nagctgctaggcatctccagctcctctgggcccgggtgtatttgtccctaaatccagggcaccggggccttagtttagacaatgctaccattgcgacatacgcttactggcgaggactatcatcactcgaggaaacggcccagttcttgaatgggtgcaatatattctacaaataacaaaaacaacctggggggggggg

SEQ ID NO: 59659 - DNA, 669 bp, Zea mays
  Clone ID: MRT4577_154407C.1
cattgggtacctcgacccacgccggccggcaccaggcaccagcatagatctcgttctcgccactattattctgcacagcaacgcatcaagccttctagaaccatctcgccgccgccacaccacaacccgtcgaagcgaagcaagcaatggccggagtcggatcgaaggccctcgccgttgccgccgttctggcggccgtctccctctcggtggccgccgcggccgaggcgccggcgcccagccccgtctccgccgccgtcgcggcgtcgtcgcccttcgccgcggccctcgtcgcctccgccgccgccttcctcttcgccgccgtccgccactgagccgatggggcctcgtgcctgcaggctacctagcagtacttccgccgctgctgccgccgccgcctagatctatttattggagtgctatccagtagtactagtagtagtgagatttcttcggtgctgtcgtgtcgtcgtcgcattttggtcggatctggtttccttggtgcagggagggtttctataccatgtcgtggtgtcggttgtgtgatctcatcccccccttgtagatagtactctgctatctcgtcgtgatcgtgagtggtgaatgtctggttgctatttgctactgatattggtcccatttgagataaaagatgctgaaaaagcggcc

SEQ ID NO: 59660 - DNA, 627 bp, Zea mays
  Clone ID: MRT4577_154408C.1
attttacaagtttttcttccgccgccgcctcaaccctcgccccgcgctggtggactctctcacctcctgcgacgatgtctaccagatcctcccatggcccccttcgatcaaaccatcaaaaccaatgcgaagagatgaaggatccgaaaatcttgttctgcatctctgtcgcttagagagaagatcgactcacccgcgccgccaaagcactgtagaatttgattcgccggactgcggaattctcacaggaaagcgacgctgcgaggtccatctgttatccgagcgttgtgaaaagatcgcatgctctgtaacatcgcgctgtagagaaacaatgcaaatgcatgtgagatggcttgagtgcctacgtacactagctgctgaagagaaacttcttagacactggatgatttgcagttgagatccaacagcactttgctcttgaactccccaatgattcatctactgatatctacggctggacttctacaccacccttgattatgctgggaaccgagacgaccgttctcgcaagcgttatgcatcgtgtgtgagatccatgcataggccacctgagaatgcgacgtggattgtactcgctgaatgacaacgatgtgatcctctgatggg

SEQ ID NO: 59661 - DNA, 722 bp, Zea mays
  Clone ID: MRT4577_154409C.1
ctctggccgggtaaaaaaaaaaaaaaaaaaaaaaaaaaaaaaaaaaaagaccggccgggaccaggcaccagcatagatctcgtgctcgccactattattctgcacagcaacgcatcaagccttctagaaccatctcgccgccgccacaccacaacccgtcgaagcgaagcaagcaagcaatggccggagtcggatcgaaggccctcgccgttgccgccgttctggctgccgtctccctctcggtggccgccgcggccgaggcgcccgcgcccagccccgtctccgccgccgtcgccgcgtcgtcgcccttcgccgcggccctcgtcgcctccgcctccgccgccgccttcctcttcgccgccgtccgccactgagccgatggggcctcgtgcgtggctacctagcagtacttcccccgccgccgccgccgccgcctagatctatttattggagtgctatccagtagtactagtagtagtgagatttcttcggtgctgtcgtgtcgtcgtcgcattttggtcggatctggtttccttggtgcagggagggtttctataccatgtcgcggtgtcggttgtgtgtatctcatccccccctccacccccccccaccccttgtagatagtactctgctatctcgtcgtgatcgtgagtggtgattctgtctggttgctatttgctactgatattggtcccatttgaaaaaaaaaaaaaaaagcggcc

SEQ ID NO: 59662 - DNA, 499 bp, Zea mays
  unsure (1)..(499): unsure at all n locations
  Clone ID: MRT4577_15440C.1
tttattcttgggacacgtacctctagtcggcggccgccctnnnnngtggttttttttgaagagggaccgtggtttcacccaacaaggagactatacatngacttttgcctgttataaaacagagaaccatcatgcctaggcgcttaatatagtaacctcgccccagattatagcccaaaatttacataagtaccatacaaaagaatgtagctgagaccactaccacaggcaaacgtacatgcgattaatggcaacaggaaaaagagctgagaggacttctaaaggaacacccaaaccaaggcaatgccttgattgagagtggtgcgagaccgacaacaagagggacacggcagtaggagacgtcgcaacacacccccacgatgcgcgagaggagcacttattggggccagtagggaagcctcttgccagcaagcacagaggggtgcaggcatccgatcaacagntgtgttcatcgactctgaatgagctacagctaccg

SEQ ID NO: 59663 - DNA, 314 bp, Zea mays
  Clone ID: MRT4577_154410C.1
agaataatatataaggaaaaaaaaaaaaaaaaaaaaaaaaaaagaaaaaaaaaaaaaaataaatacaaaaaaaaaaaataatttatgataaaaaaaaaattacataagttcactctactatgtgaatcacacactgacgccttctgaaaattcccgtcatgtttgtagttcatatcagtgacatcccaatgctggcacacatcatactacttcctgtactactattcttatcgtcattgcactcaattgttactcagatacatgattaacgctccatccattatctatagctgatccacgatttctgcaaactt

SEQ ID NO: 59664 - DNA, 608 bp, Zea mays
  Clone ID: MRT4577_154411C.1
accaccggcaccagcatagatctcgttctcgccactattattctgcacagcaacgcatcaagccttctagaaccatctcgccgccgccacaccacaacccgtcgaagcgaagcaagcaatggccggagtcggatcgaaggccctcgccgttgccgccgttctggcggccgtctccctctcggtggccgccgcggccgaggcgccggcgcccagccccgtctccgccgccgtcgcggcgtcgtcgcccttcgccgcggccctcgtcgcctccgccgccgccttcctcttcgccgccgtccgccactgagccgatggggcatcgtgcctggctacctagcagtacttccgccgccgcctagatctatttattggagtgctatccagtagtagtaccagtagtagtgagatttcttcggtgctgtcgtgtcgtcgtcgcattttggtcggatctggtttccttggtgcagggagggtttctataccatgtcgcggtgtccgttgtgtgatctcatccccccttgtagatagtactctgctatctcgtcgtgatcgtgagtggtgattctgtctggttgctatttgctactgatattggtcccatttgagat

SEQ ID NO: 59665 - DNA, 938 bp, Zea mays
  Clone ID: MRT4577_154412C.1
ttctttttttttttcgcagtacatgcttgggattataccattatcccttgcttccctaaagaacatcattgcctgctcaggcttcctaacttcacataggccagatataaatacattatataacctggcgcaaggtgttttcttccgacgaacgaggttaaaaaaattaagtgcacccccaagatttttgctccttacataactaatgagaagaagcacgttgcttgttattgatggttcaatccctgaagcctccattcggtcatatatcgccttggccatgtctgccctcttagcatgaccagcaccagaaatgaagtggttgtagcacacaacgggatggatcttactccgccgccacaccacaatccacaacccgtcgaagcgaagcaagcaatggccggagtcggatcgaaggccctcgccgttgccgccgttctggcggccgtctccttctcggtggccgccgcggccgaggcgcccgcgcccagccccgtctccgccgccgtcgcggcgtcgtcgcccttcgccgcggctctcgtcgcctccgccgccgccttcctcttcgccgccgtccgccactgagccgatggggcctcgtgcctgcaggctacctagcagtacttcccccgccgccgccgccgccgcctagatctatttattggagtgctatccagtagtactagtagtagtgagatttgttcggtgctgtcgtgtcgtcgtcgcattttggtcggatctggtttccttggtgcagggagggtttctataccatgtcgcggtgtcggttgtgtgatctcatcccccccttgtagatagtactctgctatctcgtcgtgatcgtgagtggtgattctgtctggttgatatttgctactgatattggtcccatttgagaaaaaaaaaaaaaaaaaagccgtcgcgatctaggccggctt

SEQ ID NO: 59666 - DNA, 678 bp, Zea mays
  Clone ID: MRT4577_154413C.1
gtcagatacgcgttctcgtagtaatccggagaggcggcacgggacaccttcgatcagagaatggaagccgaacagggcgccgtgaaatggatctgctgaagcgggaactggagaagaagcagaaggcggcgaccgccgactgaggaggcccgagctacgtgcggcgctcggagcaggagcagacacaactccagaagcgccgagacgagcaccgcaagctgctcgccgaggccgacgcgtcggcgccctacgcgagagccgccgcagctgctaccggttccgaccccagcagcctcgactgccgatgccaaacggcggaggagaaccctaaccctagcgcctacgccgtcgtaaccgccctggcgccctacgtgccgcccgcgctcacgccgaagaagaccgcgcaggaggaggcgctgctctacgaggagcgacccatggacagagccgaccatgaagggtacgaggcgaggcggcgccttcgtgcgctgcgcgagcccgacacgctgacaggagaggacaacgacgcccgcctcgcgcgctaaaagctgcggcgcaaactcggggtccacgagaaaattgaccacatcgacacgaccgtaggacagaccaacgaggttctccgcgacatgatggagacgcgcatgcggcacaagatgcggagggacacctacgcca

SEQ ID NO: 59667 - DNA, 582 bp, Zea mays
  Clone ID: MRT4577_154414C.1
atggctagaattcgttcgactgacagattgaccaccgggggtgaaattgcagatgtagctgatacaactcctatttcagaagtgatgagagagtcaggtattgttgagccgaatgatagagaaggagcagacgtcgttgagaagagcgattcagaagctttggctgataacaatgaatacgatcctagcattattcatccaaataaacctagtcaaaatgagtttggtaaatctactataaaggccaaagacttagatgtgctaaaaagacttgggtattttgggcaaaaggacgataccatgattagatttgctggtgatgagatcatcccagagccgaagagtgatgttgttgttgtgtttagaagcttcttccggactgggcttcgtttctcgatgtatgaaatgattcttggaattcttgagagaaaagatgcgaaagctccattgttaggatatcgcacaaagtggccaactggctggactagtgagtggttttacatgaaggctgatattaagggcaaggataaatttaaaaagattgtgatgagcccaatgagcttaaactttgacttgacatga

SEQ ID NO: 59668 - DNA, 322 bp, Zea mays
  Clone ID: MRT4577_154415C.1
aacgtccggaacgcagccccaagttcgatccctacaagggcgcgctcaccatccttgaaaccctaacctgtcgaacctcgaggtaaacccaacgcacccacagtaatgacgggcgagcagcacaccaccgggcaaagcgtcgttcacatttaatcctacagccggcgctcttgctacaataagcaacgaggctttacccgctggggtgtcgcacacccaccattcctgaacgtacgctggtgacacccctagctgagacctgctagtgtcaccctgctcgagaccgcgcccttatacggattcaacccataccttcccgcgg

SEQ ID NO: 59669 - DNA, 379 bp, Zea mays
  Clone ID: MRT4577_154416C.1
accacctagacctacgcatgccgggtcttgccaatcctcctgcattccgaccgagcgagcaaggagagacacgagggcgactgaggccgtcgcatactccttctgtgcgatccgtacgtagcctgctacctagcaatagcaacccgatcagccaatcattgccgtgttcaccaactccgtttccctattacctagatagaccaggccagatgctgtctgcctcaacggatcgacacgacttgagggatggaggactgagaccgtcgattagagtctgagacagaagccgatgcaacaccggagcgactagctgtatgagatgtacatcatcattgacacggatccctgcatcgatgacagcgtggacatcctgatggca

SEQ ID NO: 59670 - DNA, 341 bp, Zea mays
  Clone ID: MRT4577_154417C.1
gaaaaaagggccgacccacgcgtcccgcgggcattagctgcggtgaggtggcgtcggccataacgccctgcattttctacgcgcgcggccagggctcaagggccgacgggccctgctacaacgtggacaggatcctcaacaacacacgccgcaccaccgccgaccgtcgcgccgcctgcaactgcctcaagaactccgtcgccggcgtcagcggcctcaacgccggtaacgccggcatcatctactccaagtgcggcgttagcatacactacaccattagcatcttctccgactgctacacggtgaacttgacccttaacgactactactgctcccgccgg

SEQ ID NO: 59671 - DNA, 115 bp, Zea mays
  Clone ID: MRT4577_154418C.1
ccgcctcccaccgttttccctgtgcgcccccgaggtaggaaactggatgcaggtgggcgacgacctgaaccacccaaactagatggccatggcgaagcgggtcggcgacattatc

SEQ ID NO: 59672 - DNA, 438 bp, Zea mays
  Clone ID: MRT4577_154419C.1
atgggggtaatgatgttttctttcttacagcttaagggtgaactaagtaggacgttggaagaggtatctggctgttctttgcctctctgctggaaagggaaggaaccattcaaatctatgcttgatgtgaaaaaggagttcaaatctttggtgccgaactttgccagtggcaagaagacccttatggagatccctactgagaactacctcattgtaacacatggggaagaaacaaatcctcagaagaagaaaaatacacactaccgaatgaacaggctgagtgcatactgctattgcaggtacaacaatagttctaaggatgagaaaacaaacagttcaggcaagggacgcaacagaaccctggaagctaacttgtacaccttccacttgcatttgctgaatcagctcggtgaaaacacctgctcaagtaaaacataa

SEQ ID NO: 59673 - DNA, 221 bp, Zea mays
  Clone ID: MRT4577_15441C.1
atactcataaaccatctcaagtttcctgtttataccaccaaggaccatctaaccaaaagagcgtcatggaccctttataatgagggggtcaccatcataattgaagtacaccttcaacatatcaaccgtctcatcattgataccctgaagtagattatgatctacaatatcatacgtcacaagcttttactcctaattcatgtcagagcacaaaaaacaac

SEQ ID NO: 59674 - DNA, 290 bp, Zea mays
  Clone ID: MRT4577_154420C.1
accccgggggctgataaatactactacaagaaacaggaattatcttttgaactataaagattaccgggggaactctgaacgacccaattacgctaatttcagttcctgcactttcgtcgggggaagagcactgaactcctccacagacttttacattttcacattggggcagggggctgcggtgcatgcgtggtcctcgtctccaagtccgacccagcaacggacgacgtgaccgagttctttgccagctcctgcctggcgcttgtgcccagggtgggccggtggttggg

SEQ ID NO: 59675 - DNA, 230 bp, Zea mays
  Clone ID: MRT4577_154421C.1
aggacgcgtgggcggacacatgggtcagacgctgccaatggaggcccatatggcactggggagacagacagtactaatgctgctcatgctgcatgtgcatctaggaacgacaatacttgaactgagactgctctcatacccgacggcgacttactgcgtagggatcttaacttgacaggcgattgcaaggaccacgtgaccatacaactgtactgtgacttggtcttaaa

SEQ ID NO: 59676 - DNA, 793 bp, Zea mays
  Clone ID: MRT4577_154422C.1
ttgggaccctcgaggccggccggggtcccttttggcatttcacaaacgcagaagaggacgctctctccgcctcccccgctcctcaccgccgcgccgcctcgtccactgcctccgccgcatcaattgacccccggaccacgcgaatggccgctgaagactcaaaagatatcctaaagaagcgtctcccaaagaaaatcagagaagtccctgactgctattttctccctcgtcggtcatggccttctgcactggcaatctacggtgctgtatgtgctgctagctttggtgcagggatgcttcttgaggtttggataaacaaaaagatcaaagaggacagtggcattatctgggagatggataaatgatgcaatgcatgctttgttgtggtgaatcccgcgttgtcatcatggacacagctagctctgaagatttctggtggaaattgacacaaccttgtttctgtatctggatctattatgcatgatggcagaatgatgtcacaaacctttgagcctcattagtcgaataaactcaaattatccaaacagtataagaaactgttgttccggtgggcactgtcgcctatgcactggtaagcatcagtttgaacatttcttgtttctgatggtttcagtggcatggtgtggtcaaatttggtggacaatgacattttctgttgcgtcgatgacttttgaggggcagcggtacatcaaattgccgtgcattcacctgtaaagtatgcagaaactttatttattatgttggcaaacacaggggtaatgtgctgtctctg

SEQ ID NO: 59677 - DNA, 323 bp, Zea mays
  Clone ID: MRT4577_154423C.1
tttttcttttattttttttttgtgcttcgattggtcatgttgatctcgagagcaagatgccatggccaaccatgaggtactcgtttcacggagatggtatatgatataggtgatcggagtgatattttacatggtgcatatagtaacttgtcgaactgagaatgttttacctgtgatgtacatcggacttggaagctttgtatcattgatacaccttttcaatggtggcgaataaatttacagcagatgttttcaataacctttttaaaaaaaaaaaactgccttaaggactaaagttaccatagaacaaatttaattaaaac

SEQ ID NO: 59678 - DNA, 414 bp, Zea mays
  Clone ID: MRT4577_154424C.1
atggagccaatcgtcgtgggagctcagacggatttcagtgtaaaatgtaaaccaaaacaacaaccgccgcctcgcatctgggatgtgccaccacttccaccgccgtcgtcgttgctcacgtgcccccgagatccaccgtcgcgctgccgcaaccgctcccacctcaccatcgtgcgcaactcaaggggtcgctgtcgcatgcacctcagggagacgttgtcacgctcgtgccccctggatccaccaccagggccgctgccacctcgccgtcgtgcgcacctcatgggccaccgccgcgtgcgtgccctcggtatccgatgccacaaccgcccccacctcgccgttgtgcgcgcctcagggggccatcgccgcgcgctggcctcatggatccgccgccgcgagcgtgacccctag

SEQ ID NO: 59679 - DNA, 1133 bp, Zea mays
  unsure (1)..(1133): unsure at all n locations
  Clone ID: MRT4577_154425C.1
cggcgatccgtgcatgcatgtgctcggagaaactgtaatggcttagtgctctgctccagtttactgtatctaccttccattatcatataataatatcatcaaaaaaaaaaaaaaaaaaaaaaaaaaaaaaaaaaaaaaaaaaaaaaaaaaaaaaaaaaaaaaaaaaaaaaaaaaaaaaaaaaaaaaaaaaaaaaaaaaaaaaaaaaaaaaaaaaaaaaaaaaaaaaaaaaaaaaaaaaaaaaanntttttccctccccgggggcccccttaaaaagggaaattttttaaaaattcaaaaaaactgggggccggccgggccgggatctcatcttcttcctccatccgcactactgagagcgacaaagctagctctctccagggatcggattcggatcaccatgccgtccaccgtgaactccgcgtccctcgaccagaaccttgagctcgccaagcaatgctcgcgagaggccgccctcgcagggttcaaggcagcagctgtcgcgaccgtcgcctctgcagttcccaccctggttagcgtcaggatgctgccatgggccaaggccaacatcaaccccgctggccaggccctcatcgtctccacagttgctggcatggcgtacttcatcgcggcggacaagaagatcctctcgctggcgaggcagcactcgtacgagaacgcgccggagcacctcaaggacacctccttccagggcaccggccgtccgcacccagggttcttcaggccttgagcgagagaccatcaaactaccgccctagctagctggacgcactagttcgtcagcggccgccgattcatgtcgtccaagatcatatcaactactgctagcatatatatagtgtactagctagtagtaggcaccggcgatccgtgcatgcatgtgctcggagaaactgtaatggcttagtgctctgctccagtttactgtatctaccttccattatcatataataatatcatcctcctgtttaagcaaaaaaaaaaaaaaaaaaggcccctaggccgtccgcacccagggttcttcaggccttgagcgagagaccatcaaactaccgccctagctagctggacgcactagttcgtcagcggccgctctagaggaaccaagcttan

SEQ ID NO: 59680 - DNA, 502 bp, Zea mays
  Clone ID: MRT4577_154426C.1
acagctgtgatatgaaccaaaatccattgtcacaagtgaaatatgtagcaattgtgcttgaagctgaggaattttgtaaccttataagcaatggatcgttctttgatcatgtccaaagagtttgtgatggatacccaggattcaccatttgctacatcattaataaattgatgaactacatcaacaaatgtgagcaaagtcaatacaagaacccttcaaatacttggagacgtccgccagtggaagaggaaaccactgacatggttatctgtgcaagctaacggtgcagttatcccgaaaggttttgttcataaggacctggcgaagaaagacacctggttaaaagctttaatagcgatccctgacatccagccaagatatgcttttgcaatctggaagaagtatccctgcatgagatcccttctaaatgaatatatggatggcagtaaaaccgttgccgagaaggaacttctgcttagcgacttgaagtgggaagatcgac

SEQ ID NO: 59681 - DNA, 644 bp, Zea mays
  Clone ID: MRT4577_154427C.1
ggccgcttttttttttttttttttacttttttttttttttttttttttttttttttttttttttttttttttgttgggtcattttttttccaccgggggggattcccaccaatcagacacatataatgcttaaaatgaacatccttacataagagggccacaccatgttacaccttatatacgtaggccaactacttccttcatcgaaagaaaccagaccgattacccattaaaattcctacaacttgcaaataacccacacttatttctttgattgatcaaaaataaactcttggtaggtttaataattcaaacagtatttgatttaagggccacaccccaagcctttttagaactattctccaaaccccgagctacttgaacaccttgctcaggggccctacctacttcctagatgaagtgactagctaacaagagatcctggtgaagatcattcccccttaatgccggaacatgctgtttatgaaaccttttattgacaaaattttgcacgttcagatccaaattgacaaggtttacaacttctaatttcacatctttttcaaacacagaaaaagctttctaaagggaataaaacctcattttaggcggaagaaaaaattggaactacacgatccattcaa

SEQ ID NO: 59682 - DNA, 611 bp, Zea mays
  Clone ID: MRT4577_154428C.1
ttcttcatccgcactactgagagcgacaaagctagctctctccagggatcggattcggatcaccatgccgtccaccgtgaactccgcgtccctcgaccagaaccttgagctcgccaagcaatgctcgcgagaggccgccctcgcagggttcaaggcagcagctgtcgcgaccgtcgcctctgcagttcccaccctggttagcgtcaggatgctgccatgggccaaggccaacatcaaccccgctggccaggccctcatcgtctccacaggtcgatctctgaatctctccctgatccctctacgacgacctagctagctattactaccaagatgccttcacatgtctttctgtgtgtaactaatggcggaatgcctgctttaatttgctccacgaaaactgggtcgtcgtgcagttgctggcatggcgtacttcatcgcggcggacaagaagatcctctcgctggcgaggcagcactcgtacgagaacgcgccggagcacctcaaggacacctccttccagggcaccggccgtccgcacccagggttcttcaggccttgagcgagagaccatcaaactaccgccctagctagctggaaaaactagttcgtca

SEQ ID NO: 59683 - DNA, 225 bp, Zea mays
  Clone ID: MRT4577_154429C.1
acggaccgcccagttctaccgcgacggcgctcagaacacggtcttgatcaaggtcgtcggcaacatctctgcggacgactatatgctcctcacgaccatctcggcggtctctgtcaccgttggctacctctctgggatcaagccgtggatcaggggcccgtcgatgtgtcacgggcggcctcatcgatgtcatgggagggttcatgtacgcctagcataactccg

SEQ ID NO: 59684 - DNA, 319 bp, Zea mays
  Clone ID: MRT4577_15442C.1
aaaagttgggcattgcaagcaaagtggttatggctagaaaaaaccaatccaaatagacattggcagggtcgaaaattacctgtgcatcgacatgttaatgatttgattgcaaattctatgatatctatcattgggaatggggacaacactctcttctggattgataattggtcaaatgggaatgaagtcagggaccttaccctagatgtggtagccaaggtgggcaaatgatcccaatctactagaactgtgacacatgctcttgataattattagtgggtcaatgatatcaggactcctctttctcttatgggtttac

SEQ ID NO: 59685 - DNA, 361 bp, Zea mays
  Clone ID: MRT4577_154430C.1
caccttcgccttcatcggggtggggtaagttgattaaaaccccggtgcgccggccagcggaccaccccaacccatacccttttttcttcgtcacaacaaggaaacacccaacgcgacgccactggagccgcaggcacagggcgcgcacggcacgcgtatacgaggcacgcacacaccaaaccaaataacacataccaggcgggttacaccatcggttgggcggtccgtccgggggtagtgcacggggaagcaccggttacaggggctgcatgagggggcgcgcgggcttttttttggggaggcctacaagcggggcgggttcaacgagcgggcgccaaagcgagccgtctggcttcatgtg

SEQ ID NO: 59686 - DNA, 441 bp, Zea mays
  Clone ID: MRT4577_154431C.1
gggggggggggtttttttttttttttttttttttttttttttttttttttttttttttttttttttttttttttttttttttttttttaaaagggaagcccgggggaatatttaacccccttaatacaaaagtttagttacatcaaggggggaggggccagcacaaaaaaggggggtgccggtcaagttgaacattactcgggtaaaccacttgggggggttcaaccccaagggggccccgagcttggtcatttttataaactcaggggcattcggggccggagcatttccttaacccttctttttcttttcctttttccccttcgggtccttttttgggcccccatcctaaccacgtccacgaggactcacactggcacgaccaccccttctgggggactttccattttcacgggttttggcccctgaatcttttttcct

SEQ ID NO: 59687 - DNA, 216 bp, Zea mays
  Clone ID: MRT4577_154432C.1
ccaagctcaaaaaagcgccgccaggcgccaatgtagcagccacgacagcaagaggttgtcgccggctgccttcgcttttatggcgcgtatagccagaccgcgcatcagcagtaccggccgcgcaggcccggggaggggtgctggcgcgggggcagtggaccgccatgctgacagttggaagtcgcggggggcgtgagggagggctctcgtggggaa

SEQ ID NO: 59688 - DNA, 335 bp, Zea mays
  Clone ID: MRT4577_154433C.1
gcactgtcctagatgacccttgatcttttgacttgggtaatggagggtcaactgcatcatcatcctcttcatccagatcatcaagtccaactactttagcacctaatgaattaattgctatacatcaagacaatatgggtgggggatgcgggtcactcttcatagactcacctcatagggtaccatgtatgaactattctttctgcctcaaatgatgataggtgtgataatttctcaaatacaggttatataaataatattctatctagtgaaactcaaatatattttaatagataatcaacgtgctgaacttcttaaaatagctaatgtaatgt

SEQ ID NO: 59689 - DNA, 348 bp, Zea mays
  Clone ID: MRT4577_154434C.1
agatgctctctcgctcatcatcggccgtttttagcagcttgagagggcggagaggaggtcatggcacggcagcgccagcggtagcagcaacgcagacacacagatgtgctgtgtgagagacaagagagagaaaggagtggagagagaagggcaggaaagcttagaagaagagagatccacctcgaagtaacccctccctccctccctcctcgcttgctcctgctggagtggagtcgagcctgctgctgccgctacctcctccccggcgccaggagagggagaggcgaggagaagccgcggccatgagggaggaggaagaggccagctggttcgcgcgcggcgaggagc

SEQ ID NO: 59690 - DNA, 500 bp, Zea mays
  Clone ID: MRT4577_154435C.1
aataaagaggccggtgtgtcacggtcagagcacagctgcctcctgactagagatctaagacgagccgacgatcatgccgaggcagcaaccagcggagactgaagggctcttctgcttcctatctcctgtctgccaacacgactatcactttcaagtctccgatagtctgagcctcgctcgcaccccggccaccgcgagctgcgctctgggtcacacctatcctatctgtcagggagcgcgaagaggaagaggacgatggatgaagactcggagaagaacatactggcattgctggccctgcttctgctggtgacgcccgcccgtccgggctcgaacagtacggtggagtatgacctgctcagcaataacgactgtgagacaacaccaagtgaggctgttgtacaatctgcgtctggtgataagggcgattcgtcaatccctgataagaagatccacggcatggttgaagtcattccaacagtccaaaaccagtgcgaaca

SEQ ID NO: 59691 - DNA, 296 bp, Zea mays
  unsure (1)..(296): unsure at all n locations
  Clone ID: MRT4577_154436C.1
agcatttcaactagcaccaccaanagctggcaggccaaatcgatcattcttggcactccaactcaatngaaccaaaactgctaaaccccaagttcaacaccactgaccacgggcacaaaaacaaccacgggtggctatcatagactacccgtcgccgacgcctgaaacaaccgaggcccaaccttaatgctagcctgccagcaaccaggagcacgcaacataccgtactgtttgctacgaagtgacaccaccccccgctaagctcaagaagtcattgtcctccagcaacccaaaga

SEQ ID NO: 59692 - DNA, 352 bp, Zea mays
  Clone ID: MRT4577_154437C.1
gaactaccctaacatggttcggcaccacacttggttatttgatctttagtataagcatcactctttatacaagacacaccttcatgttacgcacagatctacctgacgctatgaaggaagcctttattaatccttactataccattcacacttagcacaccggagcggacaaatgagatgcagactctgtgtgatacatgttaaggaaacacgatctgacctactctatgagctaagctcagacatacacacgtcatattgaccctgccctgcctcgtggtcggcaatagcgaaatcatttttgctggtttggtgctccctcaatgtaccaagtctttcaccctgttaacta

SEQ ID NO: 59693 - DNA, 270 bp, Zea mays
  unsure (1)..(270): unsure at all n locations
  Clone ID: MRT4577_154438C.1
gggtgggggngaaggaacaattagataacaagggttggtttttggacaaggggctgggttacattttatgcatattacttggttacttcaactttacaattgatacaggtggtatatatacactggaaaatggattccactggcggcgcacaagattggatacaaaggctggaggtgggtggcactttttttttcttctttcggtaggtttcttcggtttgattggggggtccctttgaactccatggggaacgggtctttagaatcatt

SEQ ID NO: 59694 - DNA, 281 bp, Zea mays
  Clone ID: MRT4577_154439C.1
gatggctgctcaggtacctgttagcggcccgtgcgtcacatgtattggcaaatgtggatcagggaacttcgtcaagatgcttcacaattgaattgagtatggttgcatgcaacttatcgacgaggcttatgatttactcaagtcggtgagtaagctcatcaacagcgagctgcatcaggtattctctgagtgtgaatcaaggtgagctcctcagtatcttgattaagatcacggccgacatcgttggtatctaggatcacaagggtgaatgctacctcgtc

SEQ ID NO: 59695 - DNA, 319 bp, Zea mays
  Clone ID: MRT4577_15443C.1
ggagaactcagattccctactccgggtggcttgagctctgtgtgcacaagagacaacattcccatgactttggcctgcagaatagccgaatggcatctaactattcacgcggatgggaactgtccgaggatgatgtttttaacgtccaaatcccgctcaaccgaggagaggggcccacttgaagaacagacacttgccacggcgaacacaatcaaaaggacctaaggaggcggcctaagatgaagcggcgctagcaacgagcacatcggcataacgatcttgttagacgccgcgggagtacataacctgccggctctat

SEQ ID NO: 59696 - DNA, 814 bp, Zea mays
  Clone ID: MRT4577_154440C.1
cctcgaggccggccgggacaatctacacctccccactccgcctcccaactcccaagtcccacccccactccctcgctcaccagaggaactagcggccaggcaaagccgagccgcaaccgcgaagatcttgcgtggcctccttttcccagctcgtcactgtgccgctcgtgtccttcactcccggtccgcccaaccaataatccatcgatccatccaccaccaccaccccgctgcggcgatgtgcggcggcgccatcctctcgggtttcatcccgccgccgccgccgccgccatgacctcggactacacctcctcggtcttagctccggcgtcttactcttacatgcaaggcggagcgccgaagagaatgaggaggagctacggcggcgcgccgcccagcctcgcacatgacgcggccatgcctggttttggccttgataaagtgagctaccactaccagccgttgccgttgcctccttattacgtcgggagcagcagcggctcgtcagacgacgcgtcggtgggcagccttggtcttctgcaggctgatggtgctccacaggatggggcgagcgccggggatatctggagcctcgacgagctgctcatgctggcagcagctggtgcttattgagaaccgcaagaaaaaaaaatgtaaggcatccatatataattgctatatcttgttatcccctacaggctacaccgctacacacgtctgccggccgtgaatggagaattggagatggagtgtctgtctcatccatgctcggtttttttttggtttcgtgccaggtgttggcgctgctagctgg

SEQ ID NO: 59697 - DNA, 442 bp, Zea mays
  Clone ID: MRT4577_154441C.1
aaacagggcgggccaattttcacttttcagggggggggggggggaagatttaaaccggccccccctttttacaacccagggaaagggcaaaaacgggcgatcccttcagattcagatccatttcccccccgggggggtggaaataggcaccccataaacgggccgactttagcccccccccctttggggacaagggttccaacacccttttcatcatctaagttttttcccccatgggggggactttgggattatcataaaaaaaagctgcaagttgtagtaaaaaaaacaaagggaaaccccccccaaaaacaaaatttttcgccaaaataaagggtcgcacaacagggaaatgggaaatttccaaaggaggcccattccaggggggatcccttaaatccggtttgggaggaactactacttttttgggccatttccaaaa

SEQ ID NO: 59698 - DNA, 530 bp, Zea mays
  Clone ID: MRT4577_154442C.1
gctcgtggatgcggagggcgcagcatctatatatagaggtgactctgaagattcaatctgagtgaggcgataccacacaacggttcgactggaaaaacctgactactctccagttggttggctagcaccatatgcctatttataaagttgttgcaataaccaacaggcctgaactgagcccatttgtagctattgggcaggctgaatgagcagtgggacgcgcactgtacagtgacatacaagttcggaacaaggggggggtacgagaaaggtgacctcttcacttgccagacatgtaaaggccgctaatgttaatgaatggcgtacctttatagccacttgcgtcggatgttccacgctaactataagagaaaagcttgctttatggtaacaaagtagtgctccaccttacatgagaccggatagaattgattggggagagggcatacgtagcgggccttcgccatagtagacaggtatgccggctgtgacgacggacaccacgcacgggaaggaggtattataggcct

SEQ ID NO: 59699 - DNA, 615 bp, Zea mays
  Clone ID: MRT4577_154443C.1
agacaaagcgagcgaatcatcgaattctttggccaagaccttggcagatgctgtacaagttagcagtgctgggcgcgccacaactgtccaggtgagcgctggtgcatctacagatgttgccgccctggtaccagtaccagatgggaacgaggtgtctattgctgaaaccatcacaaagctggtcacgctcatggatttgcccaaggatggttgaggctcctgtgattgggacctgaacgaagatataccacatcggtgggtttctgcttgcagtttttttttctgaacgcaagtgtggctagaatttgcagttttgcttcgtgtaaagtaccgcgtcagtttagcgtgatttgttccagtttttgtaatatttcaattcatgttagtattgatgcgtccgtgcgtcgtcgagatcgtagtattctgtaggaaggaggctactgagtttttgtgcttcctgtaaatatattcatcattctatctctggtgtctgatctatatcatcattgctttgggggtcggtcttattaatataaataaggattatataaaaaaaaaaaaaaaaaaaaaaaaaaaaaaaaaaaaaaaaaaaagaaaaaaaaaaaaataagaggg

SEQ ID NO: 59700 - DNA, 171 bp, Zea mays
  unsure (1)..(171): unsure at all n locations
  Clone ID: MRT4577_154444C.1
cgacgncgcgcggatcagggctcatcggngcctgcgccacctcctcttttgcggaaggcggagcggggccggntgncatcatcgcccacggcgccggggcccggggctcccccgacngganggnccaggggaagaaganggngcaggacgcagnaaaggcgggagcccagg

SEQ ID NO: 59701 - DNA, 163 bp, Zea mays
  Clone ID: MRT4577_154445C.1
cccacgcgtccgaagaatcccagattgtttctggggttgactttagatttaggccttcctatggagtcatatctactctgggagccatagcaaattcacagagtctcgacacaactcggatggcttagtcgagatccatgcttccttcatcgcgttatagaaa

SEQ ID NO: 59702 - DNA, 206 bp, Zea mays
  Clone ID: MRT4577_154446C.1
ccatactatagattgcttaattcgctggttactatacatgcctgggcgcttagtttacatcgaccgcttacagcagccagccatatacattgattgatgagcacacatcgatcatgaacatactccggctgctgcaactactacacgcctacgatctataacaagctaagtacataaaagaccactctgaccactccacgtacaga

SEQ ID NO: 59703 - DNA, 577 bp, Zea mays
  Clone ID: MRT4577_154447C.1
ctccgctggcgtccccagcacgtctccgcgctcgcgctccaactcctcgcctcgcccgccgcggctgccgcgcccgacctcccggtccacctcgcgcaagacctcgtgccacacctcgcccggggctgcccccgcgccatcgccgccgccgcgcgcgtcatatctgcatcgccatccgcggtcgtgccggtcctcttcaagccgctggcagcgtgtctcgcctctcccgatcctcgggcgtccacggcggctgtggcagccttctgtgatctatcggcgccccctgctgacgcaactcctttcctgccactggcgcccgacctctataacctgctcaccacttcccgatccaactgggctctcatcaaggtgctcaagctgtttgcacgactggctcctctcgagtcccgcctggcagccagaattgtcgacccggtctgccagctcctcacccgatccgcggccatgtcactgacctttgagtgcatccgcacggggctcactgcactggcagcacatgatgccgcattaccccttgcctcgggaaagccctggagttcattgctgctgctgatga

SEQ ID NO: 59704 - DNA, 320 bp, Zea mays
  Clone ID: MRT4577_154448C.1
gagctcacttttcggttgccgcccttgctttttttctctcgcacgggcgaccgtatggatgcgccatagggccatgcaaggagagtacagtggccacgaccatcacaccgcgaaagtctagaccaactacgaaggttgccaagttaacagcacctggcttcacaagggtgttggccaggctccagtgatatgatggaagagagcccgaacgccaaacgatagaagcgcacacattgagcttcctacggagcacacaaagggccccaacaatgggatctagggctccaccaccttgggggccaatacccccaggacttggc

SEQ ID NO: 59705 - DNA, 279 bp, Zea mays
  Clone ID: MRT4577_154449C.1
ttcttttacctgggacatttatcgactctggagggatagtcataaactaaatctccatatgcccaagagctgagctggtaaatataggatcacatgttaacactgatgccatggataccgtcgcgtggtgtgcactgccttgcaaggggaaatcaatggccaccacttgccttgccttattctggaattcttattggctgacgtgactgggcaaatcattgttacaggacccccccattttacgcgcaacaattgctacaaagacttggagcttcaaaa

SEQ ID NO: 59706 - DNA, 616 bp, Zea mays
  unsure (1)..(616): unsure at all n locations
  Clone ID: MRT4577_154450C.1
aatacttcattcatctccgatacatctggcctatgacttgctttgatgctacctgatcaaaagcaaccctagaccgctccgatcgaatcatgcgagggccggagcaggcctacgacgctatgtctcaggcaaccgccgactcccggagatcgcttcccctggtgatacaactcgagacgatcatttcctctttccgagctgatatgagggccgctccgacctattcgacaacggggccgagctacatccgaggtctgangacggcatgaggccatcgctcagtctcctgtcgtcatctcgccagagagatctactaccgctccaggacgcggagagagaacgatgacggtgtgaaccgaactccaagtgctggactgcatggtgtgcaacttcacgccaggactacatagaatgagcagaatgatgaccacgcgggacgagtactcgtcaactggttccgccgaggctgataaattctacatgacgactaggacgaactagcttggggaacatcctccgacattaccgataaaatagatggactacctcgaatgagccactctattcgagcttgaactccatcaacaactacgaggacacaactgatgcgtgatca

SEQ ID NO: 59707 - DNA, 586 bp, Zea mays
  unsure (1)..(586): unsure at all n locations
  Clone ID: MRT4577_154451C.1
ccgggttctacccacgcgtccgggnagcaatggccacaaccaagtggctatggccacgaccaaggtggctatggcggttatggttacaaccaaggtggatatggaggattgaaaaggaggctggaactacaaccggaacagaggcggtggcggccgaggacgaggcaattggggctatggtggtatgtagtctgtggctgggagtctcagtaatctttgctctatagatttttgcaaagttagcagtgctgggcattctgtcatgactgaaaattcgggtccgttctttggttctttttctattttggtttttagagatcgtgaactgaagttttgcccaagaaagcaagaactgttgattcggtcttcagtcttctatttcggtttgtcggttgtaaccgagcataccaagagacaaaggatgactgctcagatatagctaggggtggtaatgtattacgatttaaatgtttcttcatggttcgtttgggtccttagttaactttagttaaaaaatgaatagaaatagagcccaatactaatttgaaccgatccttaaattttataatgtaaaatatagagccaa

SEQ ID NO: 59708 - DNA, 408 bp, Zea mays
  Clone ID: MRT4577_154452C.1
cccacgcgtccgcggacgcgtgggttgttaaataaagtgcagtatcttcagattaatatctagtatgtgagacatatatttaatttaattttaaattattttttatggagagggtccactttaattttaaatttatttggggatggtctatcacactggcttgtcactgggtcctcgtctgccttaccgtcgttgtactataccatcaaatataattagtgtatgtcgtaacacacgagtattgtactagttgtttttattgttttggtgtcaccacttaagtgttggcttacattacactagtacaatgttcatgcattgcagcggcacataagaacaaattttatattttatcttacccaaaaagtctagaaagggatgagttaaaaaagaattccaccctctttt

SEQ ID NO: 59709 - DNA, 334 bp, Zea mays
  unsure (1)..(334): unsure at all n locations
  Clone ID: MRT4577_154453C.1
gaacataaactgtngctatgctttatttttgtataaacgaaacaatcatcaaatagccttttctttaaaagggggggaggcaaacctatctaattacgcattttttccacatatatcctttcaagctttatttcattctatacattctttaaataaagtttttttttcaaaaataacacttaataatcatctccataatagctttaacatatatctcatttttaattctatgtccttaaccttacctagtccttaaacatattccttattcattactcaatttaacattcttatcctctacaccaattttttctaacccccttcttcttttttt

SEQ ID NO: 59710 - DNA, 285 bp, Zea mays
  unsure (1)..(285): unsure at all n locations
  Clone ID: MRT4577_154454C.1
agtngttggagaatggcttcgnctcctacggggagatcctcgactccnaggtnatnacngacggggagatggggnggtctcgcggtttcggcttcgntaccttctcctnngagaatccatggtcgatgttatcgagaatatgaacggnaaggagttcgtaggnngaaaatttttngttaatcagggncagtncngtggggttggggggggagggggtgggtacgggggntggtgaggcagtgtcggctaatggtgggagtgcgacgtgacggcttgtttattgtg

SEQ ID NO: 59711 - DNA, 448 bp, Zea mays
  unsure (1)..(448): unsure at all n locations
  Clone ID: MRT4577_154455C.1
gggtccctcgggccgtccggggagtaaaaaagacacgagccgcacccgcacctaaacgctcacctcccagctccactacctcccatgtcggctctgctcccctccaaacctgccgccgcttcctctccccgcactcctatcggcagccatcgtataatccgtaggcgggtggcggtgtagagccccacgccacgtccccgcgagcagtagtctgcgagccggttggcccggccgggaggaggcggtttggtttgtgctttgaagcgatggagggtgcgtggaggaaggtcaggcaggcgctgggccttcgcctctgcgtgcacgcgcctgcggcgggaggtggaaatgtccagccggcgcagtcgggcgcgggcggttgtcggcgggatgccgcggtggcggtggcggngccgggcgagtcggggccgaacaccccggcgggtgcgat

SEQ ID NO: 59712 - DNA, 510 bp, Zea mays
  Clone ID: MRT4577_154456C.1
taccgtcagcgaacgcacgaacatcgcaccgatcgccaggcccagcatgatgatcacgacgtcgttggtgatggcgaacgcgccgatcacgccgtcgaagctgaacgatgcatccagcacttccaggtacaggaagccgccgataccgccgcgcttgaccatctcgccgacgtcgccgccgccctcttccgacttctcgagcaggttcgacagcacgtccacgccgacgtagatcaggatgccccacaggcccgagatcagcacgaccatcttctgggcttccggcaccagcgacaggctggccatcagcgcaccgatcgagatcatcacggcgatcgacgacaccttgccgagcgagccgagcttggcttcgaagtggccgagccagtggtgttccttctcttcatcgaacaggaagttcaggaagaccagcagcaggaacatgccgccgaatgccgccacttcgcgtggtggttcgtcaggtgcatcgagtactgctttggatcctgc

SEQ ID NO: 59713 - DNA, 205 bp, Zea mays
  Clone ID: MRT4577_154457C.1
cagacgcgtgggccgttttctcgaagaaagcagcctcttcctcgtcgccggcgacagcaccctccgcggctatcatggatgccggtcagggtggtagataccgacacgcctttctcttgagcctccccagggcaagatttaaatactggacacccatctgctcctagctgatcactcttaaatgctggaagatcttttgctggga

SEQ ID NO: 59714 - DNA, 573 bp, Zea mays
  Clone ID: MRT4577_154458C.1
taagtggtgccagtatatgcagagatgcagatgcagtatgggaccagacaggaccttaattaaaattttccatggtgaccacttgtatggatgcagctgacagagttcaccgacaagtcgtacgcgctggggctgagctgcatccacatccacaacgaccccaccgctgccgctctcttcttccacgcctgggcagccgcccaccgccggaccaccagcacgtacccgcccttccttcacccgccggcgttggcggtctccccgacctcgccgccccctgcaccgcctctgctcgccgagaaagccagcgccgcctcccccaccagcacagatgccgccgccgccatgtcttccgccacgttccacttcccggccgccgcggtgcgcgcgctgctctcctccctggagccgggcaccaccccgttcgcggcgctcgccgcgctcttctggctccggatcaccggcgccgccgacggggagagagagctcacgctggcgctggacttccgcaagcggatgtacgcgccgctgccgtgggggtactacggcagctccgtccacttcacgcgcgcg

SEQ ID NO: 59715 - DNA, 657 bp, Zea mays
  unsure (1)..(657): unsure at all n locations
  Clone ID: MRT4577_154459C.1
gtttttgtggaggcattttgaaagagaaaacctatctgccctccagagttgcgtcagtgtggtataaacattgtggagaaagtgatggtttgccattagcccttgtggcaataggaagcatattgtcgctgagaccgaagaatgttgacgagtggaagctattttatgaccagcttatctgggagctacacaacaatgagaaccttaatcgcgtggagaaaattatgaatctaagttataaatacttaccagactatttgaagaactgcttcctgtattgtgctatgtttccagaagactatctaatacacagaaagagattgattagattgtggatagctgaaggatttattgaacaaaaaggggcatgcagcttagaagacactgctgaaagttatcttaaagaacttatacgacggagcatgcttcacgttgcagagaggaactgctttggtaggattaaatgtattcgaatgcatgatcttgtgcgtgaacttgccattttccaatctaaaagagagggtttcagtacaacttatggtggaaataatgaagcagtgttagtgggatcatattntnngagagtggntgtgctnnaatgcagnaagggcattncattaaccattgatncatttagggttnggaccttaattacat

SEQ ID NO: 59716 - DNA, 165 bp, Zea mays
  unsure (1)..(165): unsure at all n locations
  Clone ID: MRT4577_15445C.1
cacacgcttacccctacgcacacagctttacttcataacacccaaccaancacgggacgggctcaacgttgtacttctcataaaccagcccactaaccacccaccagagcaccatgccgggcaccacaccctcaaccaagggcgccaacgcggagacaaccacca

SEQ ID NO: 59717 - DNA, 343 bp, Zea mays
  Clone ID: MRT4577_154460C.1
caaaaacgggaaagggaacttcttatttcgggggggccacaaacatcagccaaaaaactttattatggaattacaactaagaagcaatctaaaagagggccccaccaatggggggttgttggcaggaggccgctggattcgccaaagcaagttggacaaagggcaacaattgttgtagctgtaaaagggccgcggggctagccgcacactggggggaaaaaggcaacaacggcggccgtgacaaaaagaaaccacggctggcccaagctagctggcataaatgggaataacatgtgctgtggcaaaaaaggaggggggttcacggcggccacttggtacaagg

SEQ ID NO: 59718 - DNA, 136 bp, Zea mays
  Clone ID: MRT4577_154461C.1
attcggctcgagggtgacataagaagggtttttttttttctctggcactctatgaggggggcagattgctaccgactaacgagcctgggccactgctgggcaaagccatgattgctcgcatgctcctttatcaaga

SEQ ID NO: 59719 - DNA, 234 bp, Zea mays
  Clone ID: MRT4577_154462C.1
gttgaagagtgcttcaaaaaacagctctttggtctgcctgcagtccattattcatatgtgaagaatgtaaaacctggtatgcctttgtttctattcgattatattgacagaagactccatggtgtttttgaggctgcaagtcttggtcaggtgtctattgatccgtatgcttggagtaatgaggacttattaaggacgccttttcctgctcaggttcgtatttgcatggggact

SEQ ID NO: 59720 - DNA, 550 bp, Zea mays
  unsure (1)..(550): unsure at all n locations
  Clone ID: MRT4577_154463C.1
tttttttttttttnnnnnnnnnnnnttaattatgagtggtatacccttattctgggcatcatagcgttgcaagatgatacatggtgatttttcacactcattcgtacagtcgacccctcctcccaagcatatctgcggtcgtcgtcaaattctaccacgccgtgtcccaacgccatgaatgctggtggtagttgtttctttctccctttgaaaaacatctccacatgataatgtacactgttatgttttgtatagtcgtagagctgctccctgtttaggagaggggagagagaaggcggatgactgaaggtcggggctcgcttcgggtgtagccgagatagaggatcagagggagatagccatagtggatggcgacgcgcgaaacatcaatgagcttggcaatgcgctccttggactcctcagaaagggcaaacatcttgagagaatttagagaagtgtattcgagggacttgaaaaagttacacaacaaaacgatgcggctcaaccggatgttgcaaggctcgagactgagaatctataaaccgcagtc

SEQ ID NO: 59721 - DNA, 382 bp, Zea mays
  Clone ID: MRT4577_154464C.1
ttgcgcgactccatatcgccgtatacccggctcaaggacaaggggaaagctgcgactctctcggaagtggggtactgtagcttccactcggtctctctctgctctggtgcttcacgctgttaccttcagttgaggttctctaatctttccccctgtggtcgagagacaaggtttcgccaacatttgcatctagccatctttactcaactgaattgttgggctcttgtggcattcacaaaatccattttcaaactgacctagttcagctgttattttttttttcaactcacccgtccctctcttttggacctgctcttgactctttcctttcctcgtttgtattgattgaaagtggattcctttccactttccttcaccaccc

SEQ ID NO: 59722 - DNA, 360 bp, Zea mays
  Clone ID: MRT4577_154465C.1
aatggccggaccgacgcgctcactagtaaacggccgtcctttttttttttaataaaccacacatttgcatgggcgaaggatggaactgcctgcgacaccgtcgacagacacgacgaggttagttcgtacacccgcaaccttcgcgtcccatccaataccgccgcatgcggcgggagggcagataagacgccggatggcccgctggatacgcccaggaaatacgatgtcgccgctgacgaggacagtttcatgcgggccgaggtgcgggatttggcggcggcgggcgggctagaagcggacgaaagggttacgctcgcggaggtggggtcggactgcacgaagcggtggttacaggacgca

SEQ ID NO: 59723 - DNA, 163 bp, Zea mays
  Clone ID: MRT4577_154466C.1
aggaagagaaggaaaaaaaagaatagggaagaagaagcaaatggagctgagagtcgggaacaggtaacggctgggcgaaaagatcggcagcggctccttcgggacatctatctcggtacggacttgctgcaggagaagaggttgccatcaagcttgaatgtgt

SEQ ID NO: 59724 - DNA, 318 bp, Zea mays
  Clone ID: MRT4577_154467C.1
gcgaacattatcggattcatgtgttatttaagctgccctggatgggatacaaccgcgggaagcttggccggctatcattctcatcgtattcgcgccgtaccaagcaagaagcctgttgtgacgatggccttcctacattacttccaaggcaagacgtatgcacagacaacgaactcaaaagttcaagaattcagctcgcaatgagggactatgatcagtgtgacattaaaagatgcactggtcgtaaactttcaagatccgggcttgtgaacgagtcgagagtgaccatcgcgtttggaggagttgatctcagccctg

SEQ ID NO: 59725 - DNA, 360 bp, Zea mays
  Clone ID: MRT4577_154468C.1
ctgatggttctgtagttacttaccacactccgggtggaaattactatggggcgacacattaccactcaactgctgactattcacctcaagttactgctacagctgcgccaccagcttgccaatataaatatgatagcagttaccagcctgaagatgcgacgattgctgagggtcacaagacaggcaggtttgcggtcggagctcttgcattcgacgacgtatcagttgccgcggatcatctgaaacgtgcactggatcttatgacaaaccattgtggtgaaccccgctagctcttttgcattcccttgctcttggcagaagcatcatttgtacatatacaagagtggcgtaccacccatg

SEQ ID NO: 59726 - DNA, 284 bp, Zea mays
  Clone ID: MRT4577_154469C.1
agagcagatccgcttcgcaagcaagaacatctcgaccgatcgacgacgactctaatcggatgccgattcgatcttcagctctcgggctatctacctagctagcaaagcatctcctctgatagtctgagcgcacctcgcaagcaagaacacctctgtcgatcgatacgtgtgcagtggggctgggcatggaggtggaggcggtcggctgcgagtgctgcggcctggaggaggagtgcacgggcgagtatatcggtggtgttgcggggtctaattcggagggaggt

SEQ ID NO: 59727 - DNA, 182 bp, Zea mays
  Clone ID: MRT4577_15446C.1
tcaactttctcccttttgtcacatgaaaaaggcgggaaaggataccctcttatttctggtgggcccctccttcatacaaaaactctttttactaaattaccactaatttagcaagtcaaaagagggccccccccttttatgttgtcttgggtaagaaggccccccaagttctccgaaaagca

SEQ ID NO: 59728 - DNA, 568 bp, Zea mays
  unsure (1)..(568): unsure at all n locations
  Clone ID: MRT4577_154470C.1
aaattcagtaactgttgttacttcttaaagggacaaccatgtgagcaggtatgtcccgctcaacccatggagctaaaaccgcaatccatcaacaatacacagnaaaaagaggcaaaatgacttccaataaataaaacgcagcacagaagttagaaatttaattaaatactgattcagttgttagcctgcactcttgaaacccagtatctggggaagtccggaattagaatgccaagcttctcagatgaattcacagatgggaaacacagcaatatagcatgatggcaacatcaaggaataatgccttcagagttcaaaccttggaaaatacgcccccaaaccaatacaggcacacagaagacaataaagtttcctctgaacgcatataatcagttagcaaccactctgtaatttatccaccaataaatcatatcatgaagctgatgaaatgactgccactgaagcttttatcagaagtatagatagccaaatcttcaattacagccaatgtgtttcattagtccttattgtagatttcatgatttcagcaattcttggggtttagctc

SEQ ID NO: 59729 - DNA, 219 bp, Zea mays
  Clone ID: MRT4577_154471C.1
gtggcacggactgaaccaaaggtaacgtaggaatctattataatgactagtcatccagggatgagtcccctttgtctcattgcgcggagctctcaattgatcgaaagttttgtagagagcagagagcattcacttcagattacctggaactactgccatgtattctgctggtaaactcgataagaattctttgatcctgtccagcacgaattttatgca

SEQ ID NO: 59730 - DNA, 1512 bp, Zea mays
  Clone ID: MRT4577_154472C.1
acccagcgttccatgggtcctactcccctaccagattaaattaataaaaaatctgagacacataattcctccttttcattcgtgccccgccccccaacctatgtactcaaactactcagtttttgtttatcaatgatgacggttattttgtatattcgtctagatggcacagactcatgacggtcttgaaaggagtgcagaagtcaatgagcttgagtggtcttgtggtcgcaatcctgatgtccttattccaattgcaaatgggtgtgaagagatggaaatcataattctggttgatattttaagacgggcaaagataaatgttgtattagcttcagttgaaaaatatccagctgttcttggatctcaaaggatgaagattgttgctgataaaagcattatgagtgcctctgattcgatatatgatctaattattcttcctggaggacctgctggggctgagcggctgcacaggtccagaattctgaagaagttactcaaacaacaaatgcaagctggcaggatgtatggaggggtttgttctgctctgaaggttctgcagcaagaaggtttactcgaggataaaacagtgacagctcatcatgctgtagccagtgagctcacgtgccaagttatagaccaacccaatgttgtgatcgacggaaatttgatcactggtaaggggcttgggacagttgttgattttgccctagctatcatcaggaaattttttggccatggacgagccaaagctgtggcgaatggaatagtttttgagtaccctaagagctaaaccccaagaattgctgaaatcacgaaatctacaataaggactaatgaaacacattggctgtaattgaagatttggctatctatacttctgataaaaggtgagctgatgcttttgggatagcaaaagattcctctattgttgcctttctggacagctggactgaaatctccagatccactatatatgttggggtggaccaaatttacacgggaaagcttcagtggcagtcatttcatcagcttcatgacatgatttattggtggataaattacagagtggttgctaactgattatatgcgttcagaggaaactttactgtcttctgtgtgcctgtattggtttgggggcgtattttccaaggtttgaactctgaaggcattattcctcgatgttgccatcatgctatattgctgtgtttcccatctgtgaattcatctgagaagcttgacattctaattccggacttccccagatactgggtttcaagagtgcaggctagcaactgaatcagtatttaattaaatttcgaacttctgtgctgcgttttttttattggaagtcattttgccctctttttctgtgtattgctgatggattgcggttttagcttcatgggttgagcgggacataactgctcacatggttgtccctttaagaagtaacaacagttactgaatttaaattgcagttagcataacggagtagattattttgcttgc

SEQ ID NO: 59731 - DNA, 338 bp, Zea mays
  Clone ID: MRT4577_154473C.1
tttctttatttggttctgtcgtaattggtttcttttaataaaaggagtggccgaaaataaaactcttacaaaacccactagggatggagtctcttggggtgatggatcaacaaattggccatcaaggtggccgtataggctaggcactagtcgggctctctgacgatgtaaacctcgtcaagtgttaaaatggcaagagtggggccctggttgcggagccaccgacagagcgcgtgcttgcaaatcctgacctacatgactccgtgccttaaactgatttccctgaacgcactgtactcctgatggagggcccagcacaagctgaccgaagttgggcc

SEQ ID NO: 59732 - DNA, 424 bp, Zea mays
  Clone ID: MRT4577_154474C.1
gactctttcaaaaagcgaggcctcttctcctttcctcagctcgacccacatcgaggccacgatccggcggacatggtactgcagagcctgcacgcagggctacgcgatgggagcggacgcgatcgtgctgcggctgctgacgctgccagacctcgacagcctgcgccggcgcatgatctcagcggagcgaatcgcgctgaaacccttgaggccaccaggagcacttctgactcttccagctcatgcacatatactggaaggacgatacgcgccccacctgcgatgacgaagacgactgcaccccctcagagcacctccgccaccataagtccatcatgaagtcccaacggaacgcgcgcctcatagacgctgggctgctcctctactgaatccaattctccgtcacccacttcctcgacagagt

SEQ ID NO: 59733 - DNA, 132 bp, Zea mays
  Clone ID: MRT4577_154475C.1
gtgggatgacagctggtacaaggacggtcattttagctggggttcgtcggctgcctggtttaccaggagaggctggagaaagagcttcaccaacttcttccaccttatatgtcagaaggaataagagtactc

SEQ ID NO: 59734 - DNA, 361 bp, Zea mays
  Clone ID: MRT4577_154476C.1
ggctattctaaagatgtccctagtcagatcgatgactagcacatgtattagctgatgactacatttcacaagccatgaacatggagatgttagaactaataatgtggccgcatgtatgacatgaggctggaccgacccaacgtgagatattgtaatataggtctattcttgcaacatgaatagtgtatccttagacctgagattgtagcatgttctcaagatgtgaattgacttacttagggactatcaaacgctatcccgcaactgggtaggtataaaggtaatattgggtttgtgaggaagcatgctatgaggcatgtgcagtcaagatggaatttgtgcctatcttggtgagagagat

SEQ ID NO: 59735 - DNA, 344 bp, Zea mays
  Clone ID: MRT4577_154477C.1
agaaccaagagtgcttaatgtgactgactttaatttcaaatgcccaaaaacaaacacccagtatgtggtgaaagagggcagcacccaaacaaaggcaaaaaccccaggacacaagcaaaggtaccgcaacaccacaacctggcttgactggcgaacatatagaagcggcagactaggttacctaggattcactaacgcaaggactgacgacctatgtggcgaacttctggaagtaaaagaacggggcgggcagtaacccaagcgcttctgggaagttcagaacctacatgcccttgccgtagtaaaagtgcaagaacgagggctagtggtaaatgaggtcggaa

SEQ ID NO: 59736 - DNA, 331 bp, Zea mays
  unsure (1)..(331): unsure at all n locations
  Clone ID: MRT4577_154478C.1
tgtctgtattcaacctcaactttnanagcaacttttcaaataaagcttttttgcggtcgaccaaanccaannaaagaccaagcaccaacatcctctgcatataacaattcaggggggggcgtgaaatttttttttttttttgaacaaaaacaaaaaaaacatccaaacattcagttcatcatatcaaacctaaaaaatctatattttcctcatcttacaactctccctacatcatatattctactcttttgttcacccaacaatactacttttcctcctacctctttgcaccaactaaccaaattagttaaatttgcatacgacaaatttt

SEQ ID NO: 59737 - DNA, 382 bp, Zea mays
  Clone ID: MRT4577_154479C.1
tgctggataacgatatatcgggcgggattcttgagcagactttctcgaccgaagacgagagatttggagtgatgactactgaggatctcatccctgatggccgcaatattgatgtcaccaatgaaaacaagaaggagtacgttgatctcatggtcaagtggcgcattgagaaacgtatcgccgagcagttccaggctttcaaggaagggttccaagagcttatccctcaggatcttattaacgtctttgatgagcgcgagctggagcttttgattggaggtattgccgaaattgatgttgacgactggaagaagcacaccgattatcgaggatataccgaatccgacgaggtcgtgcagaacttctgggcaacagtacgctc

SEQ ID NO: 59738 - DNA, 308 bp, Zea mays
  Clone ID: MRT4577_15447C.1
cctttttaggttttggtgatgcaaacaaggagtagaggatatcacttgtccacgagtgcattgatttgcgcagcattaaccaaacgtgcgtggattcagcagggaaccacatcgttgactgctcaaggaacaaacatggtactgtcgtaataaaactctgggaatgtagtgttcatcaacacactgatggatgaaacgaatggtacattcgcaaagaatatggggaggtgcttgctataaacatcaaactagtactacgtatatgtgggatacaaggtaataccgatgcatctagaataaactaaatg

SEQ ID NO: 59739 - DNA, 656 bp, Zea mays
  unsure (1)..(656): unsure at all n locations
  Clone ID: MRT4577_154480C.1
ngtttccctagactactcccccatccagcagcatccaaaaactacctagccagccgccgaaagaaatcccacatctccttcataatgtagatatttgagaagactatgacggggaagatcataaccatcgacgagatgacctcggacactgttggcgatgaggaaggccatgttcatctgatcgaggacatccccgcggaccaggatcggcttgtcgacgccgtgaagctgctagaggagcgcggctgcctagtccactacgacatccccaatgactgcaccctccacctggggctccccctccgcgtgggcacctataagcgcatgatgacaataactccaaacccaagatgcctagtcctagcacaataatgtgaacgtctcctggatgattgtctataagatggacgaccccacaggcaaggtgacccgcctccgcaaggagtgccccaacacagagtgcggcgcgggcgtcttcatggccaaccacttcgaccgccactactgcggcaagtgcggcctcacctatgtctacaaccagaaggcgtaattgcttgccccgatttgctttatccgccaacctatcaagcattcagatgttgtttactcaaattgtatctcatttaaatctgcctgaggcctgaagttaaatgtat

SEQ ID NO: 59740 - DNA, 795 bp, Zea mays
  Clone ID: MRT4577_154481C.1
cctcgaggccggccgggacaccccctccagctctccgccgtcggccatgggtcaagcctggggtaatctccaagataggctccaagggcggcggtggaaggagcaccaggtgaggaagatcaccgacaaggtgttcgaccgcctcacggaggacgcccagaagcgcgacaaggaggccctcagattcgaggagtgacatcaataagtacttgccggggccgcaccacgaccccccgtccaaggagaagctcagggccatgatggaggagtacgacgtgaacctggacgggctcctggaccgcgaggagttcgcggagttcatccggaagctgaccgcggactcgctgtgctcgatcagcgtgaagctgctgatcacgctggtggcggcgccggcgctggcgatggcgaccaagcgggcgacggagggcgtccccggcgtgggcaaggtggtacgcaaggtgcccaacgcgctctacgcctccgccatcaccctgggcgttgtgctgttgcagagatcaaccgagggcgtcgagtgactcgcgctgctgaaactgcaatgtcgtcggctgtgtagatggagcagcgtatctaggataggtgttggttctttacggcttgtgcggtgaattgatctgtgtatcaattcgatgtgatttatcctggatttgggacaaatagttgtggatccttgtgaattgtcttgcttttttacctttaaaaaaaaaaaaaaaaaaaaaaaaaaaaaaaaaaaaaaaaaaaaaaaaaaaaaagaaaaaaaaaaaaaaaaaagcggcc

SEQ ID NO: 59741 - DNA, 748 bp, Zea mays
  unsure (1)..(748): unsure at all n locations
  Clone ID: MRT4577_154482C.1
cgggcatcacgcatctaaagctgctagctaccagtgagcatacgaacaaagaaaaggacagcgcggacgacaggcccggccgcctgccccgttctcttccatgcatgcagggtagggtagcgcattagttaattgcgaagcaaagcaaagcaaagcgtctgtagtggaatacgtctccttccttaccgggccattatatatacgctagtgttgtgttggttgcttgccgacctgtggcgtacagtacgcttttcaagtttgaacacgtacacgcgctggacgtacgctacttccccgggcgggggcggcatccatccatccagagtcactaacnattggtgtcagattattccctacgttaatcccgaacgacccccaccgagaaatcgaaatcaccggacaggtggcggcctggcggggcaagtgtatccttccttcatcagcaagcgctctctgtgtaattagcgagagctaattaacgggccactacgctcgatcgctctagaacgaatcatcagcgaataagacctccgctataattacgtcgccgggtggtgcatgctttgacaaatcagttgtaacggtgcgcgcactacgctcgagccagcgtaaaccgcgcgcgttcgtccacgtccgtacgtacgcacgccgcacggtcttttattcgtctagaacgagccagacagaggccgncgtccaccgccacgcactgaggcacgcacgtcgtacgcccgggtgacacagcgac

SEQ ID NO: 59742 - DNA, 643 bp, Zea mays
  Clone ID: MRT4577_154483C.1
cattgggtacctcgaggccggccgggagctttatttcccttgcccttttccagagcaccccctccagttctccgtcgtcggccatgggtcaagcctggggcaatctccaagataggctccaaggtacccgcccctcaactcaatcgtgtggattcccatcttattcgcagcgatcgtccccagtctcgcgaacagtcgaatcgctagagatgaacgacgaaacgattcggtgcagggcggcggtggaaggagcaccaggtgaggaagatcaccgacaaggtgttcgaccgcctcacggaggacgcccagaagcgcgacaaggaggccctcagattcgaggaggtctacatcgccgtcctctgcgtctacaagtacagaagcgaagcgggccgtatgctacctcgtaacaccctgcagttttcatctgtttctgactgattgttgccgttcttgtcggtggcagtgacatcaacaagtacttgccggggccacaccacgaccccccgtccaaggagaagctcagggccatgatggaggtaaccacatccttccccttcgtttaggttttgctgtttcagtatggccaatcgaatatcgtgctcttccggttgttccttgaactggaagcaaagtgttcttgatt

SEQ ID NO: 59743 - DNA, 815 bp, Zea mays
  unsure (1)..(815): unsure at all n locations
  Clone ID: MRT4577_154484C.1
agnaacctttatttctctcgcccttttgcagagacccatccagctctccgccgtcggcccggccatgggacaagcctggggtaatctccaagacaaacttcaagggcggcggtggaaggagcaccaggtgaggaagatcaccgacaaggtgttcgaccgcctcacggaggacgcccagaagcgcgagaaggaggccctcagattcgaggaggtctacatcgccgtcctctgcgtctacaatgacatcaacaagtacttgccagggccgcaccacgatcccccgtccaaggagaagctcaaggccatgatggatgagtacgacgtgaacctggacgggctcctggaccgcgaggagttcgcggagttcatccggaagctgaccgcggactcgctgtgcaacgatcagcgtgaagctgctgatcacgctggtggcggcgccggcgctggcgatggcgaccaagcgggcgacggagggcgtccccggcgtgggcaaggtggtgcgcaagatgcccaacgcgctctacgcctccgccatcaccctgggcgtcctgctggcgcagaaatccgccgagggcgtcgagtgactcgcatagctgaactgcactgcaccgtcgagtgctgtatagatgcaatgcaaccagggtgtcttatctattttgaaaacctgggtgtcttatctaggataggtgttgtgatgcttcatttcggcttataagggcataaggcgatatgatctgtgatatctctgggacagatgttcgatgtaatctatcctggatttgggacaggattgtggattgtgttgtcagtgagtc

SEQ ID NO: 59744 - DNA, 1831 bp, Zea mays
  Clone ID: MRT4577_154485C.1
aagcatgtcaacaatagaggatacgcttgcgtgtcactaagtacttcactgtgtgataaacaaaaacatgctctatcttctaatagggtttctacctgtcaccaggattgattgtacatctgtatttctgtgttccctgcacattcatgcagtccaacaaagagatgtacgagcaccaccacttgaagtgtggttgacacttcccaactcaaaaaatcaatgagaaatttgttcctttatatcctcatcaacatcgtcgtcactgtcctgatcctcagaagcaacacccacttccatgtcatcttcagccacgtcgtcttcatcatcatactcctcattttcatcatcatccactgtggcaccaaactcctcgatggggtgcggcgagagcgcgaacgccgaggggtagagccgcaggaagcgcagcgggcggaacgggaaagggataccccctccagctctccgccgtcggccatgggtcaagcctggggtaatctccaagataggctccaagggcggcggtggaaggagcaccaggtgaggaagatcaccgacaaggtgttcgaccgcctcacggaggacgcccagaagcgcgacaaggaggccctcagattcgaggaggtctacatcgccgtcctctgcgtctacaagtacagaagcgaagcgggccgtatgctacctcgtaacaccctgcagttttcatctgtttctgactgattggtgccgttcttgtcggtggcagtgacatcaacaagtacttgccggggccgcaccacgaccccccgtccaaggagaagctcagggccatgatggaggtaaaccacatccttccccttcgtttagattttgctgtttcagtatggccaatcgaatatcgtgttcttccggctgttccttgaactggaagcaaagtgttcttgatttatgtgtttaattatggtcacaaagtcagtgatttgctttggaggtctagaagtaattattatttttttcccttgtcgagatcccagctgcttcagctggtacagcctacaggtagttcttgggttgagtcattgagtgtggtttatcacttgcttggtttctgcaacgcgcaggagtacgacgtgaacctggacgggctcctggaccgcgaggagttcgcggagttcatccggaagctgaccgcggactcgctgtgctcgatcagcgtgaagctgctgatcacgctggtggcggcgccggcgctggcgatggcgaccaagcgggcgacggagggcgtccccggcgtgggcaaggtggtacgcaaggtgcccaacgcgctctacgcctccgccatcaccctgggcgttgtgctgttgcagagatcaaccgagggcgtcgagtgactcgcgctgctgaaactgcaatgtcgtcggctgtgtagatggagcagcgtatctaggatgagttcatctgctttatgaccccagcctcgcattgatcgaccagcgtatacgtcgtgatctagccttgatttggccggcactggcgatggcgaccaagcgcgcgacggagggcgtccccggcgtgggcaaaggtggtacgcaaggtgcccaacgcgctctatgcctcggccatcaccctgggcgttgtgctggtgcagagatccaccgagggcgtcgagtgactcgcgctgctgaaactgcaatgtcgtcgactgtgtagatggagcagcgtatctaggctaggtgttggttcttttcggcttgtgcggtgaattgatctgtgtatcaattcgatgtcatttatcctggatttgggacaaatagttgtggatccttattaaacccctcccttttttacctttaaa

SEQ ID NO: 59745 - DNA, 246 bp, Zea mays
  Clone ID: MRT4577_154486C.1
gcacctcaagctcgattcgtcgcgcttcgtcacaccacacgtgtggaacaaagaacccccctggcttcaccgtctcgtccacctttctgcgggctctggggcgcgctccccagacctccgggaacaactgccctacccggggcgcatcgccctcgcacactcgaggcggggttttctccgcgttcacatcttccgccgccacctggccgcgattggccccgctggcgcgccgcccgtcctgccacg

SEQ ID NO: 59746 - DNA, 673 bp, Zea mays
  unsure (1)..(673): unsure at all n locations
  Clone ID: MRT4577_154487C.1
ccggccggggaaacccgtctcgacacacgcgagactacggacccggcccggaacaagagagagaagacgtctctgtgctctggctaccctcgcacctcaaccttgtaccatggtgactgcatgcctgtctgcctgcaaaaagcgagttccgccagtggggaataagcacatgctcaagcgagcatgaaggacgctggagacttgacnccccacacctgatgacagccacaacgtgcctgactggtgnagaacagtgattgaatggggcagtgcaacgaattatgcggaccacactgagcaggcctatgctggtggatgcaggtttatacatacatgtgatatagtcgaggcatattacccgcttgaacctcctaagggatgttgtctgacaagcgtcatacatcctactatcaacaactcagactgtagatgccaggacattctcacagagcggtgctgccctagttatagcaatggatcactgactcactattgcatcggcttcctgctgaccgaccacagacgccgtgcgactcctatgatccgaatagtgcccacataggcaagacgttccgtgcggaaacagagaagacggaccatatgctggacgcagaatgacacgatgggctgacaaacgctctcctagattgatcacccgaatgaagtctcaaga

SEQ ID NO: 59747 - DNA, 252 bp, Zea mays
  Clone ID: MRT4577_154489C.1
tgaattcggcacgaggcccggtccacatcagctcctctaggaacactaaataaacataagcattacctgacccaatccgtcaggctgggccggggagtgacagctggctgcaacaccacgctgacaccagagccgaaggatagcccccgagggagccgccgacaagctgccagaaaaccatatgggccgccgcgcgggacgccaaggcccccggaggacggtctgcccatgagcaagacgtaggcaagggag

SEQ ID NO: 59748 - DNA, 311 bp, Zea mays
  Clone ID: MRT4577_15448C.1
gccgcctcgcgccccgctcgcttcacttctctaggtgcgcaccgatcagaagagatggcggcgtcgctgttgacaacagaacatcacgaagaagcgtgtccaggcagcgtcaagaggccccacctcgaccgctacaagtgccttaagccaagctggcgcaggccaaagggtattgattcccgtgtcacgaggaactacaagggatgcaaccttgctgcccaccattgacgtctgctcctgagaaccccataatctccactttttgagaggcctcttccatgtcgagtgcccttgctcccgtgatgactggt

SEQ ID NO: 59749 - DNA, 633 bp, Zea mays
  Clone ID: MRT4577_154490C.1
tgagtactgcatcacctgattgtacctagcttgcaactcgctttgtttgatgccaccatttcatttaattccctagacttttattgatttaaatattttcatatcaacaaaacctatctacgtactctgcaataatgatgtttgaagaccatgggcaccttggtttttcacccgcactaacatggtaactttcatatgttaaacttttacttcgactgtatttcgttccttgtccagctcttattgtgcaagctcaagcaaagggttgcattaattagttctaggatactcaattcttaagcatggtcctgaatgcatctttttagctttaatgatgtcctggtgtttattaggtatatatacctgaatactgattacctgtgtattgatgatgtatacaccatgtcattaattaactgtagttaaaggaaccatgccattcagttccagcacactgcattctactagaatgcttattctactaagttgttttagcaattatatgtttcggtggaatttcaatgttttcttgtaattacccgggaacatggcaaaatttttaatgttttaggaaactatatctcttaaattttataagtattttttttgaaggccttttttaaaaccattttt

SEQ ID NO: 59750 - DNA, 389 bp, Zea mays
  Clone ID: MRT4577_154491C.1
cagcgcggggtctatacgcgtagattattgcaagacctttgctagacagtgactcatagctgctcgatgatgctgatgcagagcttgtggttgatggtacctaggagtgctttatgtataagcgtactggagcactactgctctataggagactgatactgggatcctgtgctgatcacaaactgattatggaacatggcttagctcttaatacatgctttgcttattgacttcatgtgagtaccaatgattatagcctactctggggaatattcacctttcggatctcaattccttagtttcacgagattagctgtgtctatgctcttgggagggcgaagatctacccccttctgacactaaagctatcagggatatctgagacctgc

SEQ ID NO: 59751 - DNA, 471 bp, Zea mays
  Clone ID: MRT4577_154492C.1
gcagattaacactgccaatctgggatggaagcttaatctgggaccggcgcaaattaacactggaaatttgctgcattaaaagagaataaaactcttcccaaacccactagagtaggagtagctaggagggatggatcaatcaataggccaacaatctggccgtcttggggaggcacttggcgggctccctgaccaagtaaacctcgtcgggggggaccttggcggcatggagggcctggttgcggggccacccccaaaacgcgggcgtgtcgttcctgacctccaagaccccgggccccaaactgctttccctgtaccccctgtactccgggtggggggcccaacaaaaacggcccccgggggggccccacctgaaattggcggggcaaaagcggccccccaagaaagggtcccgcgtggacccccggtcccggcaagggccggccttgtccccgtgcgccggcgccattt

SEQ ID NO: 59752 - DNA, 346 bp, Zea mays
  Clone ID: MRT4577_154493C.1
agtgataacctggtgcatggtaattagcaggcggtcagacctatgcgtttcttaaaaaaatttttaatttttttattttttattttttttttattattttaaaaataaatattttaaaaataaaaaaaacggggggtcaatctataatatcaaagattaatatcgagtgcatacaaggttttagtttttttatagggtaaaaaaatttaaattaattgggcgttgttttataacttgggaaatggaaaaaccctgaaatattcaaaattaattgaattgaagaaaattaaattttaaaaatgtggtgttataataaaaaggccattaaatataatttttctaaaaa

SEQ ID NO: 59753 - DNA, 153 bp, Zea mays
  Clone ID: MRT4577_154494C.1
caaggaaatgacttgtacgggtaggttgcaccgtgatttatagtggagtttagaaccaatcccagtttggaaggttccttagaccaagtttaatatacccaagttagttggatgtggagtaaagaacaaagacatacggtacactgtgtacat

SEQ ID NO: 59754 - DNA, 2160 bp, Zea mays
  Clone ID: MRT4577_154495C.1
cggggggcttatagtcgatgtttgaatctcatggtgacagcagaggagcgtgctggccatgtcttccccgcgtgatggtccaccttcgtggacgggtaatttgtctgtgtccacacaatgtttggggggggggggggggcagttttgggatttggcatggttacattggaagtttggaaaattccatcctgccggcctgtggcggcggctgtagacagcatatgcagcctttcatttggccttcatgttgtaccctgcatatgtctgtttcctgcactgtatctgcacatttcgttcaactgtctgcacatcgaaacagtctaattcgggggcacgtagaaattacaatcactccagaaactatcatatatttatataatatttcctgaatacactgaatatgacaaaggggtctctaagggtgtgtcgaagtgggctgatttagttccatttgcaattcggcacgaggcaacgacctccgcgtccgccccaaaacccccgcaaaccctagccgccgccagcaaggaatggccgccctcctgcggctcgccgccgcgcgatccgccctccccaggcgcgccctcgccccacaccggaggctcgcggcggccgtcgcgatggaggagtggtggtccgactgggagcaggacggcgaggaggaggcgcgcgcctcggcgccggccgccggccttgaccccgccggcgggggccccgggggcgtgcagtgggtcgtcatgggccgccctggcccgcagaagcacgcccacgccgcgcgcctcgccgaggtgctcgccgtgccctacatctccatgggcgcgctcctcaggcaggagctcaacccctcctcgcaactctacaggaagattgcaaactctgtgaatgaggggaggcttgtgccggaggacatcatatttgggttgctgacaaagcggcttgaggacggatacaacaagggtgaaaatgggttcattcttgatgggattccacgcacccgtatgcaagctgagattcttgacgagattgtggatgttgatttggttcttaatttcaagtgtgctgacggctgtttcatgaagaagcaatcgaggggcaacatctgcgcccactgtggacagctctttgacgtcagcaattcagcttctacgaactgtagccccagcctcgggagttatacatggcattctcaggtagaacctgctggtgttttaggcctcgaagcctcaaagatggagaggatgcgcacatatgctgagcagaccaagcagctggaagattactacaagaagcagaaaaaaattgtggaactgaagacatctgctcgcccggtggaaacatggcaggggctcgtagccgccctgcacctccagcatctggactcgcccccgacaccgcacaaactcaccgcgtaaatatcattattaattttgctacctccgagtagagagtctaaaggatcagaattccgatcctgcctgcagcatatctaatatccctatgtttgtgggttctggctcgagagagtcagtcggctgtcttttgttttgttttgttattgttatagataaaggtaagcgattttgcagacacgcttattgtatggttgtaaccgagagttgtggacttgccttggcttgcgagtgtactcgcttatatgctcctttgtgatgatgctttgcacctgtggtatcttcagttgctccattgtggtgttgtccaccatatgttttgttctgtgcatgatgttgatagtcatgcccttttggaattctgagaagacagcatgtgtgatgaaggatgtgatagtcatgcccttttggaattctgagaagaccattgcagctttgcaagtattcctgacaatcagcttatgcgaaagcaagggcctgtcatgtgtgattacaaacttcagactatcagtagcttccagctgggtaatgaaagggcgaggatgatgcacaaggtctcccgtaataaaagggcctagttgagcctcctggggcacatgtacagtatgtcttctgattcctgtaagggcccgtttgtttcgttggaattgaattccattttaataattataatttagacaaaactaattaagtttatatatttatatatgtaatatatttgtatcttaccctaaatcttataagagagatagtt

SEQ ID NO: 59755 - DNA, 307 bp, Zea mays
  unsure (1)..(307): unsure at all n locations
  Clone ID: MRT4577_154496C.1
ttttttnnnnnnnnnnnnnnnnnnnngacctatttgatatatcgctaaaatctgaattcacaaatatctgcgaaattctttaaagaaataaaaaaagaatcttcttctccatccctataccctatctaccaccgccctctacccctaatttttctccagccgccgcgctcctgatccttatctctgcgcgctctgtatcggcgcccgccgggaggcggatcccgcccgcctcgattatgttgtgggtccggaatatccgccggttcgagaacacgggcgccggcctcggatccgaggccatcatggg

SEQ ID NO: 59756 - DNA, 511 bp, Zea mays
  unsure (1)..(511): unsure at all n locations
  Clone ID: MRT4577_154497C.1
aactggcctggactcgcacgcgtctcagctcaatacagggagaacgaactcgtatcttttgttgtttntcttgtgtggttcggaacccaagaangtggacatgatagttaaccgagcaanatccacatagttcgaactcaaatcgatagcatggaggtctaccaaacattttagngaacagcacacactgatacaaagactaggatacggaacacatttctattggccaagaggactggaacatgcgcgaccagtgccacaaagcctcatgcaacggcagctatatatgatctgtaaatgactagtgcaggtagtggatataatattttaggcatctaagacggttcaaccagtacatattctgggcaatcgagctctccattgtctgctattcaggagcatgtgttacaaactcgaccatcggaactggtgaatgaatagtatcctgcgcaaaatgagtgcttgcctgacggatctgtaagcacagatcaaactggaacggcatacattc

SEQ ID NO: 59757 - DNA, 296 bp, Zea mays
  Clone ID: MRT4577_154498C.1
aagaaaacaggaccggccccacgggcaggaaacataaaccctggcccgggttttacaatttggcccatatccgggaatacaaacctttgggagcccaaattgtttaaaaagaactaggctaagaaatggactaagggagggactaaactgaccaaattgggattctccaaaactatagggtcctagaaacttggcgctataattggccattaagccattaagggttgggtttgcttttgaacttaccctggggtttcagggcaacctccaccacagggagggtggctttgctcccc

SEQ ID NO: 59758 - DNA, 363 bp, Zea mays
  Clone ID: MRT4577_154499C.1
atggccagcggcgatgcgggaagatggcccctcggccagcaagaggaccctcattaccggcgacacctgcagctagggcgtgcggtggtggacgagctggcggcgctgggggcggccgtgcatacctgctccaggaacgaggccgagctgggcgagcgcctcagggagtgggagggcagggggttccgcgtcaccggctcagtccgcgacgtctccgtccgggaccagccggaacgcatgctccgcgaggtcgccagcctctacggtggcaagctcgacatccttgtaaaacacttcacagcttctcttcccccatcttcaattcaactccttgcttcccctcctaggtgtggccatgattga

SEQ ID NO: 59759 - DNA, 191 bp, Zea mays
  Clone ID: MRT4577_15449C.1
cctattttgagttaaagtattttgggcccttcaatctgctctacgtttgtggatccaaactaacccgaaaaggaggaacagtgcaggcacaacagggacaaatacgggtactgctgctctctgtagactcttctttagcggactgggcaccacaacagatgtctgtttcagcgactgatccacaccacttt

SEQ ID NO: 59760 - DNA, 960 bp, Zea mays
  Clone ID: MRT4577_1544C.1
tttttctttattttagctcagcacaaattattcactaaactaaacacagactgttgaaaacgtatgctgttgatacaaagctcccaagtccgatgtacatcacatgtaaaacatcctcagttccacaagctactactctatgtaccttgtaaaaataccactccgatcaccaatcacatcccatatttccatctcggtgaaacaagagtacttttgatgaagttttctgagacctaaagacctgatctatatgtaaaaaaggaagcacaaaatttcctatcgagcacaatgatgaagttttgattaattgtggtccaacttcgtatgtggataagccaatcctagagcacgtctcatgcttaatactgctggagaaaatggacttcgtactctagaaagcagtcagcaacctttacaaacttaaccacttgcaaagttgctgtcccgttgatccactattgctcaggagtcagcacccactgttcctcactattgtttccattcacaaggacagcaccatcagttgaatcctcagcctcaacctcaacagcttcatcctgactttcttctactccatcatcctctgcatcaacctcaacagcatcttcttgactctcttctactccaccatcttcaataacctcgtgaacatactcttcattatcatctggcaccatctcttcctgtacatgcatgtttttaaaagcttccactaaattctcatttgacctttcagcatgaatcatgtactcctcagccggtggatagataacccttttcggagcaacagcagcttctacattcagagcaatctgccagtcttcaaataagtttgggtactcccggccgcagccagggctttgggtcaataggattggttacttgtattataggctctagtatgacagaaaatgttctatggtatatgagtattaattacttggaatagcatttcaccgc

SEQ ID NO: 59761 - DNA, 349 bp, Zea mays
  Clone ID: MRT4577_154500C.1
ccacgaaaaccctaaaccctcgctacccggcggcggctacaagctcttcgtcggctgagcgccatgaggccaccggctagaggtaaaaaaccacgacactatccttgttttccatccatttccgcagtctgatgaagacttgctgcttcgttaaatcctgtaggaggacgtggtgggaggggaggcaggttccatggcggcggccgtgggggcggcggcggcggccgtgggtttggcggtggtagacgcggcagaggggacatgggagggagaggtggcacgacccccagaggcggccgtggcggtcgtggcaggggtggccgcggccgtggcatgaacggcgggagca

SEQ ID NO: 59762 - DNA, 228 bp, Zea mays
  Clone ID: MRT4577_154501C.1
tctaaaagcacgaccaccacgatacataacgtgactgctattaaaagagcagccgtcctgaggataacgcatgtggtggcaacataccatacttggatgtgtacaagaagcgtactctctgaaaagactgaagatatgctgattatcaacactggtgaattgaaacgaatacagtagcagacacgtctggatatctggtccaatcacaagagaagactgtatgtacaa

SEQ ID NO: 59763 - DNA, 189 bp, Zea mays
  unsure (1)..(189): unsure at all n locations
  Clone ID: MRT4577_154502C.1
gccgcgtacgacgatggcagcctcgctgccaagccgtggccaccctgatgcagtcggccaagatcggtggccgggcgccctttgcctcgctgctcgtaccgcccgtggtcctaatcgatctgagggcgttcgatgctccggtgggccgcggcgctcgcggncctgctcgccgncnccgggggggggggg

SEQ ID NO: 59764 - DNA, 810 bp, Zea mays
  unsure (1)..(810): unsure at all n locations
  Clone ID: MRT4577_154503C.1
ccgggaggtgggtttaaaccctagccctcatgaaagaatggcgagagccactgattgaagccatttaaccagtagaacatcactgttaattgttttcaatattgaatataaattgtatatatgtatatacgagttttgtaaagtaaaataaaataaaaatcgtaccgcgtcggatcagcactacgggccgaggctacggcccaaccacgacacgacgatcgtgtcgggctggcccagacactattaaatgggtcgtgccccagaccagcccgccagatacggccagtttgaccatctatacctccgcacgataatgatggtcctcgcctcagttgtcgccaccttgttcatcatcctgcttcttttctctttcccctcatgcctccgcctccacgccacccattctcagagagggcatgggagcaggtgcctcctcccgtattcgtccgacaccagccccgacatcgacccgtgcagtggctattacacgtccacgagggtgtttcacagtatgcacgcaccaacgcaccatcgtttttgcactcgttggacgtcacgttcgtcttcccggccttcgccctgtttttcctccccaacctgctgcacatgcccacggtcacagccacgagccgaccgacgctcgttcatgcggatacgangcgagtcggtcttgctcctggcttttcttcgttcgtgtcgccgaggacatgatgacgcctgtcacgcttaggttatcttggcgatgacaagtccagatatgagatattggacaaccaaggcccgtagcgcggcagcagttggcatatgcta

SEQ ID NO: 59765 - DNA, 707 bp, Zea mays
  Clone ID: MRT4577_154504C.1
ccggccgggatgcttatgcgtagacagattcgcacacgacgcacgaaaccagtgaacgtaggagggtgggtcttctcttcccccttcgcttcctcgtgcagctccgaccacgggctcgtccctgcctcggacgtcgctgcacggttacctccccatcggagctactgacctggggaagcgttcgtcgtcggagcatgctgatgaaaacaggagtggcgctgcaattggggaggaattgtcgcagggtgagcgggagtccttagtggagcagaatggtcagggtggcgacgtgaattcaagccaaacgtctgcagcttcaggaaagatggatgacaacgagccggatccagcttcttccagtgataccacaacgattccggacgaggatacatctaatgaatctcaaaaggctgagcaagataattgtgatctatatcgtggagagtgggttactgattcttctgggccactatacacaaacaactcctgccctatcatcacacagatgcagaattgccagggaaatgggcgaccggacaaggactatgaaaattggagatggaagccagaacagtgtaacctcccacgcttcgatgcaaggaagttcttggagttgatgagaggcaagacacttgcgttcgttggggattcagttgctcggaatcagatggagtccctcctttgcattctgtggcaagtagatgtcc

SEQ ID NO: 59766 - DNA, 246 bp, Zea mays
  unsure (1)..(246): unsure at all n locations
  Clone ID: MRT4577_154505C.1
tcanannccgcattgtttttacgtttttgtgtcggcaatgcataaaaaggaaaaatatttcctgctttacaacccaacccaagcaacacgacgtttgtacataaaatatagggaaaaaaatcacgatccttatgccattgggcgcacatattttcagatttggaaacctcctatcaaagcgcgctgaatttgtccaaaacaaaccacaacttatgctgcccaaaggagtaaaggatgggcaatttt

SEQ ID NO: 59767 - DNA, 744 bp, Zea mays
  Clone ID: MRT4577_154506C.1
aaaaccagtgaacgtaggagggtgggtcttctcttcccccttcgcttcctcgtgcagctccgaccacggtgagcgtagccacgccgctcccgcttgcccgcttccgatccccgcgccgcccccacaaaattccagatgccgctaggacgggaggattaatctcgtggcccatgagcttaccggggaggaaggccccagcgggggcctccggagcccggcggtggctcgtcaccgtcgtcgtgtcggtgctggcgctggtgctgaccctcgttgtgatatcgctgtcccagggctcgtccctgcctcggacgtcgctgcacggttacctccccatcggagctactgacctggggaagcgttcgtcgtcggagcatgctgatgaaaacaggagtggcgctgcaattggggaggaattgtcgcagggtgagcgggagtccttagtggagcagaatggtcagggtggcgacgtgaattcaagccaaacgtctgcagcttcaggaaagatggatgacaacgagccggatccagcttcttccagtgataccacaacgattccggacgaggatacatctaatgaatctcaaaaggctgagcaagataattgtgatctatatcgtggagagtgggttactgattcttctgggccactatacacaaacaactcctgccctatcatcacacagatgcagaattgcccagggaaatgggcgaccggaccaggactatgaaaattggagatggaag

SEQ ID NO: 59768 - DNA, 2241 bp, Zea mays
  Clone ID: MRT4577_154507C.1
acggccgacgaattgggtgaccgtaggagggtgggtcttctcttcccccttcgcttcctcgtgcagctccgaccacggtgagcgtagccacgccgctcccgcttgcccgcttccgatccccgcgccgcccccacaaaattccaggccggcacgcctcctcgtccacttgtgcaccgtggctaccgtttccctttcctggatctgaatttcgtcccgcgtagcgcagatgccgctaggacgggaggattaatctcgtggcccatgagcttaccggggaggaaggccccagcgggggcctccggagtccggcggtggctcgtcaccgtcgtcgtgtcggtgctggcgctggtgctgaccctcgttgtgatatcgctgtcccagggctcgtccctgcctcggacgtcgctgcacggttacctccccatcggagctactgacctggggaagcgttcgtcgtcggagcatgctgatgaaaacaggagtggcgctgcaattggggaggaattgtcgcagggtgagcgggagtccttagtggagcagaatggtcagggtggcgacgtgaattcaagccaaacgtctgcagcttcaggaaagatggatgacaacgagccggatccagcttcttccagtgataccacaacgattccggacgaggatacatctaatgaatctcaaaaggctgagcaagataattgtgatctatatcgtggagagtgggttactgattcttctgggccactatacacaaacaactcctgccctatcatcacacagatgcagaattgccagggaaatgggcgaccggacaaggactatgaaaattggagatggaagccagaacagtgtaacctcccacgcttcgatgcaaggaagttcttggagttgatgagaggcaagacacttgcgttcgttggggattcagttgctcggaatcagatggagtccctcctttgcattctgtggcaagtagatgtcccacaaaaccgaggcaacaaaaggatgcacaagtggctcttcaaatcaactaaaacaactatcgcccgcgtctggtcttcttggttagtgcacaggtcaactgaagctgtggggattgctcctaagggtattgataaagtttttctggatattcctgatgagaccttcatggagttcctcccaaggtttgatgtactcgtcctttcctctggccactggtttgctaaacgatcagcctatatcctgaacgagaatgttgttggagggcagctttggtggcctcgtaaagcaggaaaaatgcaggtcaacaatgtggatgcctttggtatctctgtcgagacttgcctaactgctgtggtgaataacccaaattttacaggcctagcaattgtgcgcacatggtcacctgatcattatgaaggcggagcatggaacaccggtggatcatgcaccggaaaggtcaagcccttgaatgaagtggtgaggaacggatttaccgatgcgatgcatgaaaagcaggttgcaggcttcaggaaggcagtgaagaatgcaggggaacacggttctaggttgaaattgatggatatcactgaaccctttgccttcagggctgacggtcatcctggcccgtacagaagtcctgacccaaacaagaagacacagagagggccagatggaaaacctccacctcaggattgtttgcactggtgcatgccaggaccagtagacacatggaatgagatgttgctagaaaccattcgaagagagttcgagacagatagaacctgaggatagaaagtgctggctacttcgccatcatgtattcatgttatacattctgcgctgcgaactccatagggatgtatcgctgcacttagtagcatgttgtgtttaccatagataggaaggaacaaagcttcggatacgtaagattcactgtattttctctgacacgattcttggacatcattttcttgccaaattttgtgggcctgaatcccaaaaagtgtcaactgatatttgcattctgtccttgtactagtcaacctggtttggtgtaatagaataaaatgtaacaaccggaaagatgagaattgtttgccaaaaaaaaaaaaaaaaaaaaaaaaaaaaaaaaaaatcaaaaaaaaaaaaagatatcataacagcgggcatgcgaaagaaaaaagctgttttatagggccaatataaatgaaatgaactgcccaactgttcacaagggtaaaaacggggaaaaacccggggtta

SEQ ID NO: 59769 - DNA, 485 bp, Zea mays
  Clone ID: MRT4577_154508C.1
ccgcgctcgcggccgccgctgaattcgcccacaaggacctcttctatgacttcaacgccgttggggcgagggacgttgttgtcgtgcacgtgcctgagggggtcacgcgtggggacgacccaatccacatcatgttcgcctataccaatagcttcgctgagagtatgctgatgtcaaatccaagggttctagttgtggccgagaagtcagcagaggtggccatagtggaggagcattttggggctggagaagaaggtggttgctattgggccaatccagtggcagagattatcatcgacgagggcgcaagagtggttcattcatacgtgcaacatcaatcatttgctgcagcacatactaaatggacagtcgtccagcaggatacaactagtaagtatgagtttgttgaggtcagcactggagcaaaattgaacagacacaatctccatatcgagcaattaggtcctgagacagcgacagcaacg

SEQ ID NO: 59770 - DNA, 737 bp, Zea mays
  Clone ID: MRT4577_154509C.1
gccggccgggcctgggaccaccactgctgacttctgaccattactctttatctactcctgagcgcagaataacccgatctacaacatgagggtgttgctctgtgacctcgctctcctggctctcgctgcaaggggcacctccatcacatacaagcggcggctgcggctgccatccaccgccgccggttcatctaccgcgcgccgagtgcatctgccacctcctgttcacctgccacactcctatgaatctgcataccgccgggccacctgctgccgccggctcacctgacaccgacgtggcatgtggcgccgacggctcatctgccgccgccaccatggcactaccctactctaccgccacggcctcagactcatctcccagaccacaccaatgcccggggcgacagccgaatcaaatcccgcgatagctgcagggaacatgcggcgttggtggcagcccgatcatggggcagtgcgtggagaacctgaggcatcaccgaagtccgacggcgacgacctactgctcttctcatagctggtcgttgaggcagcagtgttgccaccatctcacgtaggaggagccgcagcaccggtaccaggagagcatcttgttggtgctcctatccatcctgcagcagcagccgcaaagtggtcaattcgctcagctgttgacggcgcagatagaacagcaactgatcgctgatgtgcggcctgctgcaaccgactacatgacccta

SEQ ID NO: 59771 - DNA, 439 bp, Zea mays
  unsure (1)..(439): unsure at all n locations
  Clone ID: MRT4577_15450C.1
gatggatcnatctgcagaaactgtgcncnncttagcgnntggtcgcggcgcgagggtacctttatttttttttgttttttttttttttttttttattttttttttttttttttttttttgttttgtttttatgtattttatgtattgtggaatttagcaaaatgatagttttgaaggattttatgggtagccgcccgcaaaaaccgtgggggggggggaaaaactctttttttttaaaaaaggggcccccccaaagggggcagggggggaaaaacccgggagccccccccaaaaaaggggggggaaaggcccaaaagggcccactgcaaaaagggggccaaaaaaaagaacaacggccaaggaaaaaggacccacacggggggggggaaaaaaggggaaaggcgccccaaaagagagcgggggaaagggccccccaccc

SEQ ID NO: 59772 - DNA, 483 bp, Zea mays
  Clone ID: MRT4577_154510C.1
ctacatccgtcgagacgacgcctgctcctctcctatcgataccatgagccgtttatctgatctgcagaccatcaacagcctttgttccctcaacgctcatctgactagcacaacctatgcgtctagtgactgcattactatagatgacattagagtatccgccgcgacgccgacgatagactggcgcatcaattgactaatgccagccgctggtacgagaccgtttatgaaggtcgagcccatagattccctgctcaagctgctgctcgaaatccgcctgccgaatcaggtcctgcagcatctgctcactgcgcgatgatgctgaagatgatgagtacctcgatctttatggggatcaaactgtagaggactttaaagcacctgatgagcatgaacgacctgccgacgcctcttcttgacagaaagaatgtgaagcatcctccgctcttatggatggcagaccatgggacgacgagactgata

SEQ ID NO: 59773 - DNA, 1042 bp, Zea mays
  unsure (1)..(1042): unsure at all n locations
  Clone ID: MRT4577_154511C.1
taccgtgccctctggaactgactgtcatttgtttttttcatccctagtaattctctctgttttcgtttattggccccatgccgcgcgttctgtactgtatggtgtaacgctgagtcgctgacgctgtcgattgatcgcagaagaagcgcagcggcggcggagggcagcagcagaagccggcggcggaggcatcggcgaccgcggaggagggcgaggagcaggcgggcgacgcgcccccagcggcggagggcaacaaggacagggagcacgagaaggggaaggacaaggaccaggaggagaaggggagcaaggggaaggacaaggacgacaagaagccgccgccgcagccgcccgtggtgacggcggtgctcaaggtggacatgcactgcgacggctgcgccaagcgcatccgcggctccgtccgccgctacccaggcaagcaacgcaacgcaatgaaagccccatgtcccttgcctgtctatgtgtctctctggcggcgcgccatcttgtgatgtccagcagacacagacagacaggaggctctggtgacgccaactgatggccgatggctgcgctcgttcgttggcttgacaggcgtggagggcgtggcgatggacgtggacaagggcaccatgacggtggtgggccgcctcgacgccaagaagctgcgggaccgcgtcgccgacaagaccaagaagaaggtcgacctcgtcctcggcggcggcggtgggaacagcagcaacaacaagggcggcggcggaaacaacaacaagcagggaggcgggaaccagcacaagggcgggcacgaagaggacggcaagcagtcggacaaagagcacggaggcggcgagcaggagggcaaggagaaggacaagggcgatcgccaggagggggaggaggggacgaaggggaaggacaacaacaagggcggcagtggtggaggtgggaaggggaagggcggcggcggaggaggaggaggaggaggaggaggaaaggacaacaagaagcccgggcggtgcgtactacactccctnttatcagc

SEQ ID NO: 59774 - DNA, 476 bp, Zea mays
  Clone ID: MRT4577_154512C.1
gggggggttttttttttattaaaaccaatctatgtagggaaaatttcccacattcaaccataggcaaactacacacaccctatcaccatattaaagggcacccatcccaccacctattactacatttactaacaacatacataacaatgtctccgtggtgggcgggggcgtaaaaatcttctacctaaattttaatttacttcctgtgaaaggcaaaaactttccagatcctaactacgcttaaccggaaaccaactactcttactccccatcatttttctgctttaaccaccgtcacacctccacttctttccgaaaaaaagatctcaaactaccctagtcacaaagcacaccagcgccagtactggcacgaagaatcttaccaccaacacccttaaacatagacttggtgccttccttcttaaagatctcctggaatgcgtgcaattagctcttatacttcacagcctcaccag

SEQ ID NO: 59775 - DNA, 301 bp, Zea mays
  unsure (1)..(301): unsure at all n locations
  Clone ID: MRT4577_154513C.1
aagtgggccgccgagatccgcgaccccgtcaagggcgtccgcgtctggctcggcaccttcccctccgccgaggccgccgcgctcgcctacgacgaagccgcgcgcgccatccgcgggcccagggccaagctcaacttctcctcctcctctgccgtcgccgccgcggccccgggagcgcgcaagcgcggncgcgccgcgccccccgctgccaagccagcgccggtcatcaccctcgtcgacgatgaggaggagcacgcgacgagccttcgtcaagcacgaggacgaggcgagcgagggctcc

SEQ ID NO: 59776 - DNA, 344 bp, Zea mays
  Clone ID: MRT4577_154514C.1
gaaccaaaagggcccaaaaaaaggtcctagccaaattattctaaaaaagttccgcagtcagaaaacccattgcagttttaagggaccagggtttaaacacgtttgggaaagtactcagaagccaaaaaattggggaaaaatcccgctttttagaccatttaaattgccgcaccaggattgctgaaaacccccggaaaatcacccttaattgggccaatgaaaaaaatttcgggagcatcgaaacgggtaccaaaaatcttaagggggacctaaccctcttttggaattttcaccgttccatcagaagttgggaatttgggcaaatccccggatgggaaccccaa

SEQ ID NO: 59777 - DNA, 350 bp, Zea mays
  Clone ID: MRT4577_154515C.1
tgagcaaaggttgcaggagtcctaacagtggacaggcgtgcatacattctcgagtgtctgtatgtcgtgtttaaaaatattatacaatggctcctgttacccacttgagattgcgcgctagtcaaggcttacgccaacttatggaatcccggcaccgagtcgggtaggtccacttgaaagcagccttctgcctctcctccggcgcctggctggtgtagttcttccagtccgcggcaaaggccttgaggtcgtgcaccttggtgtccagcccaacgcagcagtcggcgtggatggtgcagaccttctcggggtcgtcgtggtactcgcagatccctccatagtacaccgtg

SEQ ID NO: 59778 - DNA, 564 bp, Zea mays
  Clone ID: MRT4577_154516C.1
atgacggaaggaggtgtacctgcagagcacgccgacgaggaggagaaggaggtgtacctgcagaacacagccacggccgacgaggaggaggactgcagagcacgccggggccggagtccgagcgcggctcggccaccgcgttgtcccacagtagtccagaagcccctagccccatgcaccgatgcgcgtcctgccacgtgtgtgaagtgcccggagtggtgcgcattttgcttagagaccgatggttgtggtctgttctctttggtccttgtaaccttgtttgatgttatagttggtcgttgggcgagacgaagaaagctagatctgacctctaggcgtgagctgactgcatgcgctcgcggctgctcgcgggccccagctgtcatagactgcatgcggagtgcaaatacggagtctgctggaaacggggacggatacggagaggagagagaaactgttggccgtgctaaatacggatacagagagggagtctgctggagttggtctaagagaggcgcggagcagagagcaacgacctactcgaggttgcagaagccctcatag

SEQ ID NO: 59779 - DNA, 1746 bp, Zea mays
  Clone ID: MRT4577_154517C.1
tcatcacgtatacattgagaacctctcattgagtgaacttcttgatggcacctacaagtattccagcttaggaagagataaaggaaagaaggtattgcgcacgaaagaggaactcctagtctctgttagaaaagctttttctatgctttctgacatggactattgccacggaaaggtgcagtttatcattctgggtccgaaacctcctcctgcatgcacctctagctgtgatatcaaggagcaatgttgtgacaagccatcccccttggttaaggactcgtcacaaatcaatgtctgtgatactgcactttgtcatccaaaagatatcttaagccgattaacacttcctcatcaacaagatctggactctcttttaacacctggaagtgagagcacagctgcagttaagccagttcgtggagctagtttaccaccatttccttggtcacactcacaggctgggggctgtcgacaaagtgttgactgtggtaaacatgggtcaagtagaagttactcccagtggcaatgggtgcgggttggatccaacctcacttctctagattatgaagatacgtctgtccatagaattgatcatctccttcaagagatggatgcagcaaaattatgtagaatggattcatgtgatgggcaatataatttgtgtggcacggaatcaacatctggatcacttgcacaaaacattcaatccagaaaaaatgggggtgagcatggttctcagcaactgcaaaccctggatcgtgttgactctttagatggcttccagaagcatgacagtgaacattctcttttaaaaacttctcaagtatcgccaaagatacagcacgccgctgaaatcttatgtgatatgagaagaagcactgaatcgttgagtggccagggatacagcaatgggataattaagtggccaaaatcaccacccgaaaaggtgatgaaagcacggaagccctcatcccagtttggtataactgagagctcatcaggttctcgtaacaacgatgcaacttggaatggtagcagtcactctaccaagaaaatttgtgacaggaagaatgattctgcatgcttgaataaccctggtaaggaaactataaggtggcctgtgcctgtggaaggtggcgcttctcctgtcaggtcgtccgagcgcggtcctatgctcgatatgaggcagccccatggaaatggtggaaggcatcctgttcaggtgccatcacaggtggcacggcttgaaaaggagtatgagaaccagcagaagttgaggaaagcaacactgacctcgtctctagggtctccgggagattggagtagggagaggaacaggagggtgtgaagtctgtacattattcatgtcaaaaatcataggctacggtatatcgtctgggggggaacagcggaaccaggcaactgtttcataagaggtctcagaacatttgggagatgtgataatttaggtggcgggtgatgtatctattgggccatttgttgttggggaaaccgttgtaactagtgtaaatttcgttttttattaccatcatatatcacaggtctcgtctcactatagtccgttgtgtattactagtatgtgtcgaagacctcaatagtttacgcgctaccatattttgatggttgcaacttaatctcagttttgcttgtcgtctgtcttgttaaatcgtcacccgagtcttcgttttctttatataaaaaaattactacatagtcatgtgaact

SEQ ID NO: 59780 - DNA, 519 bp, Zea mays
  Clone ID: MRT4577_154518C.1
cgtatttatttttgctcaccagggtccctggctatcgagagaactcgacgagttcatctccatcgtttgtgagagtttcggttgggccagattgtcatactcagcgtcctgcctcggtctcaggcccaagtgtactgaaagccagctcttgcccgcatctacacggccccattttcagcttgcccctccagaaccggtgcatgaacagttgcatctgatcctaagtcgttgcttcctttcccttctttcttagatctagctagccaccgtgtcgactggtggatgatacagtatctccacatgctggttgttgagtgttgaccgtacctcgccagatctgcagcaaactatcctatcctagctcctcacatccgcacaaaacaacaccttttagcaaaaaaagtttttttttaaaagagtgcggtagtgcattatagtcatctttcatgtttccagcctccttacttaccaggctttgccgtttagcatttagaaccccaccctgttagaatggaacct

SEQ ID NO: 59781 - DNA, 301 bp, Zea mays
  unsure (1)..(301): unsure at all n locations
  Clone ID: MRT4577_154519C.1
ctttagtaagacgacacacattatcatgtgtggtatgaccaataatatatgcatggtcataataaagttttggttttaatgaatctaccggccgcttgatgtcnnnnaaaaaaacannaatnaaaaataaaaaaaaaacataaagcgtggggcggctccgccctangggcgccttttgccgttttccttcacagtgggggccgctccggcctgcgtgtcgcggtcccctttcggctcttgtgtgtcgttttcctgtccctggccgtcgctttcccccgtgggactggcttncccctcccgt

SEQ ID NO: 59782 - DNA, 501 bp, Zea mays
  Clone ID: MRT4577_15451C.1
ggcttggaacctttgggctgatttatgtgcttgtttatgtgcttgtaagactagtagagttgatgctaagcatttgtagcggcctcgtttcgagtcttggtggccgacgtttaagtcttctgaattgaatttaaataataggactatgactgagaagtcggctgagtattttcggcctaagaaggggcataggttggttgctacgtcggtatagttgtatggtcttagtagttctaaggacgcttaggctgttcctagtaatgttgattataaggatagtagtattaaggcggaatagttggtggatagtcttccgaagttggtgagttcgaatgtgcctgatactactctttatcttagagggcctgattcgctaagttcgcctgaggcggattaagagtagaaggttagtaatctgtggcctacgatttagaaattggtgctggtgacagcgctaaagtcggagtagactgtcgagatagagtgtcctacggcgaagaa

SEQ ID NO: 59783 - DNA, 207 bp, Zea mays
  unsure (1)..(207): unsure at all n locations
  Clone ID: MRT4577_154520C.1
aacttgggngtcgaacacatgtgcgttcacaatgcctggcctgtaccgggttgttctctgcttagatgttnccttatgagggtcttctatctggcgacttgttcctgttgtttctcttcacgtacatggtgcttggtaacctcgtcctgtggtacgctgtgtgcttgcttgggcctcctcgttcggtgcccgcggccgttggggggg

SEQ ID NO: 59784 - DNA, 274 bp, Zea mays
  Clone ID: MRT4577_154521C.1
gggttcgggttcttttgtgagcggatcgagatggcggcgcctgatgttgagtaccgttgcattgtaggcggcctcgcctgggccacggacgagcactcaagctataatgccttttgcagctacagtgtggaacttgcaatcaagagcatactagatcgctggacgcaatgggaccgctaatgcagctcattgaacctcgtcacggaggaggcgactgggctcatcatggaggtcatgaacggccaggggctggtatgccgcaacattagcgcca

SEQ ID NO: 59785 - DNA, 351 bp, Zea mays
  Clone ID: MRT4577_154522C.1
atggcagctggagcactggagcaggggataggaattgttcatcgctttgctactgtaaacaagaagggacagggaaagatgcgcgcgttgcaagacctgcttttcagtccatacatgagcttggcttcagacaaagatggcatgatttggtttcgatcacctgggcaaaaacaacatatctggtgctgtaaaatggacaacctaggaaaccaatacaacaccgatggaggtctatgtcaaggtgatcctctgtcgctcatgcatgctattcatattggcaatggcaatggcaatggatcccctacagcagacagtgtacaaggcaacagagagaagagagaggactgctaa

SEQ ID NO: 59786 - DNA, 551 bp, Zea mays
  Clone ID: MRT4577_154523C.1
cacgcatccacaccggtcaccgtcgtcgtctcctctccacagctgacagctccggtccgtccggccggcgcgcgcgggtgatgcagatgcaaccagagaccagtaggctagctagctgcctagctcgctcgctagccgagcagtagtagagtatctgggcgatcgactgggacgacggtcgactgggacgccaccattaatcagtaatggccgccgggtgcaactgcaaggcggccatcgggtgcgtggacgcgcgcgcgccggtgcgggccagctatgtgagcctgtacaagtggcccgagtccgacgccgagttcgtcaggtcggtggccatggcgcggcgccagggaggaggaggaggagggcaggagagccccggcggcggcgccagcgcgccgtcgtactcgtaccaccactactactacaacggcagcggcagcatgcggagtaataacagcggcgagctggctggggtgatctcgctctcccgggagggggacagctactcgtgccgtcaggcgtacctccgaagctacaccttctccaggcgg

SEQ ID NO: 59787 - DNA, 278 bp, Zea mays
  Clone ID: MRT4577_154524C.1
ggcgccgaaattttttgggtttaaaatggctggctgcccccgagctcaaaacaatgtgattattaattttgatccaaattttttaacccttatcccctgggggggtccaaaaaaattcatttcgggcaccgggtggaacaaatttgatccaagggggaaacaatgcggggcacaaaaaacgtttttatgccttcatttgacaattttttgtacaaaccccgcccttggacccccttttttcaaccacggtttaacgctttgcgcggtttttctccaac

SEQ ID NO: 59788 - DNA, 556 bp, Zea mays
  unsure (1)..(556): unsure at all n locations
  Clone ID: MRT4577_154525C.1
gtcgcctccgccttctccttcctgcccttccgcccgctcctcccctcgccctcgtcgcccgggggcggcgccgagtcggcgggatgctgcttcctcttcgtccccttccccatcgcaggcgggggctgctgcagtcggcgcagcgagggtttaagcggcggcggcggcggctagggttaagggatagcagcgagaacgctgtgagcggcgggaacgttgacagctgaaactgtgagggcgcgccatcggtggtgagaacgggctggcagatatgttattaggtgtgcatttgtgctttgaaaaaaaaatagctctcagttttacagtggtttcgaccaaagagaaatttttttcgtctttaattttcatttatcgggagtgaccagctgcatcgacctaagagaatccaccagccacgctgattaaaacaagtgaagccccgccctgcgccatgaccaggagctgtaatattccctttagagcacgcaaccagagatgcgggctgaagcctgatactacgaccaaacccantcagcagtaacacgcgcaacacaac

SEQ ID NO: 59789 - DNA, 1327 bp, Zea mays
  Clone ID: MRT4577_154526C.1
cctcgaggccggccgggccgggtaccgaaaacgcatccttttacaccaacttttgctttgacccgtcccaccctcgcacaccctttgtctcctttgcacttcgcctcgccgcctgaatctccataagcccccacaccaatcactggagggcggaggaatcgctctcagtacccccccagtagccgcccacaggtactaagcagctccggtccgcgtcgcgccgtcgccatggctcagtcatgtgagtcttctacagactaggacttggggattgtgctgctactcagctgaaagtttatagaaggtggagaagctgtggtgtttccctacctgttagtctgcacttctttgttcctgatcaactgctccgacacgattgttgtcttctcaacctctcttgccaagcatggctgggcaaacggcaaaggcaaaggaagcagaaaaagatgacagacaagaacccggagctgagggggcgaaagacaagctactgccgtctcaccagcagcaagagtctccagcttctgtggcggacaatgattcttcaggtgtctcttcagttcctggtgatgagtcgcctgtccttgatggggattctggtgagttgaaagtggaggaaaacttggatggtaatgggagtaaggaaaagaaaacgtctcagaagagcagtactagtgacggctttgcttctgctaaagtgagtgatgggacaagtagtttgaggaagaccagtggtagtgcgacgatgagtacacgggcggatttcactgagagtgggaagagtagcatgtgccgtgtgagcacggccagtgacattagcgacgagagctcgtgcagcagcatgagcagtgccaccacaaagccacacaaggggaatgattcaaggtgggaggcgatccatgttgtgaagtccagggataatgttcttggactgaatcatttaggctgcttaagaagttgggttctggtgatataggaagtgtgtatctctctgaactgagtggtacacggagttactttgcaatgaaggtaatggataagacttctttggcgagtcggaagaagctgcttcgagctcagaccgagcgggagatcctacagtccctggaccatccatttctaccaaccctgtacactcattttgagacagacaagttttcatgcttagttatggaattctgccctggaggtgaccttcatactcttcgtcaaaggcaacctggaaaatatttctcagagcaagcagcaaagttctatgtagcagaggtactccttgcattggaatacctgcatatgcttgggattatataccgtgatcttaaaccag

SEQ ID NO: 59790 - DNA, 620 bp, Zea mays
  Clone ID: MRT4577_154527C.1
cccacgcgtccgaaaacgaactaggcttggagccctgcgactgcgatcaaccgtggaaccgagggagtcgtgtctgtgcgagtgtgccatggccggcgaggggtcaaagtcagaccctgcctgccttcccggtgccgccggcgtctaagcggagaaagatcgagccccccacgaggtttcggtgggtcgatctccacaaaagctatagaggcaaagagatatcctccggccttcaagcgcatcgtgagggagatgccttgacaagctacaaaagctttggttccctctttgggaagaatcaccttgttcctgtgatcccaacgaacgactgacgaacaatgctgtgaataccgaccaggatgacccttgcagtttcctttaagagcgcgacctgataccgcatactaagctatggacattaacattacattgatcttaaagtgacagcactaagttactgtcagctcataagtcaagtaattactaccaacctgtacgtatgccgaccccaactagcaggatctcgacagcgacgaaaggtacagattttcctgcacatttgcagatctaagatctaagcggagataaaactttgcatggtggccagcatatgttggtgt

SEQ ID NO: 59791 - DNA, 185 bp, Zea mays
  unsure (1)..(185): unsure at all n locations
  Clone ID: MRT4577_154528C.1
ggatgaaaacaaaaaaaaggggagagaaaacccaatctccgtacacaatacccttttatatccaaacaagacggaagggaaatgaagctcattccaatccaagggggggggggtangcctnngggttggcaaaaaggaaagcctcggcacccttgaagaagggggggacggactccttggccttg

SEQ ID NO: 59792 - DNA, 338 bp, Zea mays
  Clone ID: MRT4577_154529C.1
ctaaaaccaaaccttattttgaagcatataaccatggcaccaccaaacaaaaaaatgtggggggggggtgcggaggcaaggggacgcggggccgggggcaggcgaagggcggggcgcgacgccgaggcggccggagatgggcggcagggcgcgcgggacgagcggggcgggggccggacatagagggctccgcggagaaactgcaatccgcgttgattggcgggatgacgagctggagcgtgggaatggtgctgaggatgaggcgcctcccctggcagcggagccgcagactaccggagggcctccgtcacagccgccggcacaggacacccatgaat

SEQ ID NO: 59793 - DNA, 848 bp, Zea mays
  unsure (1)..(848): unsure at all n locations
  Clone ID: MRT4577_15452C.1
tcttctattcatcacttgtggaggcagcgaaaccaagtttcaggaaagctgagaaatacagtgaaaatgctctacggagtgtatccgacctacacatcggtgatgacaagcaacctgcctcgaacaaatttgatatggaaaaagtgatgaaagggtttggagctcgtgatgcttctggagcttccaatgcccctaacgtacaagttggtgatcttcctttgaagtcttcagaagtgtgcccttctaagataaaaattccaggaaaaagagctcctttggatctcactttaaagactgctctgcagttcgtttcatcatcttctgtgaagtggtgtcacaatttgagtattgctgggcccatcactcagagttatcgtggtgggtctcaaaattcacgatgcgcaaggcctgggaaggaattcttgttctcaagggcactgcaatcatgggtatatccacagtccctgttacctgcatccatcatatctgctatgctctcatcaactgcacgaggagaaaatgagttccttctcaagaggtatcaggactgggaagactcgtttcagaatctttactacatgctccgcaagaatcaattgaacatcttttatgtttatacagcacaatttgttgctctattcatccgtggaaattgtttggagaagcagccctgtaatgcctacttgtcacaatctacacgtggcatacggtcactactgcgaaaacatggtgttcgcttttctatgcctctttgcaatgctgaagtggagcgggttactgacgatgacctgatggaattttcnaaaatcaaacactcaatctgggccagacacttcatatagatgctt

SEQ ID NO: 59794 - DNA, 246 bp, Zea mays
  unsure (1)..(246): unsure at all n locations
  Clone ID: MRT4577_154530C.1
gttcttgcntgcggattctttcaacttaccctgcttctgtctcggcctgattgttttcatattcccgagattgctcattgacgtcctgtctgtggagcctggttcattttacgccaccggtcttttgtttggggggggggcggccgtctccgtggctgtgagtttngctggtggcgaaacgatcgcttgactcctgacggttgtgcggtctcggtctccgtgccttgcggttcatccgcttaggat

SEQ ID NO: 59795 - DNA, 704 bp, Zea mays
  Clone ID: MRT4577_154531C.1
aattcggcacgaggaaaaactccggaggttcattctcccgccagttcccgcatctctttgaggcttccacctcaccgtcatcggcgcgcccgcatcccgctgccctccgatgacgccatcctacaactctggccccgcaggccccgccgggggtcgtagggcggcgaccttcgccggcgcttgtgtgtttctgtcgcggaatctggttgcccccgaggtgttcgacgccgtgcacgacgcgctccgcctcaacggtgccgaggtcctcctttgcgccgaccctagccgcacgggacccctcgacttccacgtcatctcatcctcctcccacgagagattcgccgatatgcggtccaaaggcttgaatttgctaggaccacagtgcattctttcctgtgctaaagaacgtcgctttctacctaaacaaagttatacgtgttgtcttgcaatggatggggttaaaacactttgttcaggctttgaaaagtctgagaaggttaggattgaagaactagtaacagccatgggaggtcatttgctaactaaacactctatggacgtgaattttgtaatcgtgaaggatgtcttggctgccaaatataaatgggctctgaatactttgaagaagcccattgtcaccatgaagtggttagagcaatgctgaattgagcatcgtgttgtgcctcatgaaccttacaggattc

SEQ ID NO: 59796 - DNA, 488 bp, Zea mays
  Clone ID: MRT4577_154532C.1
gggtttacccacgcgtccgaactaactctccattctcaaaacagcatcgcaatccgctgatttgccctttctgattgtgccgcttgaccagctgggggcctgggccctagaggctgaagacctgcaccctaccatgtgcatgataccgatccctgaaagaacaaaaaacttgacctgcatgctgaagcgcaagaacttacgcgttaccaagcacgaatgactcttttcctcatctaaggctcaatggctgaacgacagaatggaaggaccatatccccatcctggaagtacagcacaggcactcgcatccgcaacctacaacacaacttgctccagatgtaagacctacgcgttgactacactggcgtctagggtcgaagccacccgaggctctaacacactatgcaacggcgagccgtaactaatccacttctaattcaaagatgccatgtttataatatacatgcgatgaggaaaaagatgattca

SEQ ID NO: 59797 - DNA, 309 bp, Zea mays
  Clone ID: MRT4577_154533C.1
cttgtctactggaaaagaccgtatctgctttggccgtgaaaacacctttattagggctcgagaacaactgcctgatgcataatttacgcccgtacattgatgaccatgtgatgcgtctagcgtgtaaaatgtgtccttagcaggcctaagggttgacattctatcaacaagtaccaaaagccggtacggattaaagccaatctagtttaagctgtttagattcaaaaactcacaatatataccgaatacccaaaacatcgcttgtattgtacattgcactggttgcatatgcatacactatattaaagc

SEQ ID NO: 59798 - DNA, 612 bp, Zea mays
  Clone ID: MRT4577_154534C.1
attaacattatccattcatatatttattccatgataaacatattaacattatcagaatttatattacattgataccttcgggttgtttgaaggtgatgatgtgagagcaattacaatccagcgtgaacaatacaagggtactgttcatctatttgtaggcaactgtaagggttcgtacgctattacatttatgtcctcaataattacatacagagcttacaagatgtcacaagggcaacatcgtcatttgtatttaataacttgagcaacaccttctccttgcattgtctcattgtttcgtcgtgacgaagcctgcttgacaaagcgtgctttgttgtacttcgttttcgttgtgccgaagccacgttgtcaacccatttcaccatgacaaagtctgttggacgaagcttgtttcgctcctcttgtgttataccgaagcttttatggtgacgaagctccttataatgttcagcacaggtatactttgtcccggtgaagaggttctagatccctctatcaaataccatttaaatggttcctccacttgatcaagtgaagaaggggcctccttcaaacaccacttcttttaggggtctcaaggcttgcgccaaa

SEQ ID NO: 59799 - DNA, 1562 bp, Zea mays
  Clone ID: MRT4577_154535C.1
cctcgaggccggccgggacacatcacatcctatgtactcggctgctacgtagctatatatagctgcagaacagttttagttatcggactgtaggcacaccaagctaggtatataacctagctctagtctagaataaaacatctatctatctttatctatctatctatctatttgttgaacaggggcccccccggaaactagctagctaggatgccaacagcagaggcgacgacgcccgtgccgccggagctgtcctccgggcaagggcggacggtttgcgtgaccggagctggagggttcattgcctcctggctcgtcaagcgcctcctggagaagggctacacagtccgcggcacggtcaggaaccctgtggatccaaagaacgaccacctgagggcccttgacggcgccgtcgaccgtctcgtcctcctccgcgccgacctgctggacccacagagccttgccgaggccttctccggctgtgacggcgtcttccacgccgcctccccggtcaccgatgaccctgagatgatgatcgagccagcgatccggggcacgcgctacgtgatggcggcggcggcagacgccggagtgaagcgcgtcgtgttcacgtcctccatcggcaccgtgtacatgaacccctaccgtgaccccagcaagcctgtggacgacacctgctggagcgacctcgagtattgacgcgtccggcagaactggtactgctacgccaagacggtggcggagcagggcgcgtgggaggtggcgcggaagcgagggctggacctggtggtggtgaacccggtgctggtgctgggcccgctgctgcagccgacggtgaacgccagcacggaccacgtgatgaagtacctgacggggtcggccacgacctacgtgaacgcggcgcaggcgtacgtgcacgtcagggacgtggccgaggcgcacgtccgggtgtacgaggcgccccacgcgcacggccgctacatctgcgccgagagcaccctgcaccgcggcgacctctgccgcgtcctcgccaagctcttcccggagtaccccgtacccaccaagtgcaaggaccaggttaaccctccggtggtaggatacaagttcaccaaccagaggctcaaggatctggggatggacttcgtgccggtcctgcagtgcctctacgagacggtcaccagcctccaggagaaaggcatgctgcccgtgcttccgacaaaacaagaccatgaccaactcggcaaatcatgatcatattcatatccctcgttgacgatactagctgctgctaccacgcatatcatatcatatatataagatatatatatatatagtggattcatatagttaaccttatatatatgtgtgtgtgtgtgtgttattgtgtgttattagtgtgtacaattaaatggcaactctaatgggtgcatgcatctgcatgcatgctttcctgacaagtgccacacatgcatgcaatgtatctctttggacgatttatatacaatactccgttgccaaataaaaaaaaaaaaaaaaaaaaaaaaaaaaaaaaaaaaaaaaaa

SEQ ID NO: 59800 - DNA, 434 bp, Zea mays
  Clone ID: MRT4577_154536C.1
gccggccgggctgggaccccggtgaggtgccactgccagtttccccgtgtgcgagatgtgctgctgctcggaggcgcgtccactccccggtcgctctctcgttactccgcctgtcgggaatcggtctctatatatatgtggttcgaggtgatctgcagaaacacaccggaaaagatggtgagcgtacacaaagacaacacccttgttctcatgttctgactgctatcgctggggatagcggagtacctcagctccaggagccgaagtaaccccttcctgttcgcaacaaagagctgctggggaggatgactctttgcgaaaagtgggtccgatgacgccaattactttggtgaacccccccgccgacttgatggtcaaatacttcatattgagactgctcgccccagaatgtagtatgtctgctcctccggcga

SEQ ID NO: 59801 - DNA, 295 bp, Zea mays
  Clone ID: MRT4577_154537C.1
atcagagtctacggaagggggcgcagcttcttacagtctagcggacaacgccctgacaggggttatggctctagaggcgtgtacagcctaatgagcaagctcggtcacggactctactgaagcgcatgctaataccgtgtacgtctctacggttttggactcggttacacatgaagactactcgtctgtaggaaatgacaccaagtgctaacctggcttaggcctgactatcttatttatctatcgaatattgttaccgtaggattttgtcacaatgttagtgatcattctacct

SEQ ID NO: 59802 - DNA, 515 bp, Zea mays
  Clone ID: MRT4577_154538C.1
gcacgagagtgaagcgtccacccaccatcgcacggcgatccatgcccgcgtgggcgcgtcgtccattctattccactccccccttccctccctcctgcgcgcgcaagcagcggcccagcatgccggccggccgctcgtcgtacctagcgactatgggcagccggagcttctcctaccacaggctcaagaagctccccgtcgccgctccctctcctcctcccgccacgacggcccccgctagccgcggcctagagcatgaaggcgacccgcggcgcgccgccgccgccatcgaggactcgtaccggtcctactaccgcgcgctggtggcgaggggtaggcggcagcggtggcgggacggcggcggaaggcagcggcctcggcctcggcctcggcggcgcctgagggcctggggagccctggcgcgcgcgctacggcggagggcggcggccgccggggccctggtgcgcgcgtcggtcgccagggtggcgcggcggctcagggagggccggccctac

SEQ ID NO: 59803 - DNA, 534 bp, Zea mays
  Clone ID: MRT4577_154539C.1
gcctaaattaatatcattagaattactattattagaatgaaattcgattccatgaatccaaacgaggcgtaacggtaatttccgtttgtaatcatcgcattcaagagcagtcacgcatctcacatatgcgcaccgctctcagagttactgccgccttcgcccaaaaaaaatccctaaaatatggttccaagccaataaaaacacattatctatcgagacgctcaaacatcagtaatcagcataatacgttcttcattggcttggctcaacaagccgattcaggttttgtatactagagggtagaggcgctccatttcattggtttgtacgagtaacaaatctgctgggtcggtcaacatgcaccccgagatacttgtccaggacattctggaatatctgaaaagaaaacaattccttcccgttcagaagcgcatccattgcagcgtactggtcgtcaaacacgctatagaatatcttgtagaactcagactgttcttcttttgttgtttgttgatccatctcatcaaacttcct

SEQ ID NO: 59804 - DNA, 216 bp, Zea mays
  unsure (1)..(216): unsure at all n locations
  Clone ID: MRT4577_15453C.1
caatggattnggtgaagaaatgcaatgcaggaattctaaaaaaaaaaggaatcaaaaataaggaaagaccaaatttttgggaactttttaagaaaagaggttagagtatcatgaaggctttgttacagcctgccaaactggctgccccaaatttgaaggtcacaacggggttgccgggattttccctaaaggaattggtgtgtgttttggaccttg

SEQ ID NO: 59805 - DNA, 394 bp, Zea mays
  Clone ID: MRT4577_154540C.1
ggagatcgtctgttgagaaatcctagcattttgttcctctcactcctctgttggaaggagcaagtgagacagacagagaagcgacgagagcttccaacagagaggctgaggtcaacctcgcaagagtcagacacagtaccaaatactacgctgcagggtcacattctgttgccgcgcgcgttacaatagggacccagcaggtgttggcagccacgctcttgtaccggtcagcatggacgccgccgcgagggaagcgcagcagagtagtggtctggaatggcgggtgacggtgccggagggcgcgtcggtgaccgtggagcacgaggccgggcctgccgcgagggcgttggcgtggctgctggcttgcttcgccaaggcgtggagcagggtcgcc

SEQ ID NO: 59806 - DNA, 352 bp, Zea mays
  Clone ID: MRT4577_154541C.1
tcgggcccactatggctccagtatttgacagccttgcttctctccccaaggttacaacctagtgtctgattcttccagctactccttggttacatcacagccagcttatggtcttcagcacttccaagagctgcaactccctccagcacttcttacctactctttcgctgccagctggagcttatgctcagctctgggcagtgctgatcacaacccttctgtgggggaaaagtgagttagagcatttggctccagttttggaaggcccctaccttacccataattctgaaggctcctgtagatctagaaccctccaatatcatcacctatctggctgcaagggtcataattt

SEQ ID NO: 59807 - DNA, 461 bp, Zea mays
  Clone ID: MRT4577_154542C.1
cgagtacttactcaataaagtcatatttgttttggattaaaaaaaaaaaaaaaaaaaaaaaaaaaaaaaaaaaaaaaaaaaaaaaaaaaaaaaaaaaaaaaaaaaaaaaaaaaaaaaaaaaaatttaaacctaaccaagccggcccctcccacccctgaggggggggggccctttaaaaggggcaaattttagaaagaggccacatcacactgggcgtgccactaaaaccatcgcatctataagggcccccaattttgcccatatcaccaatgtcgccctaacaatataacctggctcaacaatttaaacaacacccgggtattgaaaaaaaccctgtctgttacaaaccttgaatgtgccccccactaaaatccccccttttaaaacaatcccctttaataccagaaaaggccaaaaaccaaaagccccctcccaaaaatgccctcacccaaaaattggc

SEQ ID NO: 59808 - DNA, 260 bp, Zea mays
  Clone ID: MRT4577_154543C.1
agtctagcgcgtggcgtcgactgcggtgtttgactgagcggccgaggagccggttcttcgtcggggcatctcagcggtcctgaggtcgcttagcagcacatattcgttgcgctaggctccgactcggctcggtacacctctctacgcgtgctcgcttgtcacttctcagcacctatactcatcaaagccgacactatgcaagtcactatcgctcttctgacgcatctgtatccgctcttgttcctgtatgatcagtgact

SEQ ID NO: 59809 - DNA, 143 bp, Zea mays
  Clone ID: MRT4577_154544C.1
aagaccaaccagcaacatagaaaggcgtatacaggatcagcaatcaagacaccatgacgaccgagatagttctcgtcctgatgctgcttgctgtagctgcacagcgccgttagcgcgacaatgctctgtcaatgctcacaagc

SEQ ID NO: 59810 - DNA, 442 bp, Zea mays
  Clone ID: MRT4577_154545C.1
gaggctcttccggggcagcaaaaccgcgcccaccgctttcccgttccccaccccgaccgactgctccccctgccccgcaccagcctcaagccctcaaggcctcaaggcatcgccggcgccgcaacttcgctgaggaagcccgcacccctgcccggatccgatggccaacagcaacctcccgcggcggatcatcaaggagactcagcggctgctcagcgagccagggggggggatcagcgcgtcgccctcggaggagaacatgcgctacttcaacgttatgatccttgggccggcgcaggcgccctatgaaggtggagtttttaagcttgaactctgtatacctgaggcctgtccacttccctcccctacaggttaatcatccttccacaccccttcatatacatccttctctactctcgctatcccctcatcccccccccct

SEQ ID NO: 59811 - DNA, 620 bp, Zea mays
  Clone ID: MRT4577_154546C.1
acaatcgtcaaagctatgtgagctcgcttttctgagtgtgaagataagatggatcaccttcaagtcttgaaacttccttcaatggcaaaattcaatgcaggctttactcactgcaaccagagtttcgtaaaggactgcgtgggacctgcaaaagaaagctacgaacgtagaatgtcaaaggtttgcctgttaattctgaatatagttttcatgttagtcatcaaggagtgtaagggtgaaatcatgatttttgagtgtagtatttgtatgtttgggtgttatgcatactttttgcagcctagttcaccacgacaaaccagccttattttatacttattattggttgctgtcatcttacatttcatttcatgtgtctacaactctgcatgatgaaattgggttgcttttgtattggtagcatagtttcccctgtagaatgatagatttgttttggtacctgatggatgagcatatatgctagtaaaagatgcacagacagcatgataataaggaccaatgtttggtgttgaggtaatccatgttgtagttatcctgtgcattgatatcttctatttctactcaagattgtagggctcagggctgcttgcctgctttttctc

SEQ ID NO: 59812 - DNA, 106 bp, Zea mays
  unsure (1)..(106): unsure at all n locations
  Clone ID: MRT4577_154547C.1
gccgcagttancctctggcgccatgtcgcagaacggagcgcccgggatgcaggaggagatcctgcagggctcctgggtagaactgcacttcagcaataattggaac

SEQ ID NO: 59813 - DNA, 441 bp, Zea mays
  Clone ID: MRT4577_154548C.1
tcagcgttcgacagtacacacacactgcccgaactccatttagcgctcattcgtaaatcaagccatactatgtgtctccgaatgagcaacctatcaccttcaggcccaaaaacaagatctgggtcaatgggcaatggcaatgatcaaaaaggctggtgggcagggaggtcctgcgaagaaacaacactgtgcttgcatgcttgaacgaccctttgattactaccgttaacatgacctacatgttgaaggctgacactgtgcacggtacaggggaagcaccatgaggctaaggtgaaagacttcgagaccctactatacagtgagaacgaagttgcctgtgtataggctgtgccgaacctctgagtagatacatatggggacctggttggcccttaatatattgtggaaactacgggcgtcttcactgaccacaaaatggct

SEQ ID NO: 59814 - DNA, 112 bp, Zea mays
  unsure (1)..(112): unsure at all n locations
  Clone ID: MRT4577_154549C.1
acatccnttcanctacaaattgtctcgttggctactggctacattccatctanccggcccgttccacatcaccaggtcacggcgtcnaacacancnncttccctccatccat

SEQ ID NO: 59815 - DNA, 407 bp, Zea mays
  Clone ID: MRT4577_15454C.1
cacgtacaaagaaccaaacagaagtttagataaaatcaacgcatgtgatagtttaggacaaaatagtggggggcaaccaatcagatggttattgcatccaattattactttatatccctctctctaagataaggaggctatgccgaatcaatcacggcggttacaccgtgtagtgctggttgttgatgtcctccaggtccagccctttgagcttcaccaccgattccaccttgcccttgagggtgtgcagctcccgcagcctggcgatctccgcgcgccgccgggcgtcctccgccatctgccccatctccaccgacgccgttttctccccagggtcccggcgctctccagcccatgcagtgtgcgctgatcgtgcgcccatgccgtctgccgggccttcttcccaa

SEQ ID NO: 59816 - DNA, 1030 bp, Zea mays
  unsure (1)..(1030): unsure at all n locations
  Clone ID: MRT4577_154550C.1
ttactgataaagcgatgatggatatgctgagtgcttcttttgccaatagaaggaatgagcataattggtctggcgagcggaaatttgaaagatttgaagagtgctcaggttataggggtacatggtccgcaaaaatggggaagaggccaattctgatggaagatagtcgccgaagcacatattgtgagactcaaccatccaattcaatatatgagctgccggtatcgtcatcctacaatgggacaaagaagcttttagtaccagttggggttcagttacagcagtcctattcccgcagcttggcacgatttgctgcacaacttggtcctgtgtgctgggagattgcatcaaggcgaattgaacgaagccttgctcctggaacaaagtttggtcgcgggtgggtaggagatggcgaaacaccaaactcttttcagccacccgtactagctgcattttcagaaacaacgacaccgcaagaccgtacagcagcttcaggtgagcagccatgcccatctatgagcagccctcctgccaccgaggcctgtgctggcaacgacagaagccatttggcgggatctcagccagatgctacgccatatgcttctaccagcacaacgcagaggatgagttccgaagcattagcaagccagcaatgtggatcactaccacaaatttcgataaaccgagctgaacgtacccttgagatgatgaagggcagccccaataatcttcacggacacccaggcatgcagcaaactgcgaatggtttcaatgctgttccaggaccaatgatgttcccacatgtggctcaactggtggtgaatcagatgcagacacatacggctgattgataacgttgtgtgtgtgtgccggggggcggggggtgtcgcctttgatccgtcgtgcctcaacctgnggctgcaactgtgagcctgttgtgtaattgcttaagtagtcattaggatgatagcgtgcatangatgtgtgggtggatgctgtaacagcggtgaccggtgagttgcgattctga

SEQ ID NO: 59817 - DNA, 1947 bp, Zea mays
  Clone ID: MRT4577_154551C.1
agatgagaggtttcctgcttggtatccagttacacttttcaatgaactatactatcttaatgctggaggaactatatggacagatggattaccaccaattcaaagcttgacagcagttggctggaaaaagttttctcttgacatgttaaatggtgaatctgatgatttcaatgagatggttcgacagaataatactgcttctgatattcttcatcgaatggcatcagtatttgagaggatgcatgcatctattgcatcaaattctgctataggaacaactttgcttcagggtgaagagaacattggccagtttctatacctcgagggcatcgagtattatatgtggaacacatatgatgttcatttttatgcatcattttcactgatcatgttgtttccaaagcttcaactcagcgtccagagagactttgctgctgctgttatgatgcatgatcctgaaaagctgaggatcttgcatgatggaaaatgggctgcaagaaaagttctcggtgctgttcctcatgatcttggattatatgacccatggttcaaggtcaatgcgtacactctctataatacagatcggtggaaagatttgaatccgacgtttgtgctgcaagtttatagagatgtggtggccacaggcgacaagtcctttgctcgagctgtttggccatcagtttatatagcaatggcatatatggagcaatttgataaggataaagatgggatgatagaaaatgaggatttcccagatcaaacatatgacgtgtggtcaatggctggtataagtgcatactgtggtggtctttgggtggctgctcttcaggcagcatcggccttggcacgtgaggttggtgacaaagcttctgaaaagcttttttgggacaaatatgagaaggccaagtttgtctatagcaagctgtggaatggttcttacttcagttatgatgatggcgacaacaaaatgagcacatctatccaagcagatcaattggctggacaatggtatgccaaagcctgtggtctcttcccaattgttgacaaagacaaggcacaaagtgcgctagagaaggtatattctttcaatgtgatgaagttcaagggtggtacaaggggagccatgaatgggatgtggccagatggcactgtggacatgtctgcaatgcaatctagggagatatggccaggggtgacatatgcactagctgcaagcatgattcaggaaggcatggttgagcagggatttaaaacagctgaaggggtctatcatgctgcctggtcaccaggaggacttggatactcattccaaacccctgaagcctggaacaacgacgacgagtacaggtccctgtgctacatgcgcccgctcgccatatgggcaatgcaatgggcactgtcgaagccgaagctccacaacactccacaggcagatataccccaggactcattccccaagaaccagttcgcctacgcgcggatcacaaagctcctgcagctgcctgaagacgaatcgtccaaaagcttcgtccgggtggtgtacgagatcatccggaacaggtttaggtcctgatcgccgcctccgcacgcctgtgcgctgagtgtccgaattcttgatgatacaattcattagtcactgtcattgttgctgttggatcccgcggattcgtatatgaaactggtggtaataaacttgccaagtgcggtagttcgtatataaatgaatttattagtgagtatgcgcatataaattaaggtttgatgtttttttttgttgtcaacaggcgtgtatgtgtttgaacgtggtaaaacatttgaaatatagaacttttcctgagcctagttatttaatatagctttttttttgaaagattgttattcaatatagtgtcatgaatttagttataagaataatgcattaacttcgtggatggaaagttcgttcct

SEQ ID NO: 59818 - DNA, 214 bp, Zea mays
  Clone ID: MRT4577_154552C.1
cgggcgccgcccttttttttttttttttaaacaaaaactctatgcttaatggtcatcttgaaggtcttatatatataaagagggcgactctattgagatgcatgggctctccatcatcgattaaagtatcagaaccttattgtagcatgcatgcatgcatctgccggttctggaagaaggtttttcccctattttctcccctacttcaagcttc

SEQ ID NO: 59819 - DNA, 294 bp, Zea mays
  Clone ID: MRT4577_154553C.1
agattctaaaatggcttcccctccaagaaggggtctcagcaaagtgttagggtcacgaaagccactctaattgcaaaagatgttaatgatccagagctaaacacataagcctacaacacaaaagagttgcacgcaataggatgatatgaagcagtcataggagttgggcatgcgaatgataagatggttttggaagaaactagcatagaccgatactcatgaatcgaaatctgattcgactgttatggagattaacatggctggattaatacaaagaacactcaaccaatgagc

SEQ ID NO: 59820 - DNA, 592 bp, Zea mays
  Clone ID: MRT4577_154554C.1
tgaggcgatgactgatactactaccggcgtcgtctccaacctcttccaggcatggatgaggccatcaccagcagcagcgacagctaactgcaaaatcgccatgcaggagttccaggaagaacaaggcgctgcagcagcagcctcaatagtctgcaaggaacagatggtgacctgcggtgatgttaacaggccgccggcgctggagatggtggtggcgccggtgatgggtgcgagcactgccaccttctcgctgctcgaggactggctgctcgatgacatgccggggcaggccatggatgggttcatggggatctccgccggttgctgtgcggatcccatcatgttctagttgctgtatcgtcgtcgtcgtggctgtctgtcatataggcttcgttctcaatggttagttcttgcacttgtaatgttggttgatcgaatgacatgatcaggtcgatcggccctatgtttccggtaataagccgttaatttgtttcctcggggaaaaaatcctggagatgctccagtaatttggagatattaatggtaccgacggatacgaatatatttaaaaaaaaaaaaaaaaaaagcgtat

SEQ ID NO: 59821 - DNA, 444 bp, Zea mays
  Clone ID: MRT4577_154555C.1
gacggaataggtatcctgtagcgttaccatatattcactgcacgtgaccagatgatttacaatgtccagacttggtataaccctgacgtaacccatcttcacttgtgcttaatgacataacctactttataacatgctgcaaggaatagccaaagagtgacaccaccgatagcagtatgagatcactaggacacagctgaatggagcacaggcacgtatgctgtagaatagcattaagatctataggtgtaggggactacacctaccgagcactggtgaactctgcatggccataatagaatcttatttcactttttatctgtctatataaccctgtaaatccccttgtacatgtaactgtctgaacaaagaggtacatttatgtgtacactataaagataccttgtacatagagcaaaaaatactacatccatgtgatggcta

SEQ ID NO: 59822 - DNA, 454 bp, Zea mays
  Clone ID: MRT4577_154556C.1
tcatggcggtttcgtcttggcaatagacaacgtgaagcggccagcgctgactcttggaccttgtcgtgcatacctacctggtgtgctcttctgcttcgccatgattaatgtggcatcgatcttgctggctacctaaacatggatggcacctgcatgcaccactgcattgccggcaacaagcaaggagccatgacacttgtggatcgagtgtggcaatctgatctgttacgcggttgaagagatttatttggtaagattttggatggaagaagaccgcgcccctgcgtgcgcccatggatctagggggaaatgaacactagccagaggagaggagttaagttaccagctgcttggccaccaccaccattctcatggatgatggccaaaggcatggcggctagcttctcaaacttgcaaggtcgatactacttttggtttagtgcaatggcggatg

SEQ ID NO: 59823 - DNA, 443 bp, Zea mays
  Clone ID: MRT4577_154557C.1
aacattatcattattcaactatgagagaagattagaatgagaaaaggaaaaaaaaggcaaaggggataatgatctagagcgatgagcaagtgtcttcaatgaatgaagctttctctttattcgacacatactgtgactgtcggatcgcgccgtcggagctggggatcctgatgaggtctctgggagggaacccgactcatgcccatctcaaagccatcgtggccgaagagaacctcacggctcccttcgacttccaccgattcctcgatcttatggccaaacacatgaaaccctatcccttcgatcgccaactccgcgacgccttcaaggtcctcgacaaggactccaccgtcttcgtcgccgtctccgagcttcgtcacattctcaccaacatcggcgagaagctctagccctgctagttcgacgagtgtatccgtgtagtc

SEQ ID NO: 59824 - DNA, 368 bp, Zea mays
  Clone ID: MRT4577_154558C.1
aaaaaaaaaaaccgcttttttggtcccgacatcccggccaccttttacgctaacagaaccaagggggggcggcgggggtaaatccaataattggcgtcggaacgtcccgggttgggccgagaacccccccgtttttttaccaactttttcaaagaaaaacgaaaaaaatccctttggcctttattaagcccccaaattttttacctggccaagcggggggccttatacctggggtttgaaaccttttaccccccgggcaagatcagggggggacttttccaagaagccaccgaagtcgggattttaggggaaagggttccggggccccagagcaaaatttttttggcgggttccctcctaagcccagg

SEQ ID NO: 59825 - DNA, 330 bp, Zea mays
  Clone ID: MRT4577_154559C.1
atgagagcttcgtcatcaatgagacctgtgaaggagctcccgagggatagcccattgaagccaagctatattgagataggtcgatccatcctgaagggaaaagatttgcaaactatgaagaagcttggttacttcaatagcaagctcaacgtgcggctccctggtgatggtacggtggctgcgatgctcgctggctcgctgcgactcttttggtttccacaagagctgcgatcttttggtttccacaagagctgcgaatgcgaaactacaggttacgatgctatggaagatggtgctgctagcccttaccgtaagctgttctttttataa

SEQ ID NO: 59826 - DNA, 455 bp, Zea mays
  Clone ID: MRT4577_15455C.1
ccgacttacaaatccccacaatttgttttgaactttgggatttgttaacttgaaccccacgggtcattactaaaacggggatttaggctaccagggggccaacattcaaatgggccctaaatacatcaaggccgtttttaaaatcaactcgggccaacagggtctccagctcgattaaacaaaggggctttgacttccacaatccaaattttttactgttagcacatcacgggcaaacataaattttttttttttggctgggggcaaccaaaaataggcccacagctacaattttacctaaaattaacactagctgcccagcatacaaggggagattaacacagatgcaaatccggggaaggtagatttcatatccgggcccccagggggtccaggccgcatcccaggtcttggttgaaggaaccctcccccttcccccttttgattatggagtt

SEQ ID NO: 59827 - DNA, 452 bp, Zea mays
  Clone ID: MRT4577_154560C.1
cccctcgagttttttttttttttttttttttttttttttttttttttttttttttttttttttttttttttttttttcttccattcccaacgcccttttcctttggttacttcactggttaaaaaaaagagagttgtttgcaaagaaaacctgtcttttttgaatgttcaagtccaacatcagcaattcgttcatctttatgggttacttccggccgggagcaaatgcaacgagcagctgctacaggcttgcaagctcctcgcagcaactgagggggggacccttccaagcaatcactgtacagtataccccggggtgctatagtatccagtccgaagtcaccaaaccggggggggaagtatctccctatacgggtcttttctggctgaaaaactttttgtcactatgtaagaccaaaactgatgactattgtcatgaaaaactgccgggga

SEQ ID NO: 59828 - DNA, 112 bp, Zea mays
  Clone ID: MRT4577_154561C.1
gaacgctggatataaaaagaagcattcggagcgggatctgagagagcacattgagcgaacatcgactgcactgcagactccagcgttgggacctgtgtgatgtacatgccgc

SEQ ID NO: 59829 - DNA, 755 bp, Zea mays
  Clone ID: MRT4577_154562C.1
ttgggtacctcgaggccggccgggatcagcagattaattattaaccagctcgatcgagtaaccaaccggcgcttgatcgaaacttcaccgcgacaatggcgatcggcggcgacgcggggctccttgtcggcgacggcgccggcgccggcgacgacaacatcatcctcaacccggagttcgacgacgggctggacagctgggcggggagcgggtgcaagatcgagctgcacgactcgctggacgacggcaaggtgctcccggccaacggcaagtacttcgtggccgcgacggggcggaccgacacgtggaacggcgtgcagcaggacgtcacggcgcgcatgcagcgcaagctgctctacgaggccacggccaccgtgcgcctccactcggcagcgggcggcggcggcggcgccgtggcgccgtgcgaggtgcgcgccacgctcggcgtgcagacggccgacggcaggcagcagtacctcagcgtcggcaagtcgcaggtgtcggacaaggagtgggttcagctgcaggggaagatcctgctcaacagcacggtggccaaggcgtccatctacatcgaagggccgccggcccggcgtcgacgtgctgctcgacagcctggtggtgaagcacgcgcagaaggccccgccggcgccggcgccggacttcgagaaccttgagtacggcgccaacatcatgcagaacagcaaactggacgacgggctcaacggctgggtcccgctgggcccctgcacgct

SEQ ID NO: 59830 - DNA, 1015 bp, Zea mays
  Clone ID: MRT4577_154563C.1
gttgttgaggtggtactcacctgatacatgactgacggccttttagtttcagaagccaaaagttgaaactaagaatccagcggttgagttgccttttgaaaggctgtcttttgaggaaataaactaaaaaactgaaaagcatgttgatatgagcttttctggcttttggtgtgctaaaaagctaaaaatttttacagaagtcaatagccaaaaagccaacagccggaagtcaaaagctagcttcgagccaaaatcccaaaactgcagttcaaacaaacaggccctgaagggaatgactctaacgagggctgcccaactgatggaagctcaattgcacatctcgatcgggaattacttccaatcttcggtcacaggctcacagcgtgatgcttattgtttgtatcctcgttcacgagactccatgctgctggatacgatgacctaccgcgcatgatgctggctcgtagttcctggagcttggcaacaaggagaaccaggcgcctacatggcgcgaagatgagcgtcattggaatgagccagatccctaatgcaagtatcaacatagctgtcttctatgtgagtagagctctaaatatctgcgggtttggcttccttcaccggacagctatctggatagtgttctccccatggttgcttgcatatataagcttcattggaagacctagccatgccttgcgtgcaattggttatcttgttatcagcacacttgtccaatgccttacctttggcatttcgtaaaattaagcactgcagattttaaaatagaaggctagagtgtagggcaacggtgtggtagtactttgcacagtgtgcgtgatgtgccactggaataaaacaagcctgtttagtgatgatgcgcgatgcaagttgtcattttagcctacgtcaggatcgcgtgctgctggtttctcaccctattaggtttggtttatgtactctagtgttcaccccaattttttttgcatgtattaagctggattagagtgttcaccct

SEQ ID NO: 59831 - DNA, 600 bp, Zea mays
  Clone ID: MRT4577_154564C.1
ccggccgggcttctaccttactacactctctaaccattgccgttttcatcccatacactttgtaatttaaccgccaccacaccaccgactcccagtgtctgtgtgctgaacgcggacccttggctacatccccacagccagcaccatgagactgcgacagacgctcattctcttgccggcgctgcaagtgctcgcccgctccacaatcgccgaaatcgacgacaagaaggtggcacgagctgcagcgcccgcctacaccagtgctttcccggacccgtcgccggctgccgtaaccccaggctccctcaagggcaccaaggatgcgcccgtcgatggctttgacggcaagccgcatgccggcccctacatcgacgacacgcccacatcgcacgacaagcagccagccgtggtagaggacctggggaccgggaagaagacagtcccgggccgcaaggactcgaccctggtcggcgcggagaaggaggtgctggatggcgacaagagcgtcatgcaggacccagacaggaagcttgcgacaggcaagacgggcgtcgagggcggcgtgtccgcaaaggacaaggagcgtctggcgcacgagga

SEQ ID NO: 59832 - DNA, 1147 bp, Zea mays
  unsure (1)..(1147): unsure at all n locations
  Clone ID: MRT4577_154565C.1
atnnnnntgttacagtcaggatttccatcgatggatattggccattttgctctgtaaactgtaaagtccacccacagataagttggaacattggacagtaagtatcaagaagtcaatagccnnnnngccgccagccgnnnnnnnnnnnnnnnnnnnnnnnnnnnnnnccaaaactgcagttccnnnnnnnnnnnnnnnnnnnnnnngactctaacgagggctgcccaactgatggaagctcaattgcacatctcgatcgggaattacttccaatcttcggtcccaggctcacagcgtgatgcttattgtttgtatcctcgctacgagactccatgctgctggatacgatgacctcccgcgcatgatgctggctcgtagttcctggagcttggcaacaaggagaaccaggcgcctgcatggcgcgaagatgagcgtcattggaatgagccagatccctaatgcaagtatcaacatattgtatgtgagtgagagctctaaatatctgcgggtttggtttccttcaccggacagctctggatagtgttctccccatggttgcttgcatatataagcttcattggaagaccttgccttgccttgcgtgcaatgtgcatgtcaaattattggttatctgtttatcagcacacttgtccaatgccttacctttgacatttcgtaaaactaagcactgcagattttaaaataaaaggctagagtgtagggcaacggtgtggtagtactttgcacagtgtgcatgatgtgctactggaataaaacaagtctgtttagtgatgatgcgcgatgcaagttgtcattttagcctacgtcaggatcgcgtgctgctggtttctcaccctattaggtttggtttatgtactctagtgtttaccccaatttttttgcatgtattgagctagattagagtgtttaccataattttttacatgtattgagctggataagagtgtaaaccaatccatttcaacacatgtggattgagatgaatactagagtatccaaacaataccttagggcctgttcggttgcgtctgtatccgataggattggagggaattaaatccctctccaatcaaaatgaaatagaatgtgatttaatcttctgaaaaaaaaaaaaaaaaaagcggcc

SEQ ID NO: 59833 - DNA, 421 bp, Zea mays
  unsure (1)..(421): unsure at all n locations
  Clone ID: MRT4577_154567C.1
ttaaaaacccntaattaattccaacgaccggccagaaaaacaaagggggcattttaaagggacccaccggggcatttcctacacaaggattggacattaggaaacacaaaaaatacaaatgggtacaacgcgaccaaaaggacagtaagcacgctcttaacaaaaaaacagattgaactgacaggcgattacaggcatggtggatttgggagggtaccaaacacaacggtgggtgacaaagcttcacaacactaggtgacacatgtaaaggataaagaggaccatctccctcatctggggctaccaggtcctcttagagagtcgccccaagagcatcaccatcctctgaaaaaacagcttccgaagctagaacaaacaccttagcaataaaatggccgatagggacacaagaaaatctggc

SEQ ID NO: 59834 - DNA, 461 bp, Zea mays
  Clone ID: MRT4577_154568C.1
ttttttagttctgttttcttttcataaaatttatgcaaaaagatgaacaccacagtgagctcacattagtgttattggtattgaactttaatcaatataaaaagtatcttgcaaactgaaaaatggagaagattggtcacgtggagatagagtttttcacggtggtctgacttggcgtgcgtaaattagattctggtaatttttttagttcttcatcttccccttaattcctcccaaggagcatgcatgttgtccggcattgatattgttgcaaaagtgtcacattagccgtgattattacacgtggtaggagaagacgaagttatcgatgaggctgcgctcgccgctgatttccaagaccttagaaatctccttgacctggatcacgttcttcagaaccttcatcttaaaaagacaaatcttcttcaggttgtgcagcagcttgctcccggaacgatcag

SEQ ID NO: 59835 - DNA, 875 bp, Zea mays
  unsure (1)..(875): unsure at all n locations
  Clone ID: MRT4577_154569C.1
agggcgannattgggtaccccctcgagggcccggcccgggccggccggcaaaatcatcaaccaaaaaaacggacatctccgtttttttcgtcctcatcccttctccctccagcctaacggcctctctgcaaacgtaggggaggccgccgccccctcaacttgaatcaatggcagcagcgtgtgcatccgccgccgcctgcagcctcgcctcggccatgtcctggtagtctgctcgctgccccggcgtcgttacctagtaacgatctcggcatcgatcctggtctgcttctctttgaaaactattctccctacttggaatttctaccggccgattacaacgggtttgatggagcgacgtgggatttcgggaacatcgccaacaataataacaccaccgctgccaccaacgacaatgacgttcagaacttcagcggtgatgggctattcgacaatatcatgatcccggaattgaacgttttggatacacagtcttcgctcgatgtggctggagatggcttcctctctcaggagcagcctctcctcactgtcaactctacaacacccatcgagtaccctgctactgcaagctcttcatccagcactcctcatcccccaccaacgattagaaccaaatctccaacatcaacatccgccatcccaggaacatctaccttttctctccacccctccccctcttcatcatcatcatcgtcctcctcccgcaaacgcaaatcctctcccgaagaagaggactcagccgtcaccctcaagcgccagcgcaacaccctcgcggcacgcaagtaccgncagaagcgcatcgaccgcatcactgagcttgaggaggccttggctgccaaggcgaaggaatgcgatga

SEQ ID NO: 59836 - DNA, 361 bp, Zea mays
  Clone ID: MRT4577_15456C.1
ggcggcggccgacgccgacgccctagctcacgtgttcgtcggtcccttcccagccttcgtcgcgtccttcgccgtcgacgagaacaaacgaggtatgggcaccttttctcttgcgttcctgtggggtaccgaacacccgaaccctaacttaagctctttggctatttgtaatcggatctggtgtcatttcaagtgtatgcatacctactaatttcgattttgtttgcaaaaaatattgggtatacatgtgtaagtccatgtcctttactgtgaccgtcgctgctgccgttccaattgatccatcaatcgttcgattaggttcgtcatctactcatcttcgtcttttagcgagctaggtgta

SEQ ID NO: 59837 - DNA, 184 bp, Zea mays
  Clone ID: MRT4577_154570C.1
cttatgtcgaacaatcattctttgcgtttagatggcatagatctttttcttaattctatcttatcctcgttgatgactctcttgaaagtactcttctttagtcacgatcatcatgtcgtcctagactgtctataggtgaggatttactaatattgtgattcactattctacacttttaagttcg

SEQ ID NO: 59838 - DNA, 522 bp, Zea mays
  Clone ID: MRT4577_154571C.1
ggggggggtttttatttttttgttattttttttgtgagagttagcaggagacggcgcctgaaagggggggggggggggggaacagcccccagggcccaaacaaacccctggaggaagggggggggggggggggggcccccggcgaaagacaaaacggaccgaagcaaaggggaagaagaaaggcgccaggggcgagaagagcggagggacaggcccgggcacaagggaagggagggggagaagcccgcaaacacaaagcgcctggagggcaaccgacacgattccaagagcgggcacgaaggagggaggggggccacgagccccagggaccaaagaaggaacggcgttcggggcacaaattggggccccgggaacaacgccgggaactggtagaacacctgccaaagaagccacaacagggctcaaccctggcgggtggagaaccggacgccaaacaccccatgaaaggcaaaatcctgcaatgggagaccatgggaaatggggaacgaacagcgccacccc

SEQ ID NO: 59839 - DNA, 344 bp, Zea mays
  Clone ID: MRT4577_154572C.1
cggctcgagctccgacatcgtcatccgcaccgacgccgatggccgccaggtccgcgtgggcgacgtcgcccgggtcgagctgggcgcgcaggattatggcgtcaacacctatctgtcgaacaagcccaccgtcgtcatcgcaacgatgcagcgccccggctccaacgcgctcgacgcggcggagaaggtgaaggcggagatggaacaactgtccaagcgcttccccaaggggctggaatatagcgtcatctacaacccgaccgaattcatcagccagtccatcgacgccgtctatcacacgctgttcgaagcggtgatcctggtcgtcctggtcattctggtct

SEQ ID NO: 59840 - DNA, 266 bp, Zea mays
  Clone ID: MRT4577_154573C.1
ggctctctttctcaagttgcctatcgaggccgacgcccatacacgcctccccttccccgcctccggtgcccaaggccaggcctacagttttgaggagggaatggcggaccatgctaaccaacccactgtcctgtataaactaggtggccagttacacctgatgctccagctcctctgaaggtgtacggcccccgtaacatctgcccttctttctcacctgatgaaaggagattcgccacaaggaactgcatgacccagagccttgg

SEQ ID NO: 59841 - DNA, 708 bp, Zea mays
  unsure (1)..(708): unsure at all n locations
  Clone ID: MRT4577_154574C.1
cctgcaggtatcggtccggaattcccgggtcgacccacgcgtccgctttttttttttttttttttttttccttaaaaattcttttctttttgtttttgtaagacgggtttttgctgtgttgcccagactggcctggaactttccttcttcttgtctcaaactcccaggagggtgttgggattacgggatctgagctgccaaacccagatccctggaactcttttagtgaaaaaatattttgagagcctcccaacttttctaaaatactatgttgctagctgctgaggtaaacagttcagtccagagaattccccagaggcaggtcccgggctgggcagctcccactctctgaacagagtgggtggccaggacggctgcaggactggctgcaggtgtgggtggccaggctctatctccaattgattagatacagcgcactcagaagcggggcttgcgctttcggccggtgtactgggtgtcaggtctgacctccttgccctggcgcctgcgcctctccttcttctctaggacccattcccggctcttcttcaccaggtccctccgtgccttcttgtgtggggcccgctcactggtgaacatggactcggaggcctggtctgcatcctgactttcagtcagcccctttgcagggaggtggaaggcccananacagacagaggtagaacttctttgctttggcactgtggg

SEQ ID NO: 59842 - DNA, 499 bp, Zea mays
  Clone ID: MRT4577_154575C.1
ccggccgggagcaaagattgattccatctaatccctatctctctctctcaagccgtcggctagggggtacaccccaaccagcgaagaatgacgaggggggcataaccccgccagctaccacgggccgagactacgaactttgtagtcgaggtccgacgtccttgggcacgtacgcccttgacaggcaattctctggaagaagacgagggtgtcgcgttgggccaaggtgaccatgagctcgcagtacctgtttacgacatgagctcgcagtaccatctgctaccttgccatccgggcgagcacatccaagttcaggtgctccaagtgggcatgctgcaaccacggctcctcgttgtgccactgccacgccaccaagcacactggcagtggctgcacaatgttcagatcaaccatgtacagtacaggtgtaagaaccctcacagcacacacccgtaccctctaaaaccagactaggaaaaaaaaaaaaaaaaaagcggcc

SEQ ID NO: 59843 - DNA, 274 bp, Zea mays
  Clone ID: MRT4577_154576C.1
cccacgcgttcgacctcactaacaccgagctagcagctcgctctgtcctgcaacaaggcccgctcgctcctgctcccagcagctggtcaaggcggccgtactggcaggcgcgctgctgatgctggcggcgggggccggaacggcttcagctgcggagagctgcatgccaggtgaccacttctgacgagacgtgccttagatacgcaatacacagaacggcattctccaacatgacgagctgcacctgggtgcgctagattaacagacgtgcgtc

SEQ ID NO: 59844 - DNA, 104 bp, Zea mays
  Clone ID: MRT4577_154577C.1
actacgaacatcatcctaagtggatccatatggcagctaatgcaaagggctggctcacactagagccactgtggcaactactgctaggtggcattatcctcagg

SEQ ID NO: 59845 - DNA, 710 bp, Zea mays
  Clone ID: MRT4577_154578C.1
atactagctagtactcgctggtcgtgagaaatttactcaaattccttttagaagctcacaaattgaattagtatcgggccttgatctgtgtagattcaggtgatggtgcaccgcttagaattccggcatctccatgtcgacggtgttcatcgtcatcttgtaaagaaagttctcctctcccttattcatcgtcactgatttctcccctcggacgcccttttccccactcccactcgttgttcttctcttccccgcaatttcccgggccgacggcgacgggggcgggggcggggcgcataaagcaaagggcaactgcctactggcactggattagcgccgattaatttcctcttttgttggttcctctactcccgcgcgcaagatcgatctgaggcgcggcagctaatctcgtcggaaaatcgagggttcaactgaagccaatatgcccaacgtcaagtccgctggtggtgctggtgccagtgccatccctgccggcggcgacggcgaggtggaggctgggttcgccaagctgcagggtgaggatttcgagtactacatgcagacctactccatcatgctgggccgcaacagcaagaaatccacggtggacgtggatctctccagccttggccggggggatgaacatctcgcgccaccacgcgcggatattctacgacttccagcgccgccgctttcgcgctcgacgtcat

SEQ ID NO: 59846 - DNA, 350 bp, Zea mays
  Clone ID: MRT4577_154579C.1
cacaagcttttttttttttttttttttttttttttttttttttttattgctttttttttttttttttttttttttttttttcttttttattttttttgttttttacaaatcaacgttacccctaaaaaacaacacctagccaaaacaaaggcccccccaggccatggctaacacacccacccaggggagagggggaaaccacccccccgacccccaacaaatgaacaaccgaccgagccagacccagaccccccggcagaataacactaacacagaccccgggccccaaccccccaaagggggactcccagcacccgggccggcggtccaacgagaaccaaacgcgcacc

SEQ ID NO: 59847 - DNA, 1472 bp, Zea mays
  unsure (1)..(1472): unsure at all n locations
  Clone ID: MRT4577_15457C.1
actcgggccgggctcctcgncgaccccaagcgccgtcgggcgccgagcagcggtcggcgcgctgngaggtgcggtcggcctacggcgatattggcctccggtaccgcgaggacgagacagttgcctactcgcgtcaccatgccaccatggggcgggggccaccgcgtgctacgcgaggttagacgaaggccgccgcgtccggcgcctgccaaggtgttggattttggcgccgggccaagttcagctctttgggcaatgagggcagtgtggccaaaatcaatagagagggttaacctggtcgagccttccaaggaaatgcaaagagcagggcagagtcttctcgacaatctgaaggggttgccacttattcacagctatgacagcatccaagagttgaaccgcaaaatagaaaaacatgagcgaggccatgatcttgtagtatcatcttatgcacttggcgagattccttctttgagtgaccgaatcacaatagtgcgccagctttgggacctgacgagtgatgttttggttttgttagagcctgggacacctcaaggagcaaagatcataagtcaaatgcgctcttatatcctttggatggaaaaaagaaagtgtcgcaaaattgaaaaatcctcaagccgtcctccaagtagcatgaagagtatcgtagcacaaaaagtctcattgaaaaatgggtcttttgtggttgccccttgtcctcatgatggtcgatgtcctttggagaattcagacaagtactgccactttgtccagagattggagaggacgtcatctcaacgtgccttcaagaggtcaaaaggtgtgcctttacgtggttttgaggacgaaaagttttgctatgttgctttaagaagaggcaaacgcccagaggaagcttggccgcttgatgacttgaactttgagacacttaaagaacgcaatgccaagagaaagccagaagatcttgtcatcgactatgacgaccaatttccaagcgaggaagacgaagaggttcatgtcgatggtggggacagtctggtaccatatgcttcagatgaacatgaattaagtcttttccatgacagtgaagaagcagaggcggaacaaacggttcgtgctgaccttggaggaggttggggccggattatatacagccccatgcgaagagggaggcaagtacaaatggatgtatgccgttccaccaaacgggacgcatccgaaggcacatttgagcgtgtagttgtcacccgaagcaagaaccctaccttgcattttcaggcccgtaagtcactttggggtgacctctggccattttaaatcagtatcctcaagtttggttaaagccatattgttagggaaaattggctgtgtaccctaaaccctaaaagattgcatctttggagatgaaccattaaaagaactcttctttgttatgtatcatggaaagattacatttatttgaatctcaccac

SEQ ID NO: 59848 - DNA, 798 bp, Zea mays
  Clone ID: MRT4577_154580C.1
ccggggacttatctgtgattatggtttgtcacttggtgatctgattggtgtattggaggatttcttctcaagtctaggcatgtccaagctgcgtttcaagcctgcctacaatccatatactgaacccagcatggaaattttcagttaccatgatggtttgaagaaatgggtggaagttggtaattcaggcatgttcaggccagagatgttgcttcccatgggactgccagaaggtgttaatgttattgcatggggtctttcacttgaaaggccaacgatgatcctttatggtatcgacaacataagggacctgtttggaccaaaggttgatttcaacctcatcaagagcaacccactatgccgattgggactgtagtgactagtgaggtacagggactctgaagcttgatcacaatgtgccaaagaatttgttttccttttttgttgtgctcccttgaagtttgaacaccgattcatgtatctctggttatggctcaagaaaaccgctcatgatcagccatgttcagtttttgggttgctgaatcaaaggatttgggggcaccaatggtgcttgctgctgtcccaatgaggcaaacaaagcgcagaacagtggcagaagcgatgcaaaatcaaagcttggacgaccatggacatacacggagggaggcctctcaatgatggttcgaatatttccagctctagaatgttgtacaagaggtcatcctgtgaaccgcccaagagacgtctaaatgacatctagtaatggtctatcgaaatggagatgttgtcttgtgaccg

SEQ ID NO: 59849 - DNA, 170 bp, Zea mays
  Clone ID: MRT4577_154581C.1
aagatatactcctccggtctttttatttatttatcgccggttagttcaaaaatgaccgggctggcgacaaaaatatttgggaacggggggggggcgttttgagctcagaaaggtttctatgtagctaactctctgtgtttttcactcttcactgtaatcggacgcctggg

SEQ ID NO: 59850 - DNA, 2241 bp, Zea mays
  unsure (1)..(2241): unsure at all n locations
  Clone ID: MRT4577_154582C.1
cccggtcgacccagcgtccngactggnatgtttgcttcattgtctgggcaagttgtgatattcttatttcggaacgggggcccgaacccgcgacttcctgagacgaaggactcctttcccttctgtcatctgagactcggaagcctcggccgccgccgttaccacctccttgcgccatggcggagaagtcgccggcagccgacgtggaagccggtctccttgcccacctcaactcagcgggagaggtccccgactcacgctctttcgcttcctccctcggcgtctcccacctcgaacttgagggcgtcatcaagagcctctcagctttccgcatcgtcgacagcacagacatcatcaaggagacatgggtgctcaccgaggaggccaagggctacgccgccaagggctcccccgaggcacagctcgtcgccgcaatttcaccggagggtgcctctaaggacgcactcaaggcaatattgggagatgctttcgatgttggcatgaaggcagccgcgaggaacaagtggatagggttcgagaaggggaataaggacttagtccttaggaaggttgagagcgtaaaggatgagctgcaagagcagcttagaagactagagaatggggaggttgtttctgataaagtgatcgatgatttgaagagaaggaaacttattacgaaagagaaatcaatttggtactctctaaagaaggggtctgagtttgttgtaaagagaaaaacgttggctactgatgtgacaacagaacaccttaggagtggtgactggaaggaccttgaattcaaagactataattatggagctcaaggtcaacctatagccaaaggttatgttcagcctttgatggaggttcgtgaggcaatcgagaacatctttattatgatgggattcactgagatgccaaccaacaatttcgtcgaaagcagcttctggaatttcgatgcactgtttcagcctcaacagcatcctgctcgggattcacatgatacatttttcctgaaagctccagcaactacaaaacagttgcctgacgactatcttgagaaagtaaagcaagttcatcagtctggcggttatggctccaaaggatatggttatgattggaaacgggatgaagcggagaagaatcttctccgtactcatacaactgctgtttccacgagaatgttatacaagcttgctcaggagaaaccttttactccaaagaggtattactccattgatcgtgttttccgcaatgaagctgttgaccggactcatcttgctgaattccaccagatagagggacttatctgtgattatggtttgacacttggtgatctgattggtgtattggaggatttcttctcaagtctaggcatgtccaagctgcgtttcaagcctgcctacaatccatatactgaacccagcatggaaattttcagttaccatgatggtttgaagaaatgggtggaagttggtaattcaggcatgttcaggccagagatgttgcttcccatgggactgccagaaggtgttaatgttattgcatggggtctttcacttgaaaggccaacgatgatcctttatggtatcgacaacataagggacctgtttggaccaaaggttgatttcaacctcatcaagagcaacccactatgccgattgggactgtagtgactagtgaggtacagggactctgaagcttgatcacaatgtgccaaagaatttgttttccttttttgttgtgctcccttgaagtttgaacaccgattcatgtatctctggttatggctcaagaaaaccgctcatgatcggccatgttcaggtcctgaaatccctactaattctaaagctctggctaagctatggaatcaggggtcagcaatggcttttctactttattttggtgtgacacggtttcggggttgctgaaaaaaaggatttggggggaccaatggcggttgcaggctgtccccaatgaggccaaacaatgcgcaaaacattggcagaagcgatccaaaatcaaagcttggacgaccacgggcgaagacggagtgacatcttgtaatggtcgtgagacgttttcctgccctagagtgtgggtccagcggtcatcctgtgaaccgcccaagagacgtctaaatgacatctagtaatggtctatcgaaaaaaaaaaaaaaaaaaaaaaaaaaaaaaaaaaaaaaaaaaaaaaaaaaaaaaaaaaccccccccccccccccag

SEQ ID NO: 59851 - DNA, 317 bp, Zea mays
  Clone ID: MRT4577_154583C.1
cccttgggtagatgcctaaattaacaatgacgacatgcatatcaatccaaactaccaagacagcatgtaggctgcaaccatgtggttatggctttaggtgctttgagccacagtgcatttaccaaacagtcagcaacatggcagcaatccataatcaaagaggagcaacaacagggccatgtgagacatcaggatctacacaagctactcaaagtgcgccggcacaccagcccgaggagcaatacctaccacaaatgcgcggttagatgccactccaaactacccaaaaataatcacatgacaaagagtcattgtac

SEQ ID NO: 59852 - DNA, 443 bp, Zea mays
  Clone ID: MRT4577_154584C.1
attcccggccgtcgtagcttacctagctgactcccgtcaccatcaatcctcatctccccgtcctcccactatctccgcgtcgcgttcctatccacagtccgacgcgcccaacaacatccatccctccgcaagggggaaagcactctatctgatctgaactactgacagagatagagagccaaaccctatcactcacaaacacatcaacatatacactatcccccgcccattcatccatccatcgcatcgcacaccgatcagtctgtccatgactactacagctaatctagcacatcacaatagcatatcatctatctccgtcgcagtacccaccaccaccaccaccatgatcttcccccctgccttcctgcatgattcctcgaactggaacgataaccatcaacatcagcaccaccaacatcatcaaagccactgacaccttc

SEQ ID NO: 59853 - DNA, 240 bp, Zea mays
  Clone ID: MRT4577_154585C.1
aagaagagtgtcaagtgaacctgaaacttgcggtgtcactggctggtaccctgagtgtgagtgagtgatcgagctagctgagctccgatcctcgctagctatgataccgccataccacaggtcttcttcacatgtttaggagtgacagcagcaagacatcgatggcctcagccaccgtgctcaagtcctccttccgtcccaacaagtccgaatggggacgccacaaggcatgccgccgcg

SEQ ID NO: 59854 - DNA, 659 bp, Zea mays
  Clone ID: MRT4577_154586C.1
ggccgcttttttttttttttttttctttttttttttttttttttttttttttttttttttttttttttttttttaacccggagctgcttcctgtagggaactttgtatttttaaaacataattttattttccttcctttacctaacacggaaaacccgaaacaaactattggcccaccaggccaggacaatccactaaaaaggcatcctatcctatcctttcctatcctttcaagagaaaaactccgaccaaaaaaaaaaagaagcggaaaattcccactcacatcttagttaagggggaactaaagggccaaaagggcgcgggaaaaaaaaaaaaaaaaaagggctagcagggataacgggcggtcaagctaggccttttcctccagggcctgccaaaaaaaaaacgggctccaaacaaaccttcccttaatccgaggccggaagtcggggttaaccttgcgcaccgggaaccggatctttttggaaaaaagccgggggccccttttttccttgaaccgaagaacgctggtttccctgaccccaccgccgcctgttcggttttttgaaaacaggtcaatgtctgaaagctaaccccgcacttggggggccgacgtgggaaactccggcccgttgccctgggaaaaagggcccctttgg

SEQ ID NO: 59855 - DNA, 1808 bp, Zea mays
  Clone ID: MRT4577_154587C.1
gggtacctcgaggccggccgggccggatttctctccattctacctctctcttccccaatccagtccacccaaccctagcgcaccggcgatggcgtcggacccggcccctgacgacgcggccgcggccgtgaatgggcacggcaacgacaacggacacggtaacggcccgtccccgtcgaagcgcccccgggcggtgatctcggaagccgagatccgcgtcgagttcgcacaccacgacgcagccgtggcgcgcgtcaacaacggcagcttcggctgctgcccggcctcggtcctcgccgcgcaggcccactggcagcgcctcttcctcgcgcagcccgacgccttctacttccacgttctccagcagggccttctccgctcgcgcgccgccgtcgccgaggtggtgggcgctggcgacgtctccgaggtctccctcgtcgataacgccaccacggccgccgccatcgtcctgcagcacgcagcctggagcttcgccgagggtcacttcgcgcgcggggatgcggtgctgatgctccactacgcctatggtgcggtcaagaagtccatccacgcgtacgtcgcgcgtgcgggggccaccgtcgtcgaggtgcccctcccattccccgtcgcgtccgccgacgcaatcattgccgagttccgtgctgcgctcgcggtcgccaaggaaggagggcgtagggtcaggctcgcagtcatcgaccacattacctccatgcccagtgtcgtcatcccagtcaaggagctcgtcgccatctgtcgagaagagggcgttgacaaggtatttgttgacgctgcccactctattgggcaggtgcctgtggacgtgcgcgacattggagccgatttctatacaagcaaccttcataagtggttcttttgcccccctgctgtggcctttttgcatactcgcaaggatgacccgatagcctcccaactccatcaccctgttgtttcccatgagtatgggaatgggctgcctatggagagcggatggattggaacacgggattacagtgcccagcttgttgtgtccgaggctatagattttgtgaatcgatttgagggtggaattgaggctatacgaaaccggaatcatgagaaagttattgagatgggtaggatgcttgctgaggcatgggggacttttcttggctcacctccggaactgtgtggtagcatggttatggtggggatgcctggttgccttggtgttgagagtgatgatgatgcaatgagagtgaggacaatgttgagaaaggatttccaggtggaggtgccggtatactacaactcaagaagggtggaaggacaggagatgacaaaggataaaaatggtgatccagtgacagggtatgtgaggatctcacaccaggtttacaatgtcacagaggactatgagagactgagggatgttgtcaataaacttgtttctgaagggttcaccagcagcaagttgcggccttctgagaagcaagaagcttaggtgtaatgaccttccagccaggtagcatccacctgaaggcgctgtggccgactacttaggtgtggaccggatcagcgcagccagtacggcttcgtgatcgtgacgttgaagaatgtagtgtaccgccaggaactgacatgtgttgtatttggcgttcagtgtaagtaacaataatgccctggcatgttgtcttctctcacattttgggagctgctgtaacctcagaataatctggaatataaggatatttacagctgcaaaaaaaaaaaaaaaagttaacagacgcgtggaaaaaaagggagaaggg

SEQ ID NO: 59856 - DNA, 505 bp, Zea mays
  unsure (1)..(505): unsure at all n locations
  Clone ID: MRT4577_154588C.1
cacatagcgccctacttagaccgatcatagaaggcacganacaagtgaggtaatactcatgggcttaaccatgggctacaccgccggggaggtggacgaggaggcggacaaggacgcgatcatgttcgcgatgcagttcatgctgcccatcatgctgaacatacaccatcaagatacgccctgctgctggtgctgctagaagaggtccacagagaggacgccggcctcaaggccgagctggtgccggaggaggatgcccgcgcggatcaccgacccccccagcgaccccgccatcgtggaccgcatggtggacctgatgctctgctaccacgtcttctactaccagatgcaggaccagaacgaggaccacgagcgccggtactagcgccggtacttctgcaagtgggtcagcaacaacgtgaaccgcaactacaacggcgtgctcatgctcatgatccagcacatgaaccagatacaagagcttgatctatagcaaggactatgt

SEQ ID NO: 59857 - DNA, 468 bp, Zea mays
  Clone ID: MRT4577_154589C.1
cccacgccgtcctctgtcaccagcccaccacctcctgcgccggcgctcctccgagacgcagttcgcctccggaattcgatcacttcgccgccgctctcgcctccgcccccaggccgcgaagtggcgagaagccttcccactgagcaaaggtcctaggttcgatgcagcctctcggcaaaatgcaggctggctaaatacaacaatgatggagaacaggatgactttgaatccaactgatcttgatgattttgacaaggtgaaggcttctttcatttggatttaacccgtatcggcttctactacttctacagtgttttgtctttatggattgcagctgcagcagttcgaacaactgatttgtttacatgttcttttggggacttgagactaaattacattataattttgtccagagaaaattgccatcacctaggttccagggtgagggtgtcctggtagattacgatg

SEQ ID NO: 59858 - DNA, 2112 bp, Zea mays
  Clone ID: MRT4577_15458C.1
atgccctcttacgcgccctcctccggttgcctaccgcttgtactctccctacacgcgcatgccctccgctctggactcgccaccgaccgctccgtcgcatcgaacctcctcacagcctacgctgccttcgcgcgcgccggagaccgtgaccaggccttccgagactgcgttgccgccgatgcggcatcgtccttcacttacgacttcatggtgtcagaacacgtgaaggccggggacattgcctccgcccgcaggctgttctacggaatgcccgagaagagtgtcgtgtcgtacacaaccatggtcgacgcgctcatgaagcgtgggtctgtaagggatgcggttgagctgtatgaacgatgcccactccactcggttgccttcttcacagccatgatttctgggtttgtccgcaatgaactccataaggatgcattcactgtttttcgaaagatgctaacctgcagtgtgagacctaatgtggttactctgatttgtgtcatcaaggcctgtgttggtgctggtgaatttgatcttgccatgggtgttgtgggattggcagtcaaatgcaacttgtttgaaaagagtatcgaggtacacaattctttgatcactctgtatctaagaatgggagatgcagctgcggcacgcagggtgtttgatgacatggaggtgagagatgttgtttcatggactgcattacttgatgtgtatgctgacttgggtgaccttgatggagcacgacgggttcttgatgcaatgcctgcgaggaacgaggtctcctggggtacattgattgcaaggcatgagcagaaaggtgatactgcagaagcattgaagctttacagccagatgcttgctgacggttgcaggccaaacatttcatgcttctctagtgtgctcagtgcttgtgctacccttcaagacttaaggggaggaacaagaatacatgccaatgcactgaagatgggctctagtaccaatttgtttgtatccagctctttgattgacatgtactgcaaatgcaagcaatgcacgtatgctcaaagagtttttaattccctcccagaaaagaacacagtatgctggaactctcttatttcaggttatagctggaatggaaaaatggtggaggcagaggggctcttcaataagatgcctgcaaggaattcagtttcatggaatacaatgatttctggctatgcagaaaatcgacgatttggtgatgcactaaattatttttatgcaatgttggcttcaggacatattccaggggaaatcaccttgtcaagtgttctgcttgcatgtgcaaacttgtgctctttagagatggggaggatggttcatgctgagattgtcaagcttggaatcgaagataacatctttatggggactgctctctgtgacatgtatgccaagtcaggggatttggacagctccaggagggtgttctatcaaatgcctgagaaaaataatatcacatggactgccatggttcagggacttgcagaaaatggctttgctgaagagtctatttcgttgtttgaggatatgatagaaaatggaatagcaccaaacgaacatacatttctagctattctatttgcttgttcccactgtggtttggtggagcaagccatacattattttgaaacaatgcaggcacatggcatcccacctaaaagtaaacactacacttgcatggttgatgttctagctagagctggctgtttgccagaagccgaagagcttctcatgaaggtttcaagtgaattagacacaagttcatggtcatctcttctgagtgcttgcagcacttacaggaacaaggagattggtgagagggcagcaaagaaacttcatgagttggaaaaggataatacagcaggctatgtgctactctcaaacatgtatgcatcttgtggtaaatggaaagatgctgctgagacgaggatactgatgcaaggggctagccttaagaaagatgctgggtgcagctggttgcaattaaggggacaataccatgccttcttttcttggaaagagaagcatcctttatcattggaaatttatgagatcttggatttgctgatgttggaacttactacttga

SEQ ID NO: 59859 - DNA, 216 bp, Zea mays
  Clone ID: MRT4577_154590C.1
gcggggccatccaagcgtccgaaacaccttggcgcgagtgatggacgcccgtctcggcctcggcttcttccccttcccctgggcggcggctttcgcccggcgggcctcggcgaagttctcggaaaatttcaacaaaacttcgtgccccaacgccgaaaaaatcaccttgggcgtcgtcaaaaaccggttcaaggcggaccccggcaccgccgccgg

SEQ ID NO: 59860 - DNA, 191 bp, Zea mays
  unsure (1)..(191): unsure at all n locations
  Clone ID: MRT4577_154591C.1
taaaaaaaaaaaaacatataaaaaaaaaccaaactaaaaaaaacaaatacaccctaccaagggacaggcttaagcgggaggggaggtctaaattcctnggggcgcccgttttaaagaatccaactttacaaacacgaaactcccaccctataactacttttaccggtaccccaaataaaattgacaacgcg

SEQ ID NO: 59861 - DNA, 361 bp, Zea mays
  Clone ID: MRT4577_154592C.1
atgcgtgcctctgtgcatcagggttattacaaaaaaaggacgggctagaatttataggtttagcttacatatccgctcaactctcaaccaaaacttaaacaaacaaaaatcaccggcgggctgggtgaaatgcaacgcctgaaatgttatcggcggcaagcgatacctgaagtgttggatgaaacaggttactgacatgaggccttattctcatgtagaaactgctgaatattgaggtgagtctccattgtcttaacacattactttttaaggggagtcaggtcacttttgcaagtctagaatttaagttctttttcgatcttaggaagatcctgcttgcgaatgccaagctttgtgttaa

SEQ ID NO: 59862 - DNA, 556 bp, Zea mays
  Clone ID: MRT4577_154593C.1
tgcaccatgcccgtcaccagttctgtgatcaacccgcgtcatcaacctgggcgacgccggcagctacaacaaggacaagccctgggaggacccctggatcgtctgtgagggccccctcttgtacgatgccatcgcgcccttctatcaccacaacatcctccgggttggcgtcatgaaggacctgagctccttgaggagcgactggagatgagcggggcttgactgaggagcgatggcgcgagagctaagaaagtgtcatcgtgcattgagcgagtggcgtcattgatcgattcacttggctgcatattgtgtctccagcatctgctgatgtgcgcgcgcgcgagagattggttggggtctctcccccgatgagtatcatcgtgacgtgactctctaggagagatgaccccgctctgctcatgtgctctgtgctctatatcatagagagtgatgacaccatgcaaaagaaaaaaataaaagtgcgcccctagagctccattttgtgccccctacagagaggcttaagtgcgctctcggcaaacttgtgcatataggt

SEQ ID NO: 59863 - DNA, 232 bp, Zea mays
  unsure (1)..(232): unsure at all n locations
  Clone ID: MRT4577_154594C.1
atacacacgcaccaaccttgtctggtatattaattatttctgtccggcctaacaaaaaannnnnnnacccctccctacacnacctatccttgtttaaagacaacaattcttgtactccatatctaataatgaatgccatataaataatacactagatgaacgagcatcaacaactgtactatgaccatcgcaattctattgctttatgagatgaaatagtactctaaactta

SEQ ID NO: 59864 - DNA, 174 bp, Zea mays
  Clone ID: MRT4577_154595C.1
cttgacttgtagctccccttgaaaggtgttttgtattatcttagcaaaaaccttggctggttggaccataaccctgcaggttgagcgctctgactccttctgctgcgcgaaggcacagatcctttataaagagcatgtttacccggacctgtaacgcttgctgttctgccccga

SEQ ID NO: 59865 - DNA, 442 bp, Zea mays
  Clone ID: MRT4577_154596C.1
cccccacataaacatataataagggggacaaaccggacaaggactaataaataaacaattccgaatataaccaggccggggtactagggggcaaattggcccacttttacaacaaaaatacgggccagggatctgagtccagtctcgggcgggttcgaagggttccagctttggtttttattccaaacaacagttaaaaaaaaagggccgaaaaaatggcagtttttttttttaagctcctacgggaaaaacgggtccggacataaaagttgggggggggcactgacaagggccaggggggcaataaaatccagaaccggggggggggacccccactggtggtaataccaagacacaggtttaaggaaagaagggctaagtccgatcccagcctgggaataaaagaggctggccctagaatccccaacaaatttttgggaaa

SEQ ID NO: 59866 - DNA, 513 bp, Zea mays
  Clone ID: MRT4577_154597C.1
ggaattcttacactatattatggccattcgatcagaaagcacatcatccagacatggatctatagaactaggcttattatatcagatttatttatgcccaatctacatctaccagttgagataatcctcgtgtattctaatcatgcatgaatgagttatgagttatccatcaactgttgggggtagctttgaggtgagtacatccgatggcggcgtagatcgatgcactacagtaatttaggcagcgctagttttggttcctcggttcaggggacgatgcctgttttggtggtgactgcagagtattgggcggcatcggtgcgtcgggtactagacgaagacggcttttgcggcagtttcggcgtgtacttggcttctgttgtatgggggcggtggctctggcgttggactaggcatcggcggcttgggcgtcggccctggctttggtggttgcggcttgggttcaggtttaggtgggcttggcgctggcccatcgcgggggtcatcgttatc

SEQ ID NO: 59867 - DNA, 1521 bp, Zea mays
  Clone ID: MRT4577_154598C.1
aggggtaccctcgaggccggccgggacctttggcttttctggctttatataatcattcgttcaccctttatccatcaccacctaatttcccaacaaatttcaatctccatcgatcgattcctcccgaacccgacccgatggcctccgacgccgccgccgagccctcctccggcgtcacccaccccccgcgctacgtcatcggttacgcgctcgcgccgaagaagcagcagagcttcatccagccgtcgctggtggcccaggcggcgtcgcggggcatggacctcgtccccgtggatgcgtcgcagcccctggcagagcaagggcccttccacctcctcatccacaagctctacggagacgactggcgcgcccagctcgtggccttcgccgcgcgccacccggccgtccccatcgtcgacccgccccacgccatcgaccgcctccacaaccgcatctccatgctccaggtcgtctccgagctcgaccacgccgccgaccaggacagcactttcggtatccccagccaggtcgtcgtctacgacgctgccgcgctcgccgacttcggactccttgccgcgctccgcttcccgctcatcgccaagcccctcgtcgccgacggcaccgccaagtcccacaagatgtcgctcgtctaccaccgcgagggcctcggcaagctccgcccgccgcttgtgctccaggagttcgtcaaccatggcggcgtcatcttcaaggtctacgtcgtcggcggccacgtcacttgcgtcaagcgccgtagcctgcccgacgtgtcccccgaggatgacgcatcggcccagggatccgtctccttctcccaggtctccaacctccccactgagcgcacggcggaggagtactacggcgaaaagagtctcgaggacgccgtcgtgccgcccgccgcattcatcaaccagatcgcgggcggcctccgccgcgcgctgggcctgcaactcttcaacttcgacatgatccgcgacgtccgcgccggcgaccgctatctcgtcattgacatcaactacttcccgggctacgccaagatgccaggatacgagactgtcctcacggatttcttctgggagatggtccataaggacggcgtgggcaaccaacaggaggagaaaggggccaaccatgttgtcgtgaaataagatgatgattgatggcactggatatctggcgaatgctgctgattctggatgcagaattcgatgaggggatttagttggttgtagtatctggcgaatgctgctggttctggatgcagaatttgatgaggggatttagttggatttcaacccatagcatgccgaggacctcctagctctttccaaaccagttgtttaggtatcttttctgggtaagtcagcttcatctagtttagtctgtctgaacaaaagagtgggacatgacccaaacggaattctaatgaaaaacgagctctctatctgcaatcctattgttcttgagcaatggatgaatggcaaacgctgtatctcttcatgc

SEQ ID NO: 59868 - DNA, 296 bp, Zea mays
  Clone ID: MRT4577_154599C.1
gggggtgtgttcatttttttttttttttttttttttttttttttttttttttttttttggaaccgagacgggctttgggcccaaaaccccaaaggcatttttttaacctggtaaaattcgggaccttttcaaaaaaaggcccaaaatcgccacccttttggaatttaatgggcgtttcgttacacagcggcttttgccaaataggtgacccctacccgggggtttacacaagggggtgggcttttttacaaaataaacaagccctttttggggtaatccccccatttttttctaat

SEQ ID NO: 59869 - DNA, 423 bp, Zea mays
  Clone ID: MRT4577_15459C.1
ggtggactcttagctgtccagacggggtcgctacaaggcggaagcgcccgaaaaaagcatacatcccaccgcgacagagacccggcgccacatggcaccataacaaaataccgcagccactgctgcagcgatttcataaacaaagggacaccaccggaagagggggaaaacacctcgaaacaaacctgcgggagcgggggaaaccacgcgctaactgggccagcatgggccacctccgcccacagaacaatggcctgaacactctacctgcatgatgccagcccgcacgccggagaaacccgagaggacgaccaggacatcggcaggataatctgcgactgcataaacggtgacttcaccaactacaacagggccatagcccagactggacaaaccggctatggccccgctgaagagaactat

SEQ ID NO: 59870 - DNA, 652 bp, Zea mays
  Clone ID: MRT4577_1545C.1
cattgggtacctcgaggccggccgggtcagtattcgtgtttgatgtacacagtttcactagaatgtttctaatggttgtcttttctttgcagtgctgactcctgagcaatagtggatcaacgggacagcaactttgcaagtggttaagtttgtaaaggtgaaatgctattccaagtaattaatactcatataccatagaacattttcagtcatactaaagctataacacaattaacccatcctattgtaggttgctgactgctttctagagtacgaagtccattttctccagcagtattaagcatgagacgtgctctaggattggcttatccacatacgaagttggaccacaattaatcaaaacttcatcattgtgctcgataggaaattttgtgcttccttttttacatatagatcaggtctttaggtctcagaaaacttcatcaaaagtactcttgtttcaccgagatggaaatatgggatgtgattggtgatcggagtggtatttttacaaggtacatagagtagtatcttgtggaattgaggatgttttacatgtgatgtacatcggacttgggagctttgtatcaacagcatacgttttcaacagtctgtgtttagtttagtgaaaaaaaaaaaaaaaaaagcggcc

SEQ ID NO: 59871 - DNA, 597 bp, Zea mays
  unsure (1)..(597): unsure at all n locations
  Clone ID: MRT4577_154600C.1
agtcaaagtatagattctggggggctcnttagatttgctatcagcatggtttatgccggggaccttcggcatccgaaggtcctcaaaaacaggatttaatagtgtttctggattataatgtgtgaacaggtatcttcggactcaagtcaggcatcacagtagaccagaataatacgaaggttggtgaagcgccgaaggtgtaaacaggaaagcttctgcgagacagcagcagttgaaaccgacttacagatgaaactcctcgcaacgttacgcagcaagtacctgccgtacgggccggtggagcagatcatcccctacctcatcaggcgcgccgaggagaacaggggcctcctctccgcctcttccttcgacaggcagctgctccggaaggagttggtgaggagggtcaaggccacggtggcgggacgtgagtgaagtgagcttgtcgagcatgtggaggtcggccgtgaagctgggactgcgacaagggcgagctgaaggccagaagctgtaaatacaccctccaacagtcttcagacattgatgtatcgaggctttcttgaataataatcgaatgaatggaacagtgtttgtggt

SEQ ID NO: 59872 - DNA, 582 bp, Zea mays
  Clone ID: MRT4577_154601C.1
ggccgcttttttttttttttttttatttgggttttttttctttttttttttttttttttttgggtttttttttttttttttcttatttttttgttttttgttctatgtttattattacaattttgtaaaaaaaaccaagcccccccgggggggggggaaaaaaaaagagaaaaaaaaaaggcgggggggggggggggcataggaaaaacaaacggggaaagaggggcagaatcatccaagggggacaaaaccccagggggggaaagggggggggggaagagccctctgcaggggaaaaaagagaggccgcctagccggtgttcccccaagacggggaaaaggccccccatggggaggatgatcgggggggccaccccgggcggggaaaaaaaagacggccccaaccagaccagtccggcgggggggggctcccccctaaaggggggggacagggggcgtctccagcgccaccgggaacccggggccccgggaaccgcttgcacgcgccgggcgggaacacgttcagggggaaaacctaaggaacggggggggggggcgcccccttaagggggggggcccctt

SEQ ID NO: 59873 - DNA, 1756 bp, Zea mays
  Clone ID: MRT4577_154602C.1
cttttgcttgttgttagttatattatggtgtaactcagtgttggttaccttcggcgtccgaaggtcctgggaaacgtgatttaatagtgtggctgcagtacaatgtgtaaacaggtatcctcgaactaaagtcggcattacagtggaccgggtgggcgcggaggacggccacgcctgcgaccgcaacgccgccgggttcgtctccgccgtcgacgtcgccgcctcgctgcctccgggctcggcgagcgtgtgcatcaagatcacggcgctctgcccgatcgcgctgctggagaaggcgagcgacctgctgcgttggcagaagaagcacccgtcgttcagcctgccgtggaagacgcactccttcccggtgctgtctgactcgagcccgctccacctgaccgcgtcggagccggcggcgctgacggcggaggaggagagggagctgcagctggcgcactcgcggctgctggcggtgtgcgcgcggtgcgcggagcacggcatcccgctgctggtggacgcggagtacgcgacggtgcagccggccatcgactacttcacgctggtgggcgcgctggcgttcaacgacgccggcgcggcggacggcgggcgacccatcgtgcacggcaccatccaggcgtacctccgcgacgcgcgggaccggctggaggccatggtgcgcggcgcggagcgggagcgcgtgcggctggggctcaaggtcgtgcgcggtgcgtacctgacccgcgaggcccggctcgcgaccgcgctcggcgtgccgtcgcccgtgcacggcagcatccaggagacccacgactgctacaacggctgcgccgccttcctcctcgaccgcgtgcgccgcgggtccgcctccgtcatgctcgccacccacaacgtggagtcaggccaactcgcggcggcgcgtgcccaggagctggggatccccaagggagaccgcaacctgcaattcgcgcagctgatgggcatggcggacgggctgtcgctgagcctccgcaacgccgggttccaggtcagcaagtacctgccgtacgggccggtggagcagatcatcccctacctcatcaggcgcgccgaggagaacaggggcctcctctccgcctcctccttcgacaggcagctgctccggaaggagttggtgaggagggtcaaggccatggtggcgggacgtgagtgaagtgcttgtcgagcctgtgtgtgtggaggtcgaccgtgaagctgggactgggacaaggacgagctaaaggctagaagctgtaaatacacccttcaacggtcttcacattgatgtatccggggctttcttgaataataatcgaatgaatgaaatagtgttcgcggtactagctagtccaagcaagcgaatagccccagggcagtgcaatcgttggtgggcccagctggtgacgggttagcgagaagcaatattcgaaatgagccatacaagcctccgaaaggccttgcgactcttttcgatagagctcttccaattcccgacctgcggcgtgcccccaaaacaaactactgcgccttagggtgtcgttcttacgcggattcggtcagggcgcttccggagccaggcatggagaatcgcgatgagtcccagcaggcgacgcaaggaggtcgaggcagtggtgttggagccggaagaggtgtgccgcgtcaaggcttccagtacagcggcccggaccaattccgtgctggttatgggggcggaaggcatcagtccagggggagaacttgg

SEQ ID NO: 59874 - DNA, 138 bp, Zea mays
  unsure (1)..(138): unsure at all n locations
  Clone ID: MRT4577_154603C.1
aaaagattgcatgtctcagagaggatatacaagagaccaatatgttactcgcacagtcagttcaatacgatcctaggactcaataatccatcttctttttggggtgctgtctcacactgntgncattgntgttttccc

SEQ ID NO: 59875 - DNA, 1639 bp, Zea mays
  Clone ID: MRT4577_154604C.1
ggcagatttttgaaggctgatggagcatataaaggatctagatcactaagatatgacaacttatttgattcttatccatcgaaccttgtatctattgcacgattccattcaaaaagggtgctcaaactgaaggaagctgtgctaacaagctaccgcagaaatgagatcaagttcacagaactaactttggatacattcagaatgctacagtgtttagagtgggaacccactgggtcttatcagattgctgctaaaggcgtccgagaaaatggcactgtaagtgatcagagtggaccctctggtctgattgatattcaactgtcaacagaaatatctgatggaagtcttccttcaaatcctcaaaaggcaatcatatatcatcctacagccgctcatcttttagcagttctagcaacaatttgtgaagagctctctcaagatagcattttactcatctatatatcagcgtcagggtctgctgagcagagttttgctagtcaaaagtttggctctagctcatctcgtgcgagggctgcctctgccttccccactgataagccaaactcgcataacagttctgataatcatctatggcttggcccccgtggaagtggaggtccaaacaatctttatccagatgatctaattccatttacaagatatccactgttccttgtaattgatagtgaaaatagccatgcattcaaggtcatacataattcagagaagggagaaccagctgctttattactttctcccaggacatcatcagccatgcctggagtagaatccacggctcacggaagccagtttacatacttcctcactgctccaatgcaagccttctgccaactagcgggaataacttctgacatagacactgatacatacgcaaatgcagagaacatacttttctctgctttggaagaatatgaaggaatactctgcacttctgttggattaaacaatgtctgggggcaaattttaccagacccatttctcagacggctgattctcaggtttattttctgccgggcagtgcttttctatttccactcagatgagcacgaatatctaccgacctgcttacctagtcttccagagtcagtctccccgcatgcagaggccataagaactcctatcctttcgcttgcagaaaaccttgtcgtcagcgaccggtttgacttccgagactccacacgcaacaagaaatgatgaccagcagcaataaccataactcatgccttctgtagatacctctgtggtaaatatagtccagcgatttgttgattgttttgcatttatacagccaacggagcaattagtcagcaccaattagcagcggcatccgcgcctggatggtgtgaattgaatggcgatatgaagaattttgacctgtctccgttgagcgtctgtacaagtttgtttaggtgttctctaatttgctctaggcactgtaggcatgtagccttgtcgtcgattttttttctattttgttgtcttggagaggacggtttgtaagctggaagaggcgtttttaaagtactctagaaggcagattgttttgtagagtttggttaactcaccatatttgacggcagtttacggttttccaattttcgaaaaaaaaaaaaaaaaa

SEQ ID NO: 59876 - DNA, 570 bp, Zea mays
  Clone ID: MRT4577_154605C.1
ccggccgggagcaccactcgcccccggcccaatctgtgtgcgcagtggccatggaccccatggtcctagtgctactgcatgcaacagtggcgcgtcctcctgtcctgaccgcagtccagttcgacacgggcgccgtctgccatgggtgtctatctgccggcagccttgtgtgctcgatcgactcgcatcctgtatcaggcagggaggcagaggcaggcagcccggcacagtggcggcgctcccactcgcagcggtggcggcgaccgcaggcaaggagggctcaagctgcggcagtgccctacggcaaaggcgagggagagcacgtgctgcatttcccactgctcttcactctcctctccagctctcccgcaacaccaagaagcaacagccagcgacaatcagcaatggccatgtctcagcaagagaaccgaatatgcatgctctcttatcttcttactactgttagctaaggtcccgtcgttctattcctgtgttgataatatatgtttgtaaggttgtctccaccaacgtgctctaaatttcatgaaaaaaaaaaaaaaaaaagcggcc

SEQ ID NO: 59877 - DNA, 404 bp, Zea mays
  Clone ID: MRT4577_154606C.1
aaccagcagggaaacaaaaaccaccacttttgcacaaacacgggtaatcttagtggacaacgccaacccatcatctcgacttggctatgcaatgcaacggggaaacaagaagacacacatgcctttggcaacataaatgaatccacggacggacaccctttccgggccgaaagacaaaggaggtgcctagcataacccccgagcctaatttgcggggaccaatttggtggcggaagcccccgcgttggtgctgaccggggcaacgatgtggtcaacgaggggctcgagccggcccctgcccgggaagatgggccggacgaaaaaacccgacctggaaaacatagagagggggccgttcttgagctccttcaccttgagctcaaccaaggccccggggtcgccgg

SEQ ID NO: 59878 - DNA, 132 bp, Zea mays
  Clone ID: MRT4577_154607C.1
atttgttcgtgtatagatggctcgaagtgttgcagggtttattaggactagttcagggacacgggtgctgaaatcgtgaacactcgcgatgcggtatagtgtttcactgattggtgcttgagtgagtactgg

SEQ ID NO: 59879 - DNA, 376 bp, Zea mays
  Clone ID: MRT4577_154608C.1
cctttgggctgatttatgtgcttgttaagcctcatgttaagctgcgtttctatgcggttgttactgcgtggctggcgacggagtaggtggctgttaaggagtttaggacgggtgttcttactacttgttctcctccttatgatcgccctgctaacggccgcgatgtgcttacttcttcggacgatatcctgatgcctattggtgagaagaatgttggagtgaatgttaatcttgcttgtgggcatgaggcgactgatgttactaagatgtaggctgaagtagttcgtaagggtattgcgctgcgtgttgatactgctgttccggtgctctgcgatgttgcggatccgtctggaggtttaatacggaatgcgtagtc

SEQ ID NO: 59880 - DNA, 440 bp, Zea mays
  Clone ID: MRT4577_154609C.1
caaggattatgcctcgcctaaaaaaatccctcccaaacattccctgccctggggggcccgggggcggggtttttttttttaattaaccaaagggtcccccaacttgaaaccgccccccgtggtttgcccttaggggccctttttaccccggggccccgaaccacttggccgggttttccggggcgatttcctttaaaagcgggggggcggggggcccccccccccggctgggggggggggccttgggggcgaacccccccctcttaaacaggccccgggtcccccggggggggggggggagccccccccttagggaccccttttccccgccgggggacccttggattctgggccaaatgttggtgggcctgggcccggaatggcgggcccccttcacgcacgcccgggggtaccctggcggcggcgggtttgtgccttcc

SEQ ID NO: 59881 - DNA, 479 bp, Zea mays
  Clone ID: MRT4577_15460C.1
ggggggggtgggtgtttttttttttttttttttttgttttttttttttttttttttttttttattgtttttttttatttttgggacttctgggacttctttcaaaaaacccttttttcgttctttttctcctatgccttctaaattatggggggggggggggggggttgttggggggacacggtggggtttgtcaaagctgggagggtgaaagggaggaatgggtgcagttggaagagggggccgggggtaggcaaagcgggcatggggaacaggaacaacgggtaaaggggcaagagggcgccaagggtaacatgggttagctggccaaatggggggagtggttgatggtgttaataagcggcaaagctcaaagctgctagtggggtgaacgggacaaatggctgaaggtaggcggggactggccggccgaatgggtatagggggggcgggtgagccgaataatccaaagcagccaat

SEQ ID NO: 59882 - DNA, 340 bp, Zea mays
  Clone ID: MRT4577_154610C.1
gccgctcggtcgcctcctgctggggggcacgggcggtcgaaaccctaccgccttcgccccctccctacactccattccacctcgccgtcaccagagggcgccgccgcatgtgctcgcggtcccaaggaaggaggcggcggcgcgattattctctgctttggtcgcgtctgcccggatctagtctggttccaggaggtgggggcgacatgtgtggggcgtcgacccttagcctgcgcggatcggccttggaggcatcctggctgtagtgagctcggcgctcgtatgtcactttcgggcgttgaggaacctggctgtgttgttcgcgcatcaagggggcttg

SEQ ID NO: 59883 - DNA, 2097 bp, Zea mays
  Clone ID: MRT4577_154611C.1
attcccgcaaagtcctctcctcgctggcttgctgcaaacccctaaaccaaaccaccccatatcaccaccactgatggcggcgcttccccttctccgccgcctcctggcccaccgccgccttctctccaccaccgccaccactcccgccgcctcatccagcaacccccctaccccagaggccgtgctctacgccatccacagcctctccaaggatccctcccaagcgctcgccgtcttccgccgctccgccgccgccggcaagcccgtaggctccgcggcatacaacctcatgctccgcaccctcgcctctcacccctcctccgcccagcgccatttctggcccttcctccgcgagatgcaggaggctggccactccgtcgaccagggcacctacctcgctgccctcgcctccttcaagaaggccagcctcaccgccgactacgcctctctcaccgcgcactacgacaagttccggaagggggacaagtccgccgccgccgccgccgcggaggccgtccgggaccacgacgccgcgggacttgatagcaggctcgctgacatcggtctccttccgctcacggaaaccgctgtcatcacggtgctccgggagctgagggagcatccgatcaaggctctcgccttcttcagatgggctgggcggcagcagggttacacgcacagctccgtgagctacaatgccatggcaagggtgctaggtagggaggagtcggtgcccgagttttgggagttgatccgggaaatgaagggtgccgggatgtacgtggatattgacacttacctcaagctgtccaggaacttccagaagcgtcacatggtccgggaggctgtggagctgtatgagctaatgatggatggccctttcaagccgggccagcaggatggacccatcatcatcaggcgcatctcgctggggccgtcgccggaccttgagcttgtcaatcgggttgtcaacaagtttgaggccgtctggggtgtcaagaccaaggagttgcttgatggggtccatagggcgcttacaagtaatgggttgttcgataaggctgcagagattgtgcaaactatgagggaccaaggccaccagccggacaatgttacatatagccagttggtgtatggtctttgcaaggccgacaggctggaggatgctcgcaaggtgctcgatgaaatggaggctgaagggtgtgccccagatttgaagacttggaccctgttgatccaagggcactgtgtagctggggatgtggacaaagctgtgcagtacttcaccgagatgattgagaagggcttggacgcggatggcgatttgctcgatgtgatattgaaaggtctgtgtagccatgaaaaggttgaagaggcttactctttgtttgttgagatggtggataaggctgagttgaggccttggcaaggcacttgccagcatttaattggtgacttgctgagggtaaacaaacttgaggaggccctggcccttctcaagacaatgaaaacctgcaagttcccaccttttgcggacccgttccctccttacattgccaagtatgggacagttgaagatgcaaggaactttttcaaggcattgacagtgaaaacttctccagcacctgctgcctacctgcatgttctcaagttgttctttgcggagggaagatattctgaagctcaagatttactgtacaaatgccctatttacatccgcaagcacccccacgtcgccaaactgtttgaatcaataaaaattgagagtgcctctgcctcttgattgggttcaaccaagcaatgattggtgaggctatggtgaacccttacctttgcttgctagctagctttctgtttttaagtagccttggtattgggtcttttaaagacatatggttcaactaagtcgaattttagtatatgccacttccagcccatgacctgctggcatattcccctataacttattagcttaagaggaaggtgccaactggcacgtccttgagactttttctttgttgttgtaatcattgcttctgcttgctagatcgttatacagttggattttccttcaaaaataaatacggccccgagtcc

SEQ ID NO: 59884 - DNA, 2526 bp, Zea mays
  unsure (1)..(2526): unsure at all n locations
  Clone ID: MRT4577_154612C.1
gagaaagtcttgatgatgaactgtccactgaaatcatagataaatgtgacgggataccattggctatcattgcaatagctagtttgttggttgaaagaccatgtgaggagtggtcaaaagtgtatgactcaatcagtcttgggaatggagacaatacaacaaagatattgtcctacagctactatgatcttccttcttatctcaagccatgtctactgcaactaagcatatttcctgaagactatcagtttgatacaaatgctgcaatatggatgtggataggtgagggtttagtccatcttgagaaagaggagggtagcctatttgtggttggagaaagatatttcaaggaacttgtgaatagaagcatgatccagccgatagaggacaaatatgatcggttggtagaagtgttcagtattcacgacattgtatttgatcttatccgtaagttgttgaaagatgaagacttcattacccttttggacagcagcgggcaacatgcatctcaagatagtttaagggagaagaaaatatgcgtgcctcgctctgactgcaagctacgccggctggctgtccgaaatcaccatgtgcagcgcttccctgaagacaccatggacatgccagaggcgctgaggtcacttaacattatatattgtaatattgcgattatgaccccacttcatagtttcagactctgtcgtgtgctatgtatagaatacagctatgtaccgatcagcctaaagcatctagggaagttgttgcatctcaagtacctagagctatatggcacgcctgtggatgaactccctaaggaaattgggcatctgaggtctcttcagacactgttattagtcaatactggactagatgagctgccaccggctgtttgctcgcttacacggctgatgtgcctgatagctgaggggttcaaaaggttgccagctgacaagatggggaacctaacgtccctggaggagctacggctagagagcgtagttggtcagagtgccacccaagccctagtggcagagcttggcaagctgacgaggttgagggtggtcaacatcaccttttcagaggagcttgaggagagcttgcaagaagcattggtgcaatctctgttcaatctgtggggacttcaggagctagcgctttcttctaaatggtggcagcagggaagcgctatgtggggagacttggagccaccaaggcagctcaggcgcctgattattaaaggtatcgtcttctcacgacagcctcgatggatcaaccgctcttgcatggcacacctctgcttcttatctctgacggtgctcgctgttgaagcacaggacctagataacctagcgaggttgccagagctccggtacctcaagctagatggtgtcagctggcctccaaggtatgatgctggcccgggcgacttcaggaatctgaggttctgcgatgtgggtacaatgctcgtgtttcatatgggcgccatgccaaggcttgaagagctggtgtttggagtttgtgcaggatactggagttgggaacagaatggtgtgctgttggagcagttcccaacaatggatgtgattgaagatcttgacttgggcctggataacctcctttcacttgagcaagtcacggtcatagtcaactgctcaggcactactgctgcaaaagtgcaggaggtggaggccgtggtcatgcgtgccatggaaaatcatgccaaccgtccaaccataaaaatggaacgagtaggtgaaaaattcatcttatctgacgaagagcgggaggatctgcttcagcgacgcattgaaaaggaaggccgcttcctcgagttcaaggataaatctgatgctttcttcatcagacacctgcggttgattcgacatcttcgaaaatccgttatttcccacaactgtgcgggtgccagcatgtgcgaggtgcggaaagtggaagcagctcggagacatgcagccgaggttcatcctaaccatccaagtattgaactgatcagaaaaaacaatgacgaaatggcctcctcatctgaccatcccaacacagagctcaggaattgataactcggtatgtccaatccttccaacccagccgcagctttcacgtcgtctcatcccttcctacgggcttggagatttcgagtgatacagacgacatgattgtatatcgtatgtttatgacttaagtattgtgtggttaaaatttatgagtggacatgtatgattcaatgtgtggtcaagattgagataattggatttttgccactcacaatgttgtcttcttgttataattagcactgtgtctatgcttggaaacgaccatgtggagttattttttcccccattttctttcataagatgggctgtgtatttgcttaaaaaaaaaggaagagaatatctttgtatttgacctctagaggcttaaatgaagtgatcttccgggatggagataaaaaaaaaaaaaaaaaaaaaaaaaaaaaaaaaggcgnaggcgcacggtatacaggctcacggc

SEQ ID NO: 59885 - DNA, 249 bp, Zea mays
  Clone ID: MRT4577_154613C.1
aatataacaagggttgtatgaatcaatcgaagagacctgttatcaaaccacatggaaccacagaagatatcatactccatggcacatttgaatagtacagtttatcaagacatcatctggctgaagcacatgcttgctcgaggggagaataaaacggtgacacttgcctgacgactaaagaccgtcatgcgagcgaacgagtattatgtaccttatcgtgtggacatgcagagcctcctgcatccgtaa

SEQ ID NO: 59886 - DNA, 992 bp, Zea mays
  Clone ID: MRT4577_154614C.1
ctcgaggccggccgggcacccggctccagcggcggcagctgctttatttatttggttccaaccaaccaccagcaccagcagcgcgcagcttcacttgatccagccgccgccaccatatcatcgatcgcacgcacgtacgtactatacgttcaacggataacaacaagctagctgagaacatggacagcaataagcggctgggcctgggcgtgcagcacgggcaccacagccacaacggcaccatcgccaagccgccgccggcgcaccaccaccaccacgcacggaggaagcaggggaggccgaacggcggcggcggcaaggggatcaaggtggtgtacatctccagccccatgaagctcaccgccagcgccgaggagttccgcgccgtcgtgcaggagctcaccggccgcgactccaacgtcgccgaccacgacctcgacctcgacggcgccgcctgctacagctactcctccttccaacgcgtcgtctccccgacggcgacgccgacagagacggccgccgcggcggctgctgctgcggcgggaccccgcgctctgtcgccgacgacgaaggacgccgggccggtccgacgacgaacgcccgagtatgatggcgccgccatggctgagccgccgccgccgccgcgttccagggcgtgttcgagtacgacgacgaccaccagactgcagagagcttgctttacggccaggactactggtagtaggaggaacttatcatatgctgaactgaacctcacgtacggcgggaattttctcctacgatatggtttccgatttcacgacggaaacacagcaggtcgagcacgcgtacgtacgccgtgtagatttgtacgtagcgtgcattatttatttacataaggtttctctgtacgtatgtgcgcggtccttgttctctataggctggctgcaccgatccatccatcatatctttgtacttgatatgaaaaacaaaatatatatgttagcagttaa

SEQ ID NO: 59887 - DNA, 427 bp, Zea mays
  Clone ID: MRT4577_154615C.1
aaccaggggccattttttcttcggggattggaaaacaaaacattacaggggattttgttaaaccccgggacatttacaaggttgtttttaaaaacgaaaacccctccccaaaaacaatgtacaggccgggtcctggtgccacagcttgaaaacccccaaatttgtctgactgaaagaaggcgggttccccccaatccaccgagcaaagcagggggtaacacccccccacccccccccgtccgtgcgcgggggccaaaaaaaacccccgaggccccccgcggtccaaaaaaaccggggggggaaaagggaattaatcgacggccggccgggcctaaaactagaggggggaggccaggtgcattttttcccccccaaccgcgacggggttggaaaaccgcttcaacgccttacccatccaggggggggg

SEQ ID NO: 59888 - DNA, 181 bp, Zea mays
  unsure (1)..(181): unsure at all n locations
  Clone ID: MRT4577_154616C.1
cgtccgcccacgacgtccgggggggcntnggggnngggggtaaaacaaacgcgtgggcgcacccgtgttctgacacgttggtcgaccctcctatatccgtccggctctctcgggcgtgacggtaggtactctacagcgtgatctttttttttcancctccnnatctcaagggggggggggg

SEQ ID NO: 59889 - DNA, 717 bp, Zea mays
  unsure (1)..(717): unsure at all n locations
  Clone ID: MRT4577_154617C.1
gccggccgggatcataatagggcaggaaaagcgggcgattgccgccgtgggatccacacagaattattatggcaatttggaaattgcggtcatcaggtctggaacaaaaaggtgaggtgattgataaagaacctgaactgaaagagaacccttatgaagaaggttctctattggccaacgaagatgtaaaaatgtcagaagtctactcggccgttctttctgtcgacgtcagtgcgttaatggagatgttctctggaggtccactggaacacaaagtgatggagagagccggttgcgtcgactacttagctacagaatgggagctgctaaaccgtaatgtataccaacgtcatataaactttcggtttgacaaaagcttgtcaagatatggaggggaagcaacgaccactcagcaaaagtataacttaccgaaccaaaatgactggattgtcgaggaggtgatgaccctccaaggtgtccagcatgaagattactccagtatccaattgaagtaccacatgaccagcacgcccttgagaccaaacagctgcaggatcaaggttttgttagggattgcctgggtgaaaggcactaagcatcagaagaaggctgcaaagaatgtcatgatgaactccgccaacaggctgnaggagatcttttcagaagtcgagaaggaggtcacatcaaggaaaagttcagcttcaggctaactggcgt

SEQ ID NO: 59890 - DNA, 1327 bp, Zea mays
  Clone ID: MRT4577_154618C.1
ggggtaccctcgagccgccgggccggtgccatggacctggcaacactatcccctttcgccggcgccgctcccgctccgtcccacccgcgctctccagtctccacggatcgatcgaagcttccgtcttccggcgcgatgttcccgtgccgccccttggctccgccgcacctgccgcgtgccccttccctcgcgcggcttccactgtcgtcgctgcggccgccgtcgtcgtcgctgcgcgtggtgcggtgcatggcgaaggagcggcgggtacggatggtggcgaagcagatccagcgggagctcgccgacatgctcacccgcgaccccgtgctgcagcgcgccgtgctccccgaagccgcgctcggcgctgaccgctacctgtcgtcgctcaccaccatcgccgacgtcgagctctccaacgacctccaggtgtgcaaagtgtacgtgtccgtgtttggggacgagagggggaagaaggtggccatcgaggggctcaaggccaagaccaagtacgtcaggagccagataggcaggaggatgaagcttcgcctcacgccggagataaggttcatcgaggatgagtctatggagcgtggaagcaggatccttgctatacttgacaaactaaaggaggaaagggagcaacaagaaggaaaagatggagaggaagatgatgattcatatatatcagaagaagatgatggtgactgggatgcagatgagccagatgaggaggacatcatttacgtaaaatagcccattgtcttctaggaacttggccatcattcatccagaacacagcagttctcttcagagtttaattctgtgaagttcactgctcgcctgcttgtcgaagcactccaaagtatatcagcacttgaagaggtctacactctacagagacatctcttttgccaattgaagcaggacatatcacacccttgctgccatttagaagctggtcatgtccttttttatggcttttcaatgcgggggatatttcaaagaggaatttggaagtctttttttttcctgtccactgaattatgatatctgaccattgacgcaagacagtttgggctgatgctcattcctctgttatgttaactagcacttgtttaatttgtacttgcctagttatcttgctgtatttcagtctccatttcttctatggttttggtacagtatttcctctttctataagccattatgtaatagagtagcatcagtatgattttaatgataatttatcactctctcatctgatctaacaaaaacgatctggacaaagttacataaggccaaaaaaaaaaaaaaaaaagcggcc

SEQ ID NO: 59891 - DNA, 145 bp, Zea mays
  Clone ID: MRT4577_154619C.1
gggtaaaaatgattaaacaaacttttttaatccaggcctttaaacaccaaatacaaagaaattcataagtatttaaaccttttgaaaataaaattgaaaccgttttcataattaaaggggataacatcaacaaatttttcctaaa

SEQ ID NO: 59892 - DNA, 400 bp, Zea mays
  Clone ID: MRT4577_15461C.1
atacgatagcctcacataattagataaataaccacacaaaataagaataatcgttcgagtcaatctaatagcggaggcgcggactgtccaccacttttggcgtttaacaaagaccagcttagggtgtaccatgtgaatcagagcacacgttctctctgcactacagactctacagtgcggtagtttagtgatagatcatattaacggtattcggaggtttttcctctaatttaaatgggcttctgttacctcctgacggggacatgagaaaaacaaccgggctatgtttcaaattgcaaaactgaatgttttgttctgcaagcgattgcttgctctggtctttccttttaagtcataacagcacggcccatcatttgctgtggttcctgatgtcccgtcg

SEQ ID NO: 59893 - DNA, 578 bp, Zea mays
  Clone ID: MRT4577_154620C.1
cctcgaggccggccgggagtttctatccctagccgccaagctcccaagtcccaactcccaactgcccgtctgtagtctgcacacggcgtctagagcactccagccgcgcagggttgtaggccatccggcttccgccagccaccaggcctgcaggggcacagggcgctgagccgccgagcagcgagcacccagcaggccgagcggtcgagccaccaaacaacgagcacccagcgagcacccactgccatccctagcgccgagacgctgagcagcgagcacctagcagtccggccgagcggtgcgccgagctgagcggagaatcgcgcgtcacccacacggctgtcttctctcgtattctctggtttgtgcatcaagaatactttttattagagttcactcgaggaatgcaagaattaggataggtcaattagatcttttttattagtgtatcctgagtttcctctgataaggatcatgtgtaaccacctgggtcaattttactaaagatttttggccaccagccttaaatacatactataaaggttgattacgtcaaaaaaaaaaaaaaaaaagcggcc

SEQ ID NO: 59894 - DNA, 515 bp, Zea mays
  Clone ID: MRT4577_154621C.1
aaattaggggggggacccattcatcacccatgttttttttccgacaataaaatcccaagggggataaccccgaccgaactgacacaacggaggcaaaagggggtcatccctttttaggggggggggaacaccgtttttcaactaaaaaacccaaaccaactacaaatcccccgacccaaagttggcagttgacccatttttcctccgccggaaaaaaaaaaaaaaattggttccttaattaaatgggccggttttttttttaggccttttcctaaaacaaaatttgatcgaagggccacaccccgggccccttggccactttttttaagtggggaaaaaacttggaaaatttgtttatgggttccacccgctccttgaggaacccacttttaataaaatctggcaactgaggaaaattgcaccttgttgccacaccaagcagggtgggcagtttttaattgaccaactttttcaagggcaaaaccagctccataggggacaaaacattttctttt

SEQ ID NO: 59895 - DNA, 461 bp, Zea mays
  Clone ID: MRT4577_154622C.1
aaaaaaaaaaaaaaaaaaaaaaaaaaaaataaaacataacaaaaaaaaaaaaacaaaaaaaaaaattttttctatctccatccaccacccctcgtgggggcctttttctgttttcctcccccattcttggcctctcttgaatcctttttcggggggggggtcttccttttataaggagttttctaacaaaccccctggccgttctccaccttcttgacttggaaaacatccccgtttcccccctttttgttcttcctgcacatccccctcttttcgccttttggaataatagcgaggccggccccgccaatcgtcccccccatttgcccccccttaagcgcggataatggccccctcttgcacagcgttattagtgcggggggtggtggtgtatcccccggtggtttctctttttttcatcaccttcttgccccctgcttctgttttttccctctcttttt

SEQ ID NO: 59896 - DNA, 459 bp, Zea mays
  Clone ID: MRT4577_154623C.1
caaaggaaaagagaaacctttgaaagctaaagctcaaaactaacaaaaacagttttgttcccctcgaaaaattaaaacaaaaatgcttttggcagtcctacgggcccccgaataaaacagaacacattggctgaccgttggatggaaatacccctatttggagggaaataaattttactgggggccctaatgggggtaataagcccccccggaggagttgagtgggttgaccctttaaagggggggggccttccttggttaatatgaaactttttgggggtggacccttttatgctctttggggggcggttgggtggactaaacaagggaaggatcggcccggttggcaacatggccctttttgaacagggtttttttttaataaccctaaactccttttttaaggaccccacttgaaggggcttgggacctttttgggctccttttaagaagggtttt

SEQ ID NO: 59897 - DNA, 423 bp, Zea mays
  unsure (1)..(423): unsure at all n locations
  Clone ID: MRT4577_154624C.1
cacgattggagttcatgcatgctttttaaaacccaaatgccaaggggcccattaaataaaatcgaaacacacacgggacccagaaaaaatccagtaacacgcgctacattgtcgctcaatgcgtgatctggtacatcattacttaaatcttctactaggaggggactgtttcttgggactcgacttgaccaaactggacttggcttcctccaccttattgtggcaccccagtctcgacggaaacccacaccaggatgaacagtattngcaaggatcccttgatgaccattcagatccaaactcccttggcacagacgctctagatatacggacgctccagtctaaatgtgaatcccggaccaacacactggaggcataccaaatgaaagtatactgagtcttaccacagctatgagtagtcat

SEQ ID NO: 59898 - DNA, 160 bp, Zea mays
  Clone ID: MRT4577_154625C.1
ggcaatggaactagatgaacaaccttttgatgcaaacataccagattagggaaaataaagtgctcgtccgggtaaatcaagggatgttcaaagtgcttaaatagcacttggttacatgaaacagaagggtatggtacctggtgttattctttacaatgaa

SEQ ID NO: 59899 - DNA, 1099 bp, Zea mays
  Clone ID: MRT4577_154626C.1
caagaaaataagcttgctggatggggatatagtgctggaggacttctggtggcctcggcaattaattgtcgtccagatttgtttcgtgctgctgttttaaaggtccctttcttggatgtttgcaacacccttctccatcctattgtacctcttacagccattgattatgaagagtttgggtatcccgtggattatgaggaattccttgcaatcaggaagtattctccttatgataacatccagaaggatgttccttacccagctctgtttgtgacatcatcattcaatacaaggtttggtgtatgggaggcagcaaaatgggttgcaaaagtccgtgaatttactcaatatgatccagagaggccggtatttctcaacctgacaacagatgttgtagaggagagcaagtatttgcagaccagagaattatcattggagaccgctttcctcattaaaatggtctgcagtgtgtgaacaacatgtgtcttattattctgaatcaaaccctgttggtcaaatatgggaagctgaggcaacaatgtcagtcctctccatcctaggcacctgagctatttaatcgattaattggagctttatgagcttttgcagaattcatgaagaatttgtatgtccatatttcctaaatcatgaggtatcttgttacgtgccatctatctccagatgacatggttttatgccactacttacaatagtggcttgtgcctagtggtattatgctcatttgtgagtgagtccagatatcccgtggaacaagtccacaaacatacggttatagagcctctacattatactgcaatgaaatgttgataccctccatgatagtaaaagttgcctttgtatttggaagcatccaacttaatactatttaatagtatccaagcatgcactgcgccagagtcagaacagaacacatagccaccttcttgttacaatggtagggatcatcagttgtatgcaggaccatccgattcttactgatattttgtcacttgtcagtatggggatatgttgcaaatgtaccgcagtcgtgtaagcacgatatgtttgaagattcggttggaaaatattcatcctatgc

SEQ ID NO: 59900 - DNA, 233 bp, Zea mays
  Clone ID: MRT4577_154627C.1
ttcggttcgagctcttagcgtactacctcaacgccaatcccgtcccgatcttcggcacctctgctgagagcgagaagagatggccgtcaaggcagatgggccggcaatcggcatcaatctcagcacgacctactcttgcgcatttctacaaagggtataacagatcgagaagcttcatcagaggcttcctttccctaaaagcctcttgtatagagaactaccacataactaat

SEQ ID NO: 59901 - DNA, 246 bp, Zea mays
  Clone ID: MRT4577_154628C.1
ggtccggaatgcccaagccttcgggtctagaacgggagccggccgttttaaaggttccagcttaccttccccttccttccaaggtattactttttttttggggcaacttaaatcaaattaattggcggcggtttaccacctcgtgacctggaaaacccttgcggtacccaacttaattggcttggaacacaatccccttttggcaggttgcgttataaccaaaaaggcccgaacgatcggcctttc

SEQ ID NO: 59902 - DNA, 476 bp, Zea mays
  Clone ID: MRT4577_154629C.1
gggctaaacccctttccccaaaggaaaccaaccccaaagttaaaaaccccaaggaaccacagtgggtccaaaatcctaaaggaaaaatgcccaatttcacaagcggaaaaaaaaaaccccggtttagaacccaaaaaaaggggacggggtctttaaaaaacaaaaaacattaaaacggggccatattttcataaaaaaaccccagggcccatccaaaaaaacccttttaaaaaagcaaaaactacctgacctaaaatcaaaaaacttttactttaaacaaaaagattttttaaaaaaaaaagatttcctcctacgaaaggaaaaccaaaatcgccaaaagaacaaatcgccctacaaaatcaaaaaaaaccccccccgcattaaaaaccccccaagtaaaaaaagaacctgtgtaaaaaaaccccgcccacaatttaataaaaaaaaaaaaaacaccaaaaaccccaccaaaataa

SEQ ID NO: 59903 - DNA, 608 bp, Zea mays
  Clone ID: MRT4577_15462C.1
ctcgaggccggccgggaaggcttatcatctgagtgactgataccttctgtattggctcgacccccaccgattctcgcctgctgacacatggcgacctgccgcgactgctctctaccgccgctcaatcccacccagctctgcctgtcccgcgcttcactgacccagccgaggataggacttgccctgagcatggttcgtcagcgtgcccaacggagcattgtgtgccaggcggcgagcaacatctccgactaccgcgtctccgacatgcagaagcgaattttgatgaatctcctccccctctgcgacatctctttgaccaacggctccatgatcgccccctagtgagacttcttctgccctgccgactgcggataacgccgattgagattacctacgcataaggactaggtgccttactacatcacatgggaagcgtggctctgaacttacagtcccaactaacgaaagttctgggaggcactcaagggagaccccacatacctggaggggtattaggacgacaggctggccagctacgggatcaacgccgagcggactcacctcggatgcgtcgcgccgtgaaattccttcgataacaagatcatctg

SEQ ID NO: 59904 - DNA, 367 bp, Zea mays
  Clone ID: MRT4577_154630C.1
ccgtgcggtttgtgtcttgctgctctcgtggtgaactcgttactccagtgttctgcaatattaagcagaagcgattgtattggttgggtcgtttgtcagctaattgaaatgcgatggacatttactagtaaaaaaaaaaaaaaaataaaaaattaaaaaaaaaaaaaaaagacataaaaaaaaaaaaaaaaaaaaaaaaaaaaaaaaaaaaaaaaaaaaaaaaaaaaaaaaaaaaaaaaaaaaaaaaaaaaaaaaaaggggggggccttttaaagggaccaaacttaacaacccgggcctggcaaaggaaaagctttttattgggggccccaaaataaaattcctgggccgctgtttaaaacccctg

SEQ ID NO: 59905 - DNA, 220 bp, Zea mays
  Clone ID: MRT4577_154631C.1
aaaaaaccttggtcattattaaaggccccaaacgggggtcccctttaaaaaagtttaagggtttacctaaaatggctcttgaacagggggtgaaccaaacttgctttatgccacaacttacataaagggggacagggccgcggggttttacttattgatggggggcttcctcacctattaccgttgttgttcccataacttcaaaatccctaagggggga

SEQ ID NO: 59906 - DNA, 865 bp, Zea mays
  Clone ID: MRT4577_154632C.1
gttgaaggtaacgacctggtttgcgagtatcagctgatcagcagtctggaatcagagagcttgtgcagaaaatgtaagagttatggactcatggcagatgcagtagcatgagatgtcttcataattgttgtgtacatcaggttctgtggtcgcccctattgtttagcgtgagagtttgggaaaaaaaaagtagtcgtaaattgagaaatttgtaaattgattagtaagctcactgcaacactagctgttttcctagttttcattcatttttgggtctggttattgttatgaacggaaagaattttcggttttcgggcatgggtacctcagttatatttggtctggttatggtacttactggtggtgcatgtttgtgtgagtgcttagagtttaggctatggcctgatcatatatatgaccctgctttaaaaacactgtttttgtatcgtagactattgttttatagtatgttattaagtattacaggagcttcgttactagaaaaacttcgacatagatcaatgaaagcacgacgaagcaagctttgttacgttgtcacagtaagtcgatgtagggagaatgtgttgttcaagctgctgagtgcaaatgataatattgtccctgtgacatttgtaaatcttgtatgtaatctttgagggtatgaatgtaatatcgcacgaattgtacgattgcttataaatagatgatcaatactgttcacactgaattgagattgcattcacgctttcgctttcaagcaagccgaatatgcgaatgtaatgtaaaaaaaaaaaaaaaggacggccgccgactagtaagcgcgccggcccggccaagttaattccggcgcggtgcgtgcaggggg

SEQ ID NO: 59907 - DNA, 2096 bp, Zea mays
  Clone ID: MRT4577_154633C.1
gtgcttataggggacggcaagacaaagaaggttgtactcctttacactgggctgctattcgggggaaccttgaggcatgcactgtgctagttcaggttggcaaaaaggatgatttgatggtgaaagacaaaactggcttaactccagcacagcttgctgccgataagaatcatcggcaaattgcgtttttcctcgacaacgctagaagggtacatgacagaggatgtggtgcgaacaccagatttgggaaattgtcaaaattaggccttgcaccttttctttggtgcaccattattggcatgcttattacatacgtacactctgttatattaggacaatatgtcatgactatgacagcaccatttgggatgttcgcatggtcaggagtttttcttgcaactgctgggttggtcatgttctataaatgtagcaggaaagatccgggttacatcagcataaatacaaggggctcgcaaaatcaaagggacgatgaaccactgctgaagatggagttagaaaatcctgcgcttctttttggcaactggtcacaactttgtataacctgcaaaatagtcagacctgttcgttcgaaacattgttctacatgtgatcgttgcgtggagcagtttgatcaccattgcccttgggtatctaattgcataggaaagaagaacaaatgggaattcttcatgttcctcaccttagaagtttttgcaatgatcattactggctctgctgccattataagacttgtaagggatccagattctccatcatcttttggtgcttggattcattattctgcgtttcagcatcctggggttgtttcatttctcgcattggattgtttccttttctttggagttgcagttcttacagtttctcaagcatcacagatagcaaggaacattacaacaaatgagatggcaaattccatgagatatgcatatctcagaggcccaggtggcagattcaggaacccgtatgatcatgggattcgcaagaactgctctgacttcttgttaaatggatacaatgaggacactgaacggctagaccagacattgcacactgatgaggagatgggaatgatacagatgacaagagcggtttcgcagaatggtgacaatcatttacatcatggtaatggcacggaacatagttgcgctgattcacaggcaagcccaaaacctcatagccaagtgggttcgcctcagtgttgtgatcacagtaagaggactgataggacactgttgggcctaggtttgggccttgggcgaaacagtgcatcccggcagtatgttcggtctcttatcccattgtgatctatcatttggatatcatgtgttcgtttcagtgtagattggatttgttcactgctccggccccatcttttatacgtgcccttgacatggttcaccatgtaccattggctggtcagggacattgttgggccattagcacaggaatactgagatatatctagtgtttgtagttttggggtgaactcagagaagttgaaggtaacgacttggcttgcgaatatcagctgatctgcactcgggaaatatcagagagcttgtgcagaaaaggtaacagttatgggcttatggcagatgcagtagcatgagatgtcttcataattgttgtgtacatcaggttcagtggtcttgggggcctccttcttctgaaggtcttaaaaacacggttaaccatttattttcagtatgttattaagtattacaggagcttcgttactagaaaaacttcgacatagatcaatgaaagcacgacgaagcaagctttgttacgttgtcacagtaagtcgatgtagggagaatgtgttgttcaagctgctgagtgcaaatgataatattgtccctgtgacatttgtaaatcttgtatgtaatctttgagggtatgaatgtaatatcgtacgaattgtacgattgcttataaatagatgaacaatactgttcacactgaattgagattgcattcacgctttcgctttcaagcaagccgaatatacaaatgtaatgtacatcatgtatctctttgttaatatatgagatgtatcttgatgttgtttggcc

SEQ ID NO: 59908 - DNA, 106 bp, Zea mays
  Clone ID: MRT4577_154634C.1
aatcaagtattcggcatgtgcagatgaaatacgaaataccgatgtgcagaacagggaatcaagtactggacatggcacttacgtgaccagccatcctcgcccactt

SEQ ID NO: 59909 - DNA, 2731 bp, Zea mays
  Clone ID: MRT4577_154635C.1
acatccttgagcatggagcagacataaatgctgtggatcacactggacaaacagcacttcactggagtgctgtacgtggtcatattcaagttgctgaactacttctgaaagaaggagctaaggtggatgctactgatttatacgggtatcaggccacgcatgttgcagcacagtatggtcagactgcattcatttaccacattgttgcaaaatggaatgctgatccagatatccctgataatgatggaaggagccctttacactgggctgcttataagggatttgcagactccatacggcttcttttgtttttggatgcttataggggacggcaagacaaagaaggttgtactccattacattgggctgctattcgggggaatcttgaggcatgcactgtcttagttcaggttggcaaaaaggatgatttgatggtgaaagacaaaactggcttaactccagcacagcttgctgccgataagaatcatcggcaagttgcatttttcctcgacaatgctagaagggtacacggcaaaggatgtggtgcgaacaccagatttgggaaattgtcaaaattagggctcgctcctcttctttggtgcaccattattggcatggttattacatacacacactctgttatatcaggacaatatgccatgactacgaaagcaccatttgggaaattcgcatggtcaggagtttttcttgcaactgctggcttggtcatgttctataaatgtagcaggaaagatccaggttacatcaacataaatgcaaggggctcgcaaaatcaaagggatgatgaaccgttgctgaagatggagttagaaaatcctgcacttctttctggcaactggtcacaactttgtataacctgcaaaatagtcagacctgttcgttcaaaacattgttctacatgtgatcgctgcgtggagcagtttgaccaccactgcccttgggtatctaattgcataggaaagaagaacaaatgggaattcttcatgttcctcactctagaagtttttgcaatgatcattactggctctgctgccattataagaattgtaagggatccaaattctccatcatcctttggtgcttggattcattattctgcgtttcagcatcctggggtggtttcatttctcgcattggattgttttcttttttttggtgttgcagttcttacagttgttcaagcatcacagatagcaaggaacattacaacaaatgagatggcaaactccatgagatatgcatacctcagaggcccaggtggcagattcaggaatccgtatgatcatgggattcgcaagaactgctctgacttcttgttaaatggatacaatgaggacactgaacggctagagcagacattgcccactgatgaggaaatgggaatgatacagatgacaagtgcagtttcgcagcagaacggtgacaatcatttacatcatggtaatggcactgaccatagttgcgctgtttcacaagcaaactcaaaacctcatagccaagtgggttcgtctcagtgttgtgaccacagtaagaggactgataggacaccgttgggcctaggattgggccttggacgaaacagtgcgtcccggcagtatgttcggtctcttatcccattgtgatccatcatttggcgatcatgtgtttgtttgactgtagattggatttgttcacttattctgttatacgtgctcttgacatggttcaccatggctgggcagggttaacgttgttgtgccatgagctccggaatactaagatatatctggtgttgtagtttagcgttgaactcagagaagttgaaggtaacgacctggtttgcgagtatcagctgatcagcagtctggaatcagagagcttgtgcagaaaatgtaagagttatggactcatggcagatgcagtagcatgagatgtcttcagaattgttgtgtacatcaggttctgtggtacccctattgtttagcgtgatacgagtttgggaaaaaaaagtagtcgtaaattgagaaaattgtaaattgattagtaagctcactgcaacactagctgttttcctagttttcattcatttttgggtctggttattgttatgaaccacggaaagaattttcggttttcgggtatgggtacctcagttatatttggtctggttatggtacttactggtggtgcatgtttgtgtgagtgcttagagtttaggctatggccatcagatcatgtatatgactatatgactgtgtaaaacactgttttttatctgattgtgtaaaacagtgtttttgtatcgtacactattgttttatagattgttattaagttttcttagtgcttcgtttttaaaaatccttccccatagatcaatgaagccccaacgaagcaacctttgtaacgttgtcacagtgactctatgtagggagaatgtgttgttcaagctgctgagtcatgatgataacattgtccctgtgacctttgtaaatcttgtatgtaatctttgagggtgatgaatgtaatatcgtacggattgtccgattgcttatgaatatatgctcgatgctgttccctgttgattgagtttgcatccacgctttggctttcaagcaagcccaatatgcacatgtaatgtacatcatgtatctctttgttaatatattagatgaatcttgatgttgtttcacccaccagcatggtatgacagggcggccgctcgcgatct

SEQ ID NO: 59910 - DNA, 287 bp, Zea mays
  Clone ID: MRT4577_154636C.1
acgcattcctcccatctcccaagacctcctcagacccgagaagcgcactgcagacatggacgccaccggcactggagctggagggaaggcgaagaagggagcagccggtcgcaaggccgtcgggccgaggaagaagtcggtgacgaggtccgtgaaggccgggctccagttccccgtcggccgcatcgggcgctacctcaagaagggccgctacgcgcagccgatcggcagcggtgcccccgtctacctcgcggtcgcctggagtactcgccgctgaggtctggagt

SEQ ID NO: 59911 - DNA, 299 bp, Zea mays
  Clone ID: MRT4577_154637C.1
tcggtcaacctggtggcctgcgagggctttgagcgtctggagcgagacgaggtgctggggaagtggtaggcgctcctgaggatgcccgtgttcatagccgttccttctcagtatacttgttaatttcactattaatactctgctgcagagctactcggtctactacaagcttgactaaagggaatgcgtgctatacctccattggaagaacatgccccgtattgttttatcggtatgtgctttatgttgacttcgagagaatgatcgtctcttgcaaaatgattcttgtgactttctac

SEQ ID NO: 59912 - DNA, 612 bp, Zea mays
  Clone ID: MRT4577_154638C.1
atccgactccccctctgtcctcgcaagccgccgccggtcaagtcctgtccctctcccttgtctggttcggatcgtcgttgctagccaggtgctggatccgtagcggcggcggcggccatggacaagagcatgctcggcgacctggacggcctccccgaggaggacaagatgcggatggccgccatgatcgaccagctccagatccgcgacaggttcgtgccataccaacgcatccgtctagtctagtctcggttgagttgaaacgaaacgcgcccctgtgctacacgcgtgtaataagagcagggagcgtgaattggcatctggggagtgccttggcgagttgatcgtggtgctcacctaccgtaggttttcagtgagaagtattgaaattcgcaagtgattggcacacttgtacggtgcattgcagcagaagcgtttcgataggtatccactagatctatgcgattttagcagcttgcaccttgtacgtcccagcattatccgaatgctctgcctatttcctttgtcgattggaatgtaagcattggtttcttaggtatctggctgtgtatggcaagctgttcagtgatagatagatactttagtttgtcc

SEQ ID NO: 59913 - DNA, 586 bp, Zea mays
  unsure (1)..(586): unsure at all n locations
  Clone ID: MRT4577_154639C.1
tctgtttagggtagcggctgggcattcggaatatcctaatgaaactagctttctaaggacgactaggttgtaccgccatgaaaatctgacctcaaaggagagctgaattgggttaggctatctccagcaggtctcctatctcaccttcaatttcaaactctaccctgtaaatagtgttgtctacagtacaaacaatgttttgcacaaccatatacagtgtgaaacaatgttttgcacagcattacccctcaatgacaagtgtctcttgtggaagataaaatctaattctgtctgattcatgtgttactagcagtgtttttaaggcgtcgcctangcgtccaggcggtgggccaacgcagaaatcctaggcgccttgcccgccttgctcgcctaggcgccgcctaagtgtccaggcggcagtccaacgccttgcctcgcctcgccttacgctttaaaaacactggttactagaacaattctaaggaccaagtaaagcttatcatcaaaagtaaatgagccacataattatctaaggcaagcatgttatagctgaagtgtagnttacccagcagagctatatctcang

SEQ ID NO: 59914 - DNA, 527 bp, Zea mays
  Clone ID: MRT4577_15463C.1
tgcgggcatcggggccatgatggtggacatgactgccttgcaactgtctgcgtctctaatactaggtgccgctccagcttcacatgcacagcattggtgctgaagatgataacaagaacaacaccccttatatgaaccacatccccatagaggaggtgtaggagcagatgaaatgcacccgataggggctgagctccagagagggccagcagattatagagatcttagatcccaacaggctcgatgagaagaaggatagctagatccttaagtgaattgggagtatgtggaacacactggcgtgaaggactagagatggctgccatatatggattttgcactcgacaacggtgggttgcaaggaacccggactggagggaactcttcggaatctatagagctctaggttataaactgcaccatctgctttattgtggagatcaatgacggaaaacgcagacgtcgtactcatggccaaccttgccaccaaaaccaaggtattaagtagaaggacgaaggtgtgagca

SEQ ID NO: 59915 - DNA, 626 bp, Zea mays
  unsure (1)..(626): unsure at all n locations
  Clone ID: MRT4577_154640C.1
aattcggcacgacggcacgagggaagggggagaccgagggcaaccaagcctgcgaggagcccgcgtccgaatctcgcgatccccaatccgcaggcctcgattcgccgatccggccgcggcagggggagagatcccgcagatcggggacctcgtgctgcttcgattcgagcttcttccagctgacagtcgcccgtccgccccccgtgctggtccgcgagctgctgtgtgctgcctggtggtaggtaggtggttaggcgaagcgggccgtgcccgggtgatgctgtccgtgaggcggcggcaggaggatgcgggcggccgcgtagcggcagcgcagacgcagcagctccggggcggactcggcatggacgacgacgccgagctcgaggagggggaggcctgcggggacgacaccgccttcgtcgaccccgacgtcgcgctctcttacattgacgaaaaacttcaagatgtacttggccattttcagaaggacttcgaaggaggcgtgtctgcagagaatctanggtccaaatttggtggatatgggtcattggtacctacgtaccagcgctcccctctccccaaactagaagtccacttaaggcagcanatgctacctcaaaatctcc

SEQ ID NO: 59916 - DNA, 831 bp, Zea mays
  Clone ID: MRT4577_154641C.1
gccggccgggtccggaaaaaaaaaaattgccttccattttcctgccatcgtcggaagtcggaacggcggccgcccagaaaaccccaactcccgcggcgcaaaaccctagtagaggttgcgcgggacactgctgtggttccggtgatggagggggaaggcgacgccagtggtagcgatgaggtggtgcagctggaggacgcggtggagctgctggtggagcacctcgtggtgccggtgctgccgcgcggccaggtagaccgggaggaggccctgtcgcctgaggctcaggaggctgtggcgcgtcaggtccacgcgacggttctcctgtacaactactaccaccggaagcagttcccgcagctcgagtttgccaaccccgaacggttctccatgtctgcctccctcagcgtcaccaacaaaaatctgctcatgtacctgaaccaggcgcagaaccgcctcggcaacggagtggggaccgggctctcggtcactgacaaggtaatcgtcgacgcctgcgacatcgctgaggcgctcgaccccacgaaggactcccccgagatgaccacgtggccgatctctaaggtcgctgttctgcttctcaatcggacaaagaaagagtgcgtgctcgagcatggctccgaaaccaagggcgtctggtcgatgtttgagaaagagatcacgacggcattgggtggttcgctcagcagtgacatgtcagtgcaggggtcgagtaataatccgtgggacttccttcggaaccgtacgtgcttcagcagattgcatattcagaggtggaactcaaacaggtatgaagcgtacaaatttgcgctt

SEQ ID NO: 59917 - DNA, 618 bp, Zea mays
  unsure (1)..(618): unsure at all n locations
  Clone ID: MRT4577_154642C.1
cgaactcgcggccgcgtcgactttttgattagaaatggccaaagggcacatttccctttcaacaatttcgttctatcaaggcagcacatatgcggaaacataattaatatttctagtttcacattttgtccactggattcgccaaggtgaaacaggaacatagtacttgtctactcatatcaattacaaaacagttgaagaaaaatcgaccctaccttactataaagtagggatcagtgtgtcaggaaagcagcaacaactcatttgattttgtcacttttaaatgtctccacaagcatacagaaaaaaccatccaggaacactctttttatcagtttggccatctccttcggcccctgcccatgcgagagtccattcgaaattcccttgagaattgctcattacgagcacaataaaacacattagcaagacatgagtaagtaacgaaaggaagccacacgagattgggaggcatttttctcgccaggaagaaccgcacctcagaggcggttgatggtggggaggcatttttctcagcaggaaatagcaacaaaaattgtagtattcctaagagagtgctgangaggatggggcttggtgtggcgggcacgcttgaca

SEQ ID NO: 59918 - DNA, 412 bp, Zea mays
  Clone ID: MRT4577_154643C.1
cttcccagtagtgctatcacgatgcacgttgttgttcaaccatcatcaggcaaatgaaaaccagatttcagaagcggattatatccacagagatgtatgtagtctgttgatgcaacacaactacataccaagtacctacagagcaggcaacactaaggcatagaaggatttaatgatatgcctctgaaatttgtggaggagcagaggagtaagtaggctatctggctacataggagcagaggaggaaggactgaaggagtacagaggaggaagatgtcagggagaaaatgagagaggagcaggggagagcggaggggaagagaacaggggattttgccctgggcttcaggtcatgatgattggcagtgaggaggtccagccttgggttatggctcaacgtcatgcacgagga

SEQ ID NO: 59919 - DNA, 2355 bp, Zea mays
  Clone ID: MRT4577_154644C.1
gttgttctactgcagattgctgtgccaacaagaactgacgtccctgaatatcaaaagctcacgagccaagtgcatgaaattgttgggcgcataaacggtcgatttggaacgttgactgctgtccctattcatcatctggaccggtctcttgatttccacgccttgtgtgctctttatgcagtcactgatgttgctcttgtaacatcactgagagatgggatgaaccttgtgagctatgaatatgttgcatgccaagggtctaagaaaggagttctgatacttagcgagtttgctggggcagcacaatcacttggagctggtgccattctagtaaacccttggaatattacagaagttgcagactcaatacggcatgctttaacgatgccatccgatgagagagagaaacgacacagacacaactacgcacatgtcacaactcacacggctcaagattgggctgaaacttttgtatttgagctaaatgacacggttgctgaagcactactgaggacaagacaagttcctcctggtcttcctagtcaaatggcaattcagcaatatttgcgctctaaaaatcgtctgctcatattggtattactatatttattattgcatacttgatagtcatggacattttttttccgtcataataactgggtgttctagtcaaaaaatggcacacttgtatccggtagtaaatctgtgctatgtagaggcacttcgatcagttgtttcatttgctcttctgctgctaccgtcgccagtcaggttgtctgcttacattttctagaagacttgatcctcatgatacatttgtggcatatcaagtctccagtaaagctttcactttcgaatttccacaagaaggctttctggacccatgaactctcaactactctatgagtcacattcgctgttatttgacagtaacaatttcaacaattcctgttatctatacatgaccggatgtagggtttcaattcgacattgactgagccagtcgaatcctctgggagaaggggtggtgaccaaatcaaggaaatggaactcaagttgcatcctgacttaaagggtcctctgagagccctctgtgaggatgagcgcactacagttattgttcttagcggcagtgacaggagtgttcttgatgaaaattttggagaatttaaaatgtggttggcggcagagcatgggatgtttttacgcccgacttacggagaatggatgacaacaatgcctgagcatctgaacatggattgggttgacagcgtaaagcatgcgtccgaatactttacagaaagaaccccaagatcccatttcgaacatcgtgaaacatcatttgtgtggaactataagtatgctgatgttgagtttggaaggctacaagcaagagatatgctgcagcacttgtggacaggtccgatctcaaatgcagctgttgatgttgttcaagggagtcggtcagttgaagtccggtctgttggagttacaaagggtgctgcaattgatcgtattttaggggagatagttcacagcgaaaacatgattactccaattgattatgtcctgtgtatagggcatttccttgggaaggatgaggacatctatgtcttttttgatcccgaatacccttctgaatccaaagtaaagccagagggtggctcagcatcacttgaccggaggccgaacgggaggccagcatcgaatggcaggagtaactccaggaacccacagtccaggacacagaaggcgcagcaggctgcatccgagaggtcatcctcatcaagtcacagcagcacgagcagcaaccacgactggcgcgaagggtcctcggtccttgatctcaagggcgagaactacttctcctgcgccgtcgggaggaagcggtccaacgcccgctacctgctgagctcgtcggaggaggttgtctccttcctcaaagagttggcgacagcgacagctggcttccaggccacctgtgctgactacatgcatgttcttggataggcagtaaatagactgaagttgaagcctccgtgctttaccagagacagagagaagaagaatattcattcctcgtatgcgcgacagagctacacccgtagctagtcagcgtgctgtacaatcatgtacaaaatttatgctcgtgataaaactgcgagaggggagctagcaaatgggaaaggataaaggagtttagttgcttctggtacgagacacaatcgcctgattttgagttctcttcgatttgttgtcctttaaattgcgcttttgaactggttggtattgttcacatctgaaatacgcctgcgccatgagacatgtcctggaacaagcaaggcttttagtcct

SEQ ID NO: 59920 - DNA, 478 bp, Zea mays
  Clone ID: MRT4577_154645C.1
gccaagggtctaagaaaggagttctgatacttagcgagtttgctggggcagcacaatcacttggagctggtgccattctagtaaacccttggaatattacagaaggcgcagactcaatacggcatgctttaacgatgccatccgatgagagagagaaacgacacagacacaactacgcacatgtcacaactcacacggctcaagattgggctgaaacttttgtatttgagctaaatgacacggttgctgaagcactactgaggacaagacaagttcctcctggtcttcctagtcaaatggcaattcagcaatatttgcgctctaaaaatcgtctgctcatattgggttttaattcgacattgactgagccagtcgaatcctctgggagaaggggtggtgaccaaatcaaggaaatggaactcaagttgcatactgacttaaagggtcctctgagagccctctgtgaggatgagcgcac

SEQ ID NO: 59921 - DNA, 1441 bp, Zea mays
  Clone ID: MRT4577_154646C.1
ctttatattttccattagaaccaactatctcttcatgtgcacagaattttggagaattcaaaatgtggttggcagcagagcatgggatgtttttacgcccgacttatggagaatggatgacaacaatgcctgagcatctgaacatggattgggtagacagcgtaaaggtgcgtctttttcgtgaataatgttctgttgcgtcaattaatatcaagcttctgatatttttttttctccagcatgttttcgaatactttacagaaagaaccccaagatcccattttgaacatcgtgaaacatcatttgtgtggaactacaagtatgctggtaagtgttgatcttccgagcattctttttaaagaaggtccgtgcagtaacattttatttccacctatttcaaagatgttgaatttggaaggctacaagcaagagatatgctgcagcacttgtggacaggcccgatctcaaatgcagctgttgatgttgttcaagggagtcggtcagttgaagtccggtctgttggagttacaaagggtgctgcaattgatcgtattttaggggagatagttcacagcgaaaacatgattactccaattgattatgtcctgtgtatagggcatttccttgggaaggatgaggacatctatgtcttttttgatcccgaatacccttctgaatccaaagtaaaaccagagggtgggtcagcatcacttgaccggaggccaaatggaaggccggcatcgaatggcagaagcaattcaaggaacccgcagtccaggccacagaaggcgcagcaggctgcatccgagaggtcgtcctcatcaagtcacagcagcactagcagcaaccacgactggcgcgaagggtcctcggtcctcgatctcaaggccgagaactacttctcctgcgccgtcggaaggaagcggtccaacgcccgttacctgctgagttcgtcagaggaggtcgtctccttcctcaaagagttggcaacggaaacagctggcttccagtccagctgtgctgattacatgttcttggataggcagtaaatagattggagcctccgtgctttgccagacaagcacactggagaggggaaaaacccattcattcctcaaatgcgcgacggagttacacccagcgtgttgtacaatcctgtacaaaatttatgctcgtgataaaactgcgagagggtggagcaaatggaaaaggataaaattagtttagatttagatagtttcgttgcttctggtacacaatcgacggctttttttatttctcattacaaattttttgagatgcgcttttgaactggttggtattgttcacatctgaaatacgcctgcgccatgagacatctcatattcttttttatctcagtaactaacagcacataacacgacaaaagaatttacctaaaaaaaaaaaaaaaaaagcggcc

SEQ ID NO: 59922 - DNA, 372 bp, Zea mays
  unsure (1)..(372): unsure at all n locations
  Clone ID: MRT4577_154647C.1
tttttattactcaaaatcggntgtgtctcgtaccagaagcaactaaactcctttatcctttcccatttgctagctcccctctcgcagttttatcacgagcataaattttgtacatgattgtacagcacgctgactagctacgggtgtagctctgtcgcgcatacgaggaatgaatattcttcttctctctggtaaagcacggaggcttcaacttcagtctatttactgcctatccaagaacatgcatgtagtcagcacaggtggcctggaagccagctgtcgctgtcgccaactctttgaggaaggagacaacctcctccgacgagctcagcaagtagcgggcgttagaccgcttcctcccgacgggggcag

SEQ ID NO: 59923 - DNA, 183 bp, Zea mays
  Clone ID: MRT4577_154648C.1
aagaaattatgatacgggatttcagttctcatagggttggcggggaggtcagaacataacaggtgaaacacgaatcaagcagaggcgccatggggttcacagatccacacctaaaccggtaaattaagctgcgagcgatacgtgataaactaagaccaccgctgagatgaccaccatcttatt

SEQ ID NO: 59924 - DNA, 368 bp, Zea mays
  Clone ID: MRT4577_154649C.1
ggcaaatatctactcttccatttatattcacaaacgcatgccgatgaggaggagggccaaagggattttgtaccgccccaggaaaacaccaatattatccattatcttctccatggcctaccacaaaacaaccaagaaaaaaatcctgtcattctccaagcgccactcataataagaaacttcgattcaccttaagaacacatccttgcagacacacagcccaaccaaccgactttcttcatagcacaataagaacagatctatatataacacattaaccgacaacatcaataatacagtccaaatatacaaccaatcaggtagtacaacctcaaacagcaaagatgatgccatccaaggatgcatcc

SEQ ID NO: 59925 - DNA, 606 bp, Zea mays
  Clone ID: MRT4577_15464C.1
ttctcatgcctcaggcaacagcaatcatgtcgaggcgttgagagtatatcttctgtcaaaatctctatccagattgaagaaccagttccaaagtggaaatggcgtgattacggtcgactgcatcgaaggttatccactaatcaggttacagctaggaaagcatgtttttctaagtgcaggggatttttatctggctagtcgatcctaatttttgtgtgcagcatcccaattttgactgattcacccatcattttgccgcaatcggcttaaacagcttggttccatttatgcattcaaattcactttgttaaaggtgaaaaatcccaatttatgatataccatgggactctccgttctttttttatttgtcgtgttttagttcaaaaatgaactagccggtgacaaatatttttttttattttgtcgtgttttagttcaaaaataattagccggtgacaaatattcgagtaagctataggttcccatacccctagtgaattatgagtagataacatgtatgtttgtaatctcttgggtgtttggtttttgaggattgatgtggtccatcaaattttgatgaatgaaaacatttcattttccagatcc

SEQ ID NO: 59926 - DNA, 484 bp, Zea mays
  unsure (1)..(484): unsure at all n locations
  Clone ID: MRT4577_154650C.1
cctgcattggagtttgctggggcagcacaatcacttggagctggtgccattctagaaacccttggatattacagaagttgcagactcaatacggcatgctttaacgatgccatccgatgagagagagaaacgacacagacacaactacgcacatgtcacaactcacacggctcaagattgggctgaaacttttgtattgtgagtttctcatttccatggcccaatatcattcggtggaccaagccccttcacttataattntgtttgcaactcaagttttctggtgattatccttttctttttcttgtagtgagctaaatgacacggttgctgaagcactactgaggacaagacaagttcctcctggtcttcctagtcaaatggcaattcagcaatatttgcgctctaaaaatcgtctgctcatattgggattactatatttcttattgcatacttgatagtcatggacattnttttccatcat

SEQ ID NO: 59927 - DNA, 365 bp, Zea mays
  Clone ID: MRT4577_154651C.1
atgagcaatctccagaatgaggccttagctttttttttttctttgttttttttctgcttcaaacataaacagtattatcagatccgaccattataacaaattaatggagggagccatcaatgatgggtggcacaactaaaattgttggcgttgtaaaagcacgctggggggaaggctgcaaccgttttacaactgaaacagttccagccattgaaccaacttgctttgacaaacgcaacaacggtgtaccaacaaacaatgattgagggctcacaccatttagatggcttatgagttacagttgaagattgaagtaattagctggagggttcaatgacctaggccgagaccaagctttgggcgta

SEQ ID NO: 59928 - DNA, 711 bp, Zea mays
  Clone ID: MRT4577_154652C.1
aagtacgaagcaagaaaaacatatttacacttgcaagaaacatttgccaacttcagaaatgcaggtcttaagttaaatccagaaaaatgcatctttggggtgaagaagggaaaattccttagctgccatgtatcaactaagggaatcgaggctaacccaagcaagatagaagcaatacttcggatggaaccgctaaggtccagaaagggtgcccagaggttgacagggagacttgcatcactaaatagattcaactcaagtgcgacattagttcaagaaaggcaagagggccagacgaagaaacaaacatcagtttactttgtctcagagttcttgagtccatctcagaagaactacatagaattggagaaggtactatatgctgtattgatggcctctaaaaagcttcgacattattttgaatctcatcacatagttgtaccttcgtcagaacccctgaaggacatcataagaaacaaggaagccacaggaagggtcagaaagtgggttgcagagctcaatgagtttagcattgacttcattcatcgttcttcaatccagtcccagacgtcagcagatttcattgatgattggatgccagaggctgaggacgaacaacgggtgctaaatgaagaagtatggacaatattgtttgatgggtcatggggaacctttggtgtaggtgctgcaacgctttcgtttttgccgtaa

SEQ ID NO: 59929 - DNA, 440 bp, Zea mays
  Clone ID: MRT4577_154653C.1
cggacgcgtgggcgactgcctacctcagctgccgtcgccatgggcagaaggcctgctagatgctatcgccagatcaagaacaagccataccctatgtccaggtactgtcggggggtccctgaccccaagatcaggatctacgatgctgggatgaagaggaagggcgctggtaagtcatgttacagggagcacacttggattcgctaaagggaaacaggaggattcgaatccccacttaagcaaccgcattaagggaagccgttccaggagcacgcttctaaagtgtgtcgtggttgcctagcaggtctgcgttgacaccatcaggaacaattgtgtcctcggtcttgtacttcatgtagtcagtgcggctgaacttagtgaaaccccactttctgctgtcaaagatcttttggccggcagggaacttgaacttagcccga

SEQ ID NO: 59930 - DNA, 403 bp, Zea mays
  Clone ID: MRT4577_154654C.1
gagagaatgaccggcctcatttctgtgtagcagcttatgccaatggaactgggaacttacacctcacatgatcccgggccggtgcatgacggacacttattgactgctgagctgcttgacgcaaacaaagaggatcgcgatcccctgaatccacaaggtgcttcagctgctgacacgggcgaggctaaaacacgccaacccttccgattgcggcagaggaacttgtggtggatgctatcttagcctggcttcattgctgctctatctgacatgtgtgctaaggttgatggcatagcgagtgtgacgtggattggactcttgactgtgtcagggatcactaaagcaacacatcttgcaaacagccggggtccgttctttctacaaaggtttgaccgggcggatt

SEQ ID NO: 59931 - DNA, 707 bp, Zea mays
  Clone ID: MRT4577_154655C.1
gccggccgggcttcgaatcatatattatccatcttttcttctacttctttctgcagctagtattccttcctccttcatatcctccgactgacgccaccttttttcactactatcatataattgatcgccgacgacgacaagaagatagatgatcctcctcagctcctccgatgacgagttctacgaggaagaagaggcggcgatgatgtagtagaccatcctccacctgatgatcgatgattgctgcgacgacgacatccttcttcttactaacgactcctccatcatattatacgaagtaatctactgctgcaacaacgtacatgatgccgccgccgccgccgccgcctcctaggacggctcctacgacgaggtggccgcctcctccaacaacaccaccgcctcctccgatgacctcctcaactgctgtgatgacttcttcaacgacgaccaccacaccattttcttcctcctcttgtttgctgactattatatcatcatcgatgtgctcctcctgatctgctgtactgctgctgatgtgatcatcgacgacacaacaccagagattcttcagaccttcttcatcatcaatgacttcttccctcctgaggaagaagagatcctccgcaagaaccaccggtgcttcttctaatgaggagctgcttctactattgactactattcgtggtgtcgactactatgatgac

SEQ ID NO: 59932 - DNA, 306 bp, Zea mays
  unsure (1)..(306): unsure at all n locations
  Clone ID: MRT4577_154656C.1
ctcagatccaaagaatactgtcttcgtagtcagtgggcggacaaggatgaactggctcgatggcttgagccctgtgaaaggctggggatctctgcagagcacggctacttcacaaggtggagcaggtattccccatgggagtcacccgacctgaaggtagactatggttggaaaaagatggttgagcctgtgatggacctttacgtggctgtaactgacgggtcatccgttgagactanagaaacagcattggtctggcactacgagggaactgatccagttttcggaccaagtcaggccaaggag

SEQ ID NO: 59933 - DNA, 594 bp, Zea mays
  Clone ID: MRT4577_154657C.1
ccggccgggaatgaaaagctaaatctggaatcgatccctccaaatgtgtcgaccttgctaagcatgtgaaactagcatgcccacacctaatattttcaggtctgatgacaataggtatgaaagactactcgtcaacaccagaaaattttaaggcattggttaattgtaagcttgaagtttgcaaggcccttgacataccaacagaacagtttgaactctccatgggaatgtctggtgactttgagcaagcgattgagatgggcagcacgaatgtgaggattggatcaaccatttttggaccaagggagtatccaaacaaaaggcagaactagtgagattcaacgcataagtgtcatctcaatacccagtcctcttgattaaccttttgcctatgtaagcatgatgctatgtataaatgcacatgtgaataggtaacatgtacaacctcatacaacactgtttgcagggggaggggggggaactctccatacaacagtacggcactgtataagaaattttgtgacatggccttgaatagaaatttcataaaaaaagttcttcctagcgaaaaaaaaaaaaaaaaaacccgcggcc

SEQ ID NO: 59934 - DNA, 506 bp, Zea mays
  unsure (1)..(506): unsure at all n locations
  Clone ID: MRT4577_154658C.1
ggnaatggctgaaacagnaccacacaatcctggggttccatcaactaatgttaactttatgcagattgagatgggcagcacgaatgtgaggattgggtcaaccatttttggaccaagggagtatccaaacaaaaggcagaactagtgagattcaacgcataaggtctactttgagaacctcaaactcggagaggattggaggggctaaaatctcctccttattcaaaattgaataaggaggggattttagtctcttcaatcccctccgtgttttagacttccaaactagccctaagtgtcatctcaatacccggtcctcttgattaaccttttgcctatgtaagcatgatgctatgtataaatgcacatgtgaataggtaacatgtacaaccccatacaacactgtttgcagggggaggggtaaccctccatacaacagtacgacactgtagaaattttgtgacatggtcttgaatagaaatttcataaaaaaaaagttcttccta

SEQ ID NO: 59935 - DNA, 514 bp, Zea mays
  Clone ID: MRT4577_154659C.1
tgcctgcagcaaggtctactgttcctggaggtcctagcgtggcatgcagcaccgccaaagctgttgaatgggacgcatcctggtccaagaaccttgatccatctggtcgtgctgctctgggtgttcacgatgctgcgtatgaagatactccaggggaagctcctgcctctgctgatccggtctcagacaagggccttcgtccagctattggcgaaagtttagtgacaccagttgcttcagccacagctgtctaaccttctgtttatcacacagcaatgctcgaccagcaaagtttgtgcatttcttgtgtcagtttccttcagatcatgtttgttccatcagcaagcaatgaagacatgcttgtgcttcatgcttgatagcatcatgtttgggttttcactgagcaataatactgtttgttttttatggactgaaaagactcgacagctttgtaaatatttgtcactggccaatttcctttggttgtttatgtgatttgcagattgcagtggtt

SEQ ID NO: 59936 - DNA, 329 bp, Zea mays
  Clone ID: MRT4577_15465C.1
cccacgcgaccgcccacctaccagcgggcagtaacacgccacgatcacgacacccccgccggggcgcgcgacccggacagaacgcgcccacccagcgccgcggccaaggataaccagatcacccacgacaacaagcagcagagggcaagcacggctcgcgcagaccacggagaggagagcgccctaccgacgcacagggacacgcagccggctaacgccgacgaaggaagacagagcacaggtaaaacaaccgagaaggagagcgaggccgggaaggacacccgaccgaggggaccaggcaaaaaaaccacaacacacgccagagcaag

SEQ ID NO: 59937 - DNA, 208 bp, Zea mays
  Clone ID: MRT4577_154660C.1
ccaaaatatatgtgattctttgttaaaaaaaaaaagaagaaataaaaaagggaaaaatatcccctcgacctgatcccccgccgccctcctgctttgatttttttcaggggccttattttttacgcgcgggcccagccttaattttaaagccgccgcaccgacaagcttttttccatttccctccgggcccggggttcctttgctggcc

SEQ ID NO: 59938 - DNA, 438 bp, Zea mays
  Clone ID: MRT4577_154661C.1
gggaaggaaaaggtcaaacccccccggaaaaatctcacaggcaaagcaagggagggccggggggggaaacccccaaaacaaggggggggaagtaaaaaaaaaaaaaggggggacgaaaaaaccggggggggggttttggggtttgcctacagggtaaaaccccactggggggaccccttctaaaatggggccgggggcccccctaaaccccttgggggggggaaagcccaggtccgcccaaaaactggaggggggctttttggccaaaaaatccctcccaagcccaagcccaggggccccaaacttttgggggccccgggcttgaagggggtgccctttttgggcagggcccccagggagggcacctccccaatgcacccaaaaaaatgggaattgcccccggaaaacccggaaagcccttttttgggtgggaacctt

SEQ ID NO: 59939 - DNA, 1392 bp, Zea mays
  Clone ID: MRT4577_154662C.1
ggcacgagcggatagatgtggttagttgctctactgtttatgataactttctgccgtttaggatgtctgtgggtaccagttcataaataggcgtgcgtgccgtggaccttggtgttgctacttgctaccaatggtcatggcgaagcagcagcatgacaaggggttgccgaagcaagctcgcaatgagcccgcgccgttccggctcgagcagtgttgccgctgcgacgatgcccaccgtcaggccgacgacgagtccatggatgctgctgggtctgctggcccgctgcacctgactctcggcccgctcggctcggccgccggcccccgctgctcgtgcggtgtcgcgccggcgccggcgccggcgctggcggcgcccgcaacggtggccgtcctccgcgggtcccggtacatgcggccggcgcaggagctgctgggcgaggttgtgcgcgtggccgacctggcggctgccgacgacgaagacgaggaccaggcgacggagcggctcgagggcggcggtcaccgggcagcgcgtcgggcggccgggaacgacggcgacggcgtccaggccaagctcctctacctgctcagcgagctggagagcaggcgggagcgctacttcggcgagctggagcgcgtggtgtcgtcgttcgagccggcgctgggcggcggcgcggcggcggcctacacgaccctgatggcgcgggccatgggccgccacttcggcaacctgcgccgcgccatactgcgcaggctcaggctccaagccgccgccgcggcgaggaggtctctgcggcgcggcggcgaggaccaggacgacgacgacgacgacgacggcgacagcgacggcgaggtgaccgaggagctggtggacaggttggctcggcggacgaagctggccgcggcggcgcgggcggagcaagcgtggcggccgctgcgtggtctgccggatggctccgtggccgtgctccgggcgtggctcttcgaccatttcctccacccgtaccccaacgacggcgagaagctgaggctggcggtgaccaccggcttgagcaggcgccagatatccaactggttcatcaacgcgcgcgtgcggctgtggaagcccatgatcgaggagatgtacaaggacgagttctccgacggttccgccgtctccagctacgacgacgccagcgccagcggcgcctcctcatcctcctgagtcttgaccacctcgccctcgagaaagtttatctagctaattcatcactcggttgattggtcctgttgctttgggattatattaatttatttatatccatgcttaatcatgtgcctctcttgtatttttttttagaaaaggacatactccttcaaaatctagcgacttttcgaaaaaaaaaaaaaaaaaaa

SEQ ID NO: 59940 - DNA, 110 bp, Zea mays
  Clone ID: MRT4577_154663C.1
tggatcttgtgggacttactcccttgacactggagcaaagcacaccctcatccacacgggatgtgaaggacccaaacatccttctggatgaaaaaagggttgccaagggt

SEQ ID NO: 59941 - DNA, 324 bp, Zea mays
  Clone ID: MRT4577_154664C.1
aataaaataaacaaaagagtaaccgaacaagcaagagcaaaaccatcgattacaaaccgaatggttgtctccatacatgtaggatcgatttcccattaaatgacgctatatgtgcctatgctttattttgctgtacaaaactaacaagggcgtgcggtttgaagacatccaatttaactacccggcatagagaactgattacatttgattctgatcaccctaaactcaatccagtgggctcttttttaacagcgggtgcttggaatactcatgccgttccaaaaattaatcccttgaaaaaacatccccctttataatctgggt

SEQ ID NO: 59942 - DNA, 405 bp, Zea mays
  Clone ID: MRT4577_154665C.1
ggagagcaaaaaataaagagtctcttgaagatgctcttaggaatagtatatataggaaccttacatggattagttaaaaaaacatagaaaaacgcaggattcaagaaatattccttcaagcagaaaataaatctgaaccaagtgcagcaccatatatttgtttgggttctactacgtaactaaaactaacaatgaaatgctgtttttttgcacagacaacagatgaaccagcagctggagcaatgacacattttcaacaacgacaacgatgaccagggatatatatatatatatatatatatatatatatatatatatatatataaggacctgcaacaacggcagatgttctgaggtagctagcgactggggggggacaaggggggggcctttggggtggccacc

SEQ ID NO: 59943 - DNA, 548 bp, Zea mays
  Clone ID: MRT4577_154666C.1
ggcaagtattgatcatataatatatagtagcatgcaacacagagataagcccacattatacgagcaagacgcatgaccggccatgggggtgccgcattggtgggtgtattgaggaagtgcggagcactacaaacatggcgggtggccccttctgttatgggactacaaaacaagacctacgccgcgggtaatttctttccagatcttatgatctcccaccctgcttgtgttgcacatatgagcttgtagaagctgatacaccacgcgctcagggaaccagctattattatgccttcactggggctttcttgaccctatcagatatccggtcaggtgcgatcgtgtgcgaattgaaccggacttgcccaccatccatcttttccttcttctttactatctgaacgacattctcgaccataaggccatggtcaacgccataatgctgttgatagggccttgcgctggttacgcataccaacacatacttcactgccttgatctaacttgtatcgatacaatcgcataaatacttcacctagcagccacct

SEQ ID NO: 59944 - DNA, 312 bp, Zea mays
  Clone ID: MRT4577_154667C.1
atcgatcgggcttccatggccgccaagcgccgcgcccggcagccaagtaccgaagattccaaagagttgggcctcaatgggggcaacgaaagttcccaccagggggaggaagggagccacaaagtccacccccttaaacgaggccagccacccttggccgccgtccccgaagattcttaaggccaaaaaatccgccaaggcctttcccaaaagaaccaagccgcccggttggtttgctttaaaaacaataacaacaccctccaagcgggtcaagaaaccttttccggcgtcggaaaaggaaaataaggcggg

SEQ ID NO: 59945 - DNA, 270 bp, Zea mays
  Clone ID: MRT4577_154668C.1
tcgaaagaaaaaacacacataaaagaaagttcttaaaaacagaaaccaggacctataaagcggggggaatcgaagaaattttacccactgtctatttcctgctgactacgatttcacgtttaaacaccgggacgagaagacttgccggcgaccataacttgcaacgaagcggctcaaaaaaggcatttacctttgacgatttcggcaccgatggataccgcggtttcggcgaaggtcgacaagcttcaaagctcggtcaagctctccatt

SEQ ID NO: 59946 - DNA, 538 bp, Zea mays
  Clone ID: MRT4577_154669C.1
gcctatcagctagccgcctgctctcctcttatcccatctccatctcatcctccaacatgcgaagcagatgactgctatgagcatggacctgcatggacgcggctgttccagtgtcccttgcatgcctcgcatctcgcgcctcgtcctgtgcgcgcgcgccgtgcgagcggctggacatcgctggcatgcaccgagaagtgtacgacggagggcaacgtgcgcgcgcactacaacgcgcagaggcagcaggtgacgtcattgatcctgacgcagcagtccgccggcgccctcagatcgagagagaagaacctgcacggtaagttcagaatgcagatgaggctgatgccgatcagctgcgctggcaccgcgacctgcctatacctgtcgcaactcgagggccccgtacccgacaagatcgacatggagtgaatgctcaacgacagggtgcagaccgcgaagctaaacaccatcgtgagatgcaacagcaacgggaggactgagcaccagacatatctgaggagcgacccaagcgccgact

SEQ ID NO: 59947 - DNA, 3947 bp, Zea mays
  Clone ID: MRT4577_15466C.1
tttcgagcggccgcccgggcaggtacatctcatatgtaatctaaaagatggcacctccaacgatgggttgctgccacgacaaggcagggttcatcaaagagaactggctgtatggtagcaattgttgctgctgtaggaacgcagcgaccaatgggtttggcactgctagtggattaagtaactgttgtcgctgttgtaggtaccatggtatatcataaattgggatttttcacctttaacaagtgaatctgaatgcataaatggaaccaagctgtttaagccgattgcggcaaaatgatgggtgaatcagtcaaaattgggatgctgcacacaaaaattaggatcgactagccagataaaaatcccctgcacttagaaaaacatgctttcctagctgtaacctgattagtggataaccttcgatgcagtcgaccgtaatcacgccatttccactttggaactggttcttcaatctggatagagattttgacagaagatatactctcaacgcctcgacatgattgctgttgcctgaggcatgagaaagaagatctggtgaaataatcggggtggaccttgcgatgcatatgacaaatgacatgtcatgtacgttgtgcgattcctcgccaagtactacgacatctgttggtgccatttcctttggaacgattggtgagccaagtgcgtctctaatatactgatcctgtgacttcaaaatctcttccagtgtgtttttgtcactgcccacagattcgtaatacacatcaactggatcagcaggttcaagctgagcagtctttcgtaattcctggatcctgttcacaacctcgcctgccactcccgcttcaatcgagccactccagcttcaaacaatgactggtcggttcgtagatccaaaatgactaaaacatcaccatctcctgcagcatcaatctccttctctgacacattttcaggacgcttgaattgtcggacaaccttgatatcatctagcttcaagcaatggccgaagaatgaaacctctccacttttttcaaatgctaagatctgctcctgagtcatcttcttcaccacatttgatacttttcccatgtcttttccaagtctttttcctagcacgctgaaattaggctcggctcgcagagaagcatacatcaaggggtcattacatggagtgacattcttaacattgatttcctccatgacatactcctttagtttgccagtgatgtcttcaaggaagtcattgtctggatgcacaaccaccatttccctcgccagttgtggaagggaacttgcaaaagtggatgctctcctcagaattacttgacaccttccgcaaattttgataaagaacttcagtaaagaatggtgtaaatggagccatcaccacgcaagttgttacaagaacatggtagagtgttgaaagagaaattctgcagtcttcttcatccagtacgccctttgaaccgtttgcggttcaaacgcacatatatgttagtaagatagtcaatgtattttaccaaatacggcacaaccgtgtaaagccgatatgcatccatctcctggtgaacaaagctaactagactttcagttgcagagtttatccagtgatccaacacattggatgacttcagaagtaccacttgttccatcggagaaaatgaggcaagaccctcaacttccagtctctttgcattttggacaaagaatctatatgcgttataccatgggaggaagacatctttcacaacagcaaagacaccagtacgtttgaatcgtagagactctgcacgtacaactggggagtttaccaaatatagtcgcagagcatccgctccaaactcgtcaatgagatccttgggtggaggatagttctttttactcttgctcattttcttaccatcctcagccaagacaagcccattgcatataagattcttaaatgcaggcttcccaaacagtgctgttgagagaaccatcagagtatagaaccatccacgggtttgatctaaaccctctgccacaaaattgccaggaaagttcttttcaaatagttcccgattctcaaatggatagtgaatgtaggcatatggcattgacccactctcgaaccagcagtcgaaaacatcatcaacacgtttgagcaccccaaactcaggtcctctcttagagggaattgtaatatcatcaacatagtgtcggtgaagatcagtgaccttgactccagataatttttcaagcttctctatagaatccataacaacaatttcttcaccatcttgacttatccacagtggaagtggagtaccccagaatctacttctgctaacagcccaatcacgagcaccttcaagccagttgtgaaatcttttttccttaacatagtcaggcacccagtaagtctccttgttacattccagcaactggtctttaatcttctcaaccttgacaaaccagcttggaacagcccgataaataagaggagtgcccgatcgccaacaaaatggataagagtgctcaatactccctttactaatgagtcttcctttatccttaacagcattgatgatatccttgtcggcttctttgacatatcgccctttaaagtcagatattttttcaataaaacatccgtcgtcatcaacagcaacaacaagtccagcagtctcaaatatcccagcagcaaggcaaacacgatggtcgtcttcaccaaaagcaggagcacaatgaacaacacccgttccactatcatccgtgacatagttatccgcaatcactctaaaggcagtcccttgaagttcaatgaaaaagtcaaatagaggagtatattttaagccaaccaaggataccccaggaatctttgacaacagctcatatgattccttgtccaaaccatcctgaacagcttcaatattgcttccctttgaaggtgcctgcttctttcctgaagctttggccttaactggtaactgcccaagcctggattctgcaataacatatactgctccatttgatttgtctttaacctttgcatatgtaagattggcattgacacacagcgctaggttacttggaagtgtccagggtgttgtagtccatgcaacaagagctgcattgtccgcatcgccaacaatagggaaggataccatcaccgctgggtcaggaacagtcctatagtccagtgctgcctcaaagtttgacagtgcagttttgcatcctgtgctgtaaggcatgaccttgaaacccctatagacgaggtccttctcccatagctgggcaaacacccaccagacgctctccatgaagttgaggtccatggttttgtagtcgttcttgaagtcaatccacctccccgtgcgtgtaaccatggcctcccactcggagacgtacttggtgacgatgctgcggcacgtctcgttgtacttgccgatgccgaggtcgaacacctgctgccggttggtgatgccgagcgccttatcgatctcgaactcgacggggagtccgtgacagtcccatccgaaccgtcgcgagacgtggcggcctcgcatcgactggtgccgggtgaccacgtccttgatggtaccggcgagtatgtggccgtaatggggcaggcccgtggcgaaggggggaccgtcgtagaatacgaactcctcgccgccctccgtgcgccggagctgctcgtggaaggcgtcgagcttcgcccacagctcgatcaccccctcctcctgctccgggaaggagaagtccttcccctcgcacacgtcgtccatggcctcctatcctgcagtcgcggcggcgctggaggtagctgggattccgagcgagacggggaatggggctagggtttcgagcgatggtgcgtaggcggcggcgaagggtagggaatgggattcgcttggaaggggaagacgagggtttagtggccagctgcctcgtgccgaatt

SEQ ID NO: 59948 - DNA, 402 bp, Zea mays
  unsure (1)..(402): unsure at all n locations
  Clone ID: MRT4577_154670C.1
ggcgaaaaaaaggggccatcgaaatagaatggggtggggctcccacatggaaaaggaagggctttagttcacaaaatngatacaaggtattgaatgggttaacctgtgccaaaaaaggggaggttttttgtttttgcttatttattaatttttttcactctttctcgtgcgtcgaaggccatattttttttctgcctgtgtccattttttattattttggcatgggaccacacaaaacgttttgtttattgggcgggggggctgctctgaactaaaaatatattggggccaaccaggttactttttacattttgggctctgccatatttttgttttatatactgtttaaagggggcaatgcgctttctaaacngggccctaaagggtgcatcaacagataac

SEQ ID NO: 59949 - DNA, 256 bp, Zea mays
  Clone ID: MRT4577_154671C.1
cgatttcctaccacccacaccccaggggtggggccctcattgttggtgcacgccgacagaccccaggctgactgctacgggcaaaatcctgcgcagaggagaagagagacggaccccgtaaccgtgtcaaatgcccccaacaccgtcggaagggacacgccaacgacgcccaccgataaagactcttgagcagacaaacaaaccaccaggacgggaggggaaacaactaaataaactaacaacagggggggggggg

SEQ ID NO: 59950 - DNA, 302 bp, Zea mays
  Clone ID: MRT4577_154672C.1
caaaaagaagaagacagggaacaagataggagcaacagcagcagcatcgacgaagggggggccgatgacgagcacccaagctcacgcgcgcgcgcaggcgacgccgccgcacgtcaaacgtggcaccaaacaacaagccaaaggccgcaccaatacaaagatcaagacggacaagccctacggcaacccaagtgaaccgactggcagcacagacccctaccgcaagatggacaagggaaaaggagggccccaccgagcggccaagcacacaggagcccaccccgcatgcagacggggacaca

SEQ ID NO: 59951 - DNA, 447 bp, Zea mays
  Clone ID: MRT4577_154673C.1
aaaacgggatcaaggcagggccaaaagggcatttcccccccccttaaaagaccaacaaagggggccaagcttcgcaaattccccaactaaaaattcaccagggcccaaacagcagcaagggccccaaaccccccgggggggccccttccaggccaccccaaaaaaaccccgggacacccacggggggaagaaaacaaaaagggtggggcaggaaacaaccacctctgacctttggaggcccacacaagttatgggcccgcatggccctaaaacccccggttttgaaggggggggggaaaaaggaggcttaaaatcaggggcccggttgggggagcccaaaaatccccgcttccccccgggggaacggagggcccaacaatgctggcaacggggggaaccaatatcccccccctttttttttttgggaaaacatggcccgagggggga

SEQ ID NO: 59952 - DNA, 192 bp, Zea mays
  unsure (1)..(192): unsure at all n locations
  Clone ID: MRT4577_154674C.1
ctagtagcgagagcaatggacgtaagatgtcttctnnttcttngttcganttanacgacttcttcgtccctctctttcttanctcgctcgttttgctgctggccctcctcctcctgngttgcgtcgttctgtgcgctgctcgcttgccctcttcgttgttctgcggcgccgttgtctccgccttgcctctcg

SEQ ID NO: 59953 - DNA, 758 bp, Zea mays
  unsure (1)..(758): unsure at all n locations
  Clone ID: MRT4577_154675C.1
tgtcgctacgcttgngaaggtcccgcggggcgcaagatcgttttttccccttcttgctggtgttgtttgttggtggcggaatgcttcggcgccgccgttgaggttgcgcctcggcgtcggcattggaggtggtggcaaagttggattgattacctcattcaagatttgactggtgcaacaagtaatggttctcatcatcatgagtttggttcaaaaactcctagaaggccaggagctattgacaataccgatttaattgatgatgtgccacttgaagtctccaacatggagattgagatgattacatactgcttcctcagcaagtttgggaaaagttgcatggttggtatggtggaggaccaacattaccaagaaaggcaatcaatactggcttttctcaaactgatttggcgatagaagtttatcctctacgactgcagttaattctaatgtcaagaggagagcgaacctttataaggataagcaagaagggtacagttggccaactccataaaatggcctgtaaggtttttgacttggcaccagatgaggtatgcatttgggactattatggtcgaacaaagcattcattgatggatagcttggacaaaacccttgatgatgccaacattcagatggatcaaaacattctagttgaggtaaccactgatgcaagtggtagtctggatggtttggttaagcgaaacaatttttttgagagtgatgctccgaaatcaggattgccagatgagaatttt

SEQ ID NO: 59954 - DNA, 844 bp, Zea mays
  unsure (1)..(844): unsure at all n locations
  Clone ID: MRT4577_154676C.1
ccttcgtcatccatgcgtcccctccccgccgcggccatggccaccgcgacgctgcccctccgcctcctcccctccaaaacgctgactctctccactctcccctccctgcgccgctccctctccgtcgccgctttggagccccggcgctggcgcctccgagccgccgccgaggaggcgcctgaggccgtggaggttgagttcgtggagcccgagacggaggctgaggagaaacccgcggtaccggagcccatcgaggctcagctggccgccgcgggggccgggaaggacgcggacatcttcgctgttgtcatggtatgtcttacattgcgtggaaaatggctaggatggtggtgtcagtactaacatcaatgctcgatgccacgatcacgcagtgcttgcgtagtgatgctggcaatttcacggcttccggttatttactactagccttttaggccgtgctcaggagagtgtgcatatggtcgtacaaaacactgttttatgctgtagattgcaatatttatagagtgaagtttgaaatangaaaaaaaaaaaaaaaaaaaaaaaaaaaccttcactccttcgtcatccatgcgtcccctccccgccgcggccatggccaccgcgacgctgcccctccgcctcctcccctccaaaacgctgactctctccactctcccctccctgcgccgttccctctccgtcgccgttttggagccccggcgctggcgcctccgagccgccgccgaggaggcgcctgaggccgtggaggttgagttcgtggagcccgagacggaggctgaggagaaacccgcggtaccggagcccatcgaggctcagctggccg

SEQ ID NO: 59955 - DNA, 236 bp, Zea mays
  Clone ID: MRT4577_154677C.1
tagtgagtcgtatatacgcagtatcacgtgtggtctgcagacctcgggctgcagcgcgcgcggtgtcagtgtctcagtcccggcgccttcgcgcgtgagcggttggggcgcgcggtcacggggcggccgtgggtccgtgtcagtgcgcagcacggtgtgtgacttcgtgggcggtgacctgttgcggcgcggcctggggagctggctgcaccacgtggagaaccacagggcgctgg

SEQ ID NO: 59956 - DNA, 426 bp, Zea mays
  Clone ID: MRT4577_154678C.1
gaattgcagggtttaaatcactccctagaacaaaaataaaatgaagaggatccattccccttaacccctttcgaaaacctgagacaacggaacaaggtctccggactggcctaaacaaacaacccccaaaagaatttgcgcggagggagcctcaggctgggatcctacgaccgccctttatgaccccgaacgacagaaagcgttgcccaaatcataaagcccatgatttagcgaacaaggaataacacctaacgagactgccctttttacactggatacaccatatgacaagtactccatgcatgagacttgcaccacgaacattccattattgacagcttactcaccaaaacttacccaacaaaaaaaatgtgaaggtcaatatatctcggacatcaacctgacaatgcttgtggggcagccctc

SEQ ID NO: 59957 - DNA, 640 bp, Zea mays
  Clone ID: MRT4577_154679C.1
gtttgttgcccagcctgccgagtgccgactgtcgaccctccacccgctgacactccccctccgcgatctcaaattcatccatcgcccgcgccaccaggcatcatctcagcccaagcaccaccgctacctcgccaccgcccgccgccgcgccagcgagctcagctgcctgctcgatcgcccgccagcgtaccccgtcgagggtccagaaaactccatgaagatcccgtcgaggctcccggaccacgaggaggaggaagagtacgacgatgccttgttctacgaggacatccaggcgcccaagttcgttgacctcaccgcgcccgatgccggcagctccgacgacgaccccgcctggttctgcctacgagtcggttgcgaccagagccatgagcaggtcgaccctgaggccctggacaggagcttctttatgcgggtcatggcggcgagaagccccaacgtgaggctacataaggctatcagcaggaagaacctgagctcgatgctgaaatgcccgcactctgcaccgccgaagcgtccgagagctcggttcgcgaggctgagcgcagagactgaggccgcggggaaggcaaccggcggtgaccaaaccaagggtcgagcggatctgcgccatgcgagcgtc

SEQ ID NO: 59958 - DNA, 298 bp, Zea mays
  Clone ID: MRT4577_15467C.1
ccggtcattgctctttctcatggtatttcggaggcagacctattctctttgatacgcttattaattgtttcttacgaaaccttacgttactttaattcgatcacgcgagcgcctttactttattctctttgagaactttgaaaagccaagcaccccgcacttcaattcgaaagatgctaaaacaccggatcgaagacaggtaggtgaaccaacagcttgaccgaccatgtctctgaccactctatgatcgagcactctatgctttttggcgccatcacgtttgctccgcggagtctgc

SEQ ID NO: 59959 - DNA, 816 bp, Zea mays
  Clone ID: MRT4577_154680C.1
ctcgaggcggcgggaacctttgttctcccaccacattacaccagtagcacatacctccccgaggtactgtctagtcaccatgagtctgatctacgcaccggtcttcggacttctcgtcttcgagatgctcctcttcgtcgccctgattgtgcctatgccattcaaggtgaagcgtggactcttcgagttcatttccagcaaccctctggttgccaagctccaatatggcatgaagatcacatttatcttcatcctcatcctgtttgttgacagcgtcaaccgcgtctacagggtgcaggtcgagctcgccgcggcgaagcagcagggcggtgcggctggtgccgttgccggtagcgaacgcatggaggtccaggcccgcaagttctactcccagcgcaacatgtacctgtgcggctttactctcttcctttccctcatcctcaaccgcacctacaccatgatcctcgacgtcctccgtcccgaggaggagaacaagcgtcttactgtcggtgactccaagagcgagaagggcaagtctggtcttggagatgctggccagctcggcgaggtttcgcagctcaaggaggctttgaggaagaaggaccgtgagctcgaggcaatgaagaagcagagccagggtctctccgatgagtacaacaggctcggcgaccaggttagccccaacgacagcgtccccaagaaggacaggtgaactgcttgctctgcccaagcgaaggtatcaaaaccacgcggagacatttcgagctcccgcggttcgttcaacgagactcgaaactggctgatgagcacagcatt

SEQ ID NO: 59960 - DNA, 272 bp, Zea mays
  unsure (1)..(272): unsure at all n locations
  Clone ID: MRT4577_154681C.1
taaatcctacctcccaaccaatctctacctactcaacattatcactgtcttcccagtaaaaaaagcaatcatgttaaattcactttttgtaactaatcctaccttttctttgtgggaggtcaanaatataattttcctacntacctnnttctatccaaatacttatctctnctntctactacatatacanctacatctattttacttaaatcaantnnaanttatctctcaaaaaacaaaaaaaaaaaaaaaaattacctcctcctctacca

SEQ ID NO: 59961 - DNA, 410 bp, Zea mays
  Clone ID: MRT4577_154682C.1
tctagaagtagaaacaacctgcactgcacgagatgaggacggtgcactccacagctgctggcatttgcatccttcttctcatggtcatgtcttgcaccctcatgacgacacccacctgggcagcagaggattgctaccagcagtacccgacatgccaggacgccgtgtgcgaggcaaaatgcagtgaggaattccactccaagctctccggtttcaggtgcacgagccgtatgcacatccctgtttgctgctgcacccacacttgacgcggccggccggggatgcgtcagatccaattaatataatacaacaacaaccgtgctcaagctggtcaccgaatagtatgtaagagtagcaataattatatattctataaagatatatgtaacagctggacttgctcttccatg

SEQ ID NO: 59962 - DNA, 772 bp, Zea mays
  unsure (1)..(772): unsure at all n locations
  Clone ID: MRT4577_154683C.1
ggaagtcggctgctgacgtgctttatcttgntagtgatgccgccgaatgtgaccgttgagtcatgagagaccctagtgttgcctgagcttgtgatatcacgttatccatctgtccagtactcctgccaatcgcagcttgttccctgagaagagcttgatcagctgagtctgatggctcttcaacatcaaactttgctctgtcaaaatctctcaggtcaaggagagaagcatgctgttgtttcaccctgagacttgatcgaagccgatagaattcctgagtaaggtcttgcaaaatctccatatgacgagtcagagtatgagaaagaacttcagaacctcctgatgatacccaagtttgcatttgcgaatttacttgctgcaactgcttcagtgatctttctatatcagactcaatatcattctctgaaccatctgatttcatagaaaccaatttacggtatgcgatcatttggtcatctaactgagcttccaacctccgtgcctgcttgcgaagggcgtcccaggaagacgcctccatgaccccgtctccctcgtcgtcttcggcgccgtcctagcggttcgccgcgtagggaggacagagatcctgtcagcccgcggccgcggctgcggcgtctggtctagatctcgagcgggcgcaggctacgggcgggcggcgagccagcgggcgaatcggtgggagggaagaggatgagcggaaggggtggttgatgcgccgatgtgtttggccgaggcgacccggcgacaggccggc

SEQ ID NO: 59963 - DNA, 744 bp, Zea mays
  Clone ID: MRT4577_154684C.1
gggtcgcaagcaggcaaggaggttggaagctcagttagatgtccaaatgattgcataccgtaaattggtttctatgaaatcagacggttcagaggacaacattgagtctgatatagaaagatcactgaagcagttacagcaagtgaattcgcaaatgcaaacttgggtatcatcaggaggttctgaagttctttctcatactctgactcgtcatatggagatgggtgcaagaccttactcaggaactctatcggcttcgatcaagtctcagggcaaaacaacagcatacttctctccttgacttgagagattttgacagagcaaagtttgatgttgaggagccgtcagactcagctgatcaagttcttctcagggaacaagctgcgattggcaggagtactggacagggagagccttctgtcgagctactacttttgtctggaatactacatgtttcacttcagaatgatgaatgctgtcagttgtatgcctgaggagttactgtatgtttaatgataccagatggataacgtgatatcacaagctcaggcaacacttggttctctcatgacccaacggtcaacattcggtggcatcactacaaagataagcaacgtcagcagccagcttccaacaattaaccacgtcctctcatcgatcagaaggaagaaatccatggataccatcattctttcgctcgttgcatctgtctgcacgtttctcatcttcatctactggctgtcg

SEQ ID NO: 59964 - DNA, 216 bp, Zea mays
  Clone ID: MRT4577_154685C.1
ccccgggccggcgacgacttccccttcaacaccctcctcccccgtccctccctccccgcaccctgatcccccggcatccatccatggcgacgaacagcgcggtgattgtgctccgccacgacgctgctgacgaacgcggctgcgcggcagtagtctttagccgtgaaccccggggagccacacaagaggccaatcgttctccccgaacagaacccc

SEQ ID NO: 59965 - DNA, 363 bp, Zea mays
  Clone ID: MRT4577_154686C.1
gctatgttgatatgacatattgacataatgtggcaggatctggtcctgagttctgtctaaccatcatagtcaattggctatattaaatgaaattaggaagtgaggtgttccagataggcctgcagtatgaatgtttagagtattctagagagaaaatgactgccatagctttccttggtttcctgttctgatgttaggttgaggtcatacatggagttgtgcattttagtcccagggatttcctcgcaacatcatggcagtggtagcccagaacagggtcaatttgggttagcttcttggaaatgctctgaagaatcatttgcacatcaagtgaagatcagagatcctctcaagattggtttt

SEQ ID NO: 59966 - DNA, 1468 bp, Zea mays
  Clone ID: MRT4577_154687C.1
caatctgaaaaatagcttgttcatagtaggcccactttccatgttcttcgtgcaatagcaccaaatgattttttccctccattataatataagttgctgataggccaactcaatccatgcgcccaatcaatacagagagcctcatccttatattttattgtataaaatatagagcctatattgtcaactatagtcataggtgaagatccacctttaagccgacatccgagcaacatgccaacatggggcagctaaagcaacgcccgttgccccaccccctcgttatgcccgacgtacacgaggtacagagttcagttcacagtattggcagcagttgcacagctggagacacggtggctacagcacgcccgaatcgtaacagcattcaatcaaccaataatattgtacaaacaccaatgaagactatctgtaccggtactggtggtgtggtcccaagcttacaacactgtaatatctttgctctggtaaacctacttcgacagccagtagatgaagatgagaaacgtgcagacagatgcaacgagcgaaagaatgatggtatccatggatttcttccttctgatcgatgagaggacgtggttaattgttggaagctggctgctgacgttgcttatctttgtagtgatgccaccgaatgttgaccgttgggtcatgagagaaccaagtgttgcctgagcttgtgatatcacgttatccatctgtccagtactcctgccaatcgcagcttgttccctgagaagaacttgatcagctgagtctgacggctcctcaacatcaaactttgctctgtcaaaatctctcaagtcaaggagagaagtatgctgttgttttgccctgagacttgatcgaagccgatagaattcctgagtaaggtcttgcaaaatctccatatgacgagtcagagtatgagaaagaacttcagaacctcctgatgatacccaagtttgcatttgcgaattcacttgctgtaactgcttcagtgatctttctatatcagactcaatgttgtcctctgaaccgtctgatttcatagaaaccaatttacggtatgcaatcatttggtcatctaactgagcttccaacctccttgcctgcttgcgaacggcgtcccaggaagacgcctccatagcccccgcttcctcctcgtcttaggcgccttcctagaggttcgtcgtgtcgggaggacagagatcccgtcagcccgcggccacggccgcggcgactggcctagatctcgcggcccgcgcgggcgcggacggcgagcgagcgagcgaataggtgggagggtcgaggacgggcgcggaacgggtggttcccggccggcgaacctgatgcgccgatggtttggcgagggctcgtttttttttttcccggccggctcgaggtcaatacgcgtgggcggacgcgtgggcggacgcgtgggcggacgcgtgggcggacgcgtggg

SEQ ID NO: 59967 - DNA, 438 bp, Zea mays
  Clone ID: MRT4577_154688C.1
atgggcaagagtaacaaacgcaagcgcgagccaactcctccattggaggacttcggcgactcggaatactcggaggaggagttctcctccgagtccgaggggtctccggctcccgtctctcccccggcgtcgtctgacgattcagacgactcccaggggattgccgcggaggtctggacttatatccaggccgtcgagcgctccgggctcaagggctcggatgagtcggagtactcctcggacgaggaggactcttcggactcgtccgaggagggcggcggcggcgatggcggagacgaagacgacgacggaggcgacagtgacgatggcgacgatggcggtgacgacggcagcagaggcagcaagggcggcgacggcggcagcagcaggggcagcaacggcggcggcagcaagggcagcaacaaggccagtggctag

SEQ ID NO: 59968 - DNA, 438 bp, Zea mays
  Clone ID: MRT4577_154689C.1
atgggcaagagtaacaaatgcaagcgcgagccgactcctccatcggaggacttcggcgactcggaatactcggaggaggagttctcctccgagtccgaggggtctccggctcccgtctctccctcggcgtcgtctaacgattcaaacgactctcaggggattgccgcgaaggtctggacttatatccgggccgtcgagcgctccgggctcgagggctcggatgagtcggagtactcctcggacgaggaggactcttcggactcgtccgaggagggcggcggcggtgatggcggagacgacgacgacgacggaggcgacggtgacgacggcgacagcagcaggggcggtgacggcggcagcaagggcagcaacggtggcggcagcaggggcggcaacagcggcggcagcagcaagggcagcaacaaggctagtggctag

SEQ ID NO: 59969 - DNA, 499 bp, Zea mays
  Clone ID: MRT4577_15468C.1
aggtgtgctcatccaaaaatggggcagatcatcagctgcatcgaccgctgtttcggtagtggatgctattagatccctcgtaactcctaccccagaaggtgactggttttctacaggggtttatacgactggaaatccttatggcatagcagaggatatcgtgttcagcatgccatgcagatcgaagggtgatggtgattacgaactggctagtgatgtgttgatggacgattttctctgggaacggattaaaaagagcgaagctgaattgcttgctgagaagaaatgcgttgcccatcttacaggagaggggaatgcattttgtgatcttccggaagataccatgctaccaggagaagtgtagtttagttacagaagcaacagcagtggaatgcattttgccaatacattagctgagacttgaaacatctgcttgcgagatgcagcaactacttatatatatgtgtatattcaataattatgccacacgaatttgact

SEQ ID NO: 59970 - DNA, 496 bp, Zea mays
  Clone ID: MRT4577_154690C.1
cacgcctgcgtgaactgggctcctattacacggtcgaccttagctttcttttcatgaaacatggaaaagtggcttccatatttctcatcggacccacacatgataccaaaatctttattcctcgcttatgctcttagctgtttttgaatggggggctcccgcgacgatgtgtccttagtgctcacgaccttctatctgtcaaattagttccacaacgtcacataattgatggcttgaaagagggaaaacccatctagcccagaacctagttgctccaacgagcaatctgaggatgcaacatacatgaatcacccttggttgtacatcactcgctaaacctatctttggtgcactgcttgaaacaaaccatgagggcacagcagctcaattcaactaatgctacctgtgatcaaccaagtaactctggcaaacctttctgcctactttgagaaacaacaatttgttacattcaaccaactgtctacactgaaccctg

SEQ ID NO: 59971 - DNA, 690 bp, Zea mays
  Clone ID: MRT4577_154691C.1
ccggccgggaccgaattcggcccctcgcacgaggcgcgcgcgtccagcgtgcgtggaggcagcgtccctccctctgtcgtgcgtggcggtggcgccccctccctctcgaccacgtgagcgggtgtgaggcgagagatagacgatggttgactgcctcgagcatcgaagagcggggaatccaagggcgagatgatgatccagtttgtgttgttcatcaacaaacagggctagacacggctagggcggtactacgagcacctccatcgacgagcgacgagccctcgagggtcagatcgtccacaagtgcctcacccgcaccaactggcaggtttgtcatccgtcggtccgtccgcatcgctgcctcatcacccctgatcatccttcttccccaagtcccgtctgttgcttctttcccactgatccgaccatatcattgccctcctttccggatccacgaacctactgggtttgtgttgatcgtcttggatctggatagggataaagagttttcctgcccttctgattttctaagactcccgctgattttgtgttgatgcaatgttcatttgtggagcacccgaactacaaggtcatttacatgctctacatgttccaattcttcctcgtcggtggttgcagcgatgaggtgcgaaccaccctgtgccatctctcaatgcctttgcatttgga

SEQ ID NO: 59972 - DNA, 596 bp, Zea mays
  Clone ID: MRT4577_154692C.1
tcgagcggccgcccgggcagggacaagcttttttttttttttttttttttttttttttttttttttttttttttttttttttttgggggaaaaaaaacaccaccagggggcccagaaaaaaccgcggggtggaaaacaagcacgacaccccagcaaggggagcggggggggccgcccccaactgggggggccccccccccccacaaggggggttccccccaaaaacaacccccggggggagacaacccctggggggccaccccccggggggggaaccccacaccacgggggggcgctactaggggaccccagctggccaccaagcggggggtaatcggggaaaaagatgcctccggggaaaaattgtcccccccccacaaccccacacaaaaaaccagccggaagaaaaaaggaaaaaggcgggggcgcctaaggggggggccaacccacaataaggggggggcgccaaccggccgctttccaggggaaaaacccgtcccgcccgcttcaataaagaacccaccaccccgcggggaggggggggttgctataggggccctcttcctcttccttcattaaagacttgcggtgctggg

SEQ ID NO: 59973 - DNA, 679 bp, Zea mays
  Clone ID: MRT4577_154693C.1
cttaccaagcctgataggataatcagtccatggcttgctcaagtcgctttttggagccacaaccagcaaactctcaaagcctagccatgaaatcgaaggtcaatcaagcctaaactgcataggttttttggccgagtcaccttaggtcaagctagaaggcaatgtcctcctctggcatttttttcttcctttccacaagaaccctcttcgaagcttgtcaatagctttgatggcccacgtaggaaggtctagagcggtagctgcataaatcagttttgatgtgatcacaaactgaacatgaatagacctcccaacccttgacataagctccgctttccagccaggcaagagagaggctacccggtcaacaatagcttgaacttggtctctgggtagcttcttaattgagaggcaaaccaagatatttgcaaggaaaactcaaaacggaacatggcaacaactcttggacacatgccagattaatagattatcatcattacagcggatagggagcacattactttttttgcacgttggtcttaaggcccgaggccacgccaaagagagtaagaatgtccaaggctaagttgatatccgaggcaactggctttagaaacacactgcatcatctgcatagagggagagcccgatgtgcatactcctggaagacaaaagctgc

SEQ ID NO: 59974 - DNA, 108 bp, Zea mays
  Clone ID: MRT4577_154694C.1
aggatttatcatcgtgtttcgatgcttttggttcttgcacagcgtttgcacgttagctgtaatgccttgattcggccttccgacgtgtcgttgaaccgtgttgtcgac

SEQ ID NO: 59975 - DNA, 440 bp, Zea mays
  unsure (1)..(440): unsure at all n locations
  Clone ID: MRT4577_154695C.1
actactcatgttttaaatgagtaaatcttanctaagacacaaataaaccaactactcatgttttaaatgagtaaatcttanctaagacacaaataaaccatagggataaaatattataattagtagaagatttagattaaaccctagttttgaatttgggattcacatggaaaaggagaaagaaataccatnaaatacaaaataaattcatnagtaagtaaataccacactagtattttaaagatgaataattaatctgagtgaaaattcaccacaaatttgaaattcaaatgtggattcnaaaataagaaaagggaataaaagaaaataaaaaggaaaagaaataagaagtctgcgctggcacaaaattcggcctgctcggcccattggtgtttccctctggcggcccatttaaccaactcccacgctgccgtcctcct

SEQ ID NO: 59976 - DNA, 233 bp, Zea mays
  Clone ID: MRT4577_154696C.1
ccggccgaataccgggcgcgcaggcgtccgccctaaccttgttgttttaccaaatagagacttgacactgtaggtagaataccaaatccgtcgcgccacttgaatgtgtgggggggaacaacagaccaacattttgggggcccctcgattgaaaaaggaacttctcccactcttgctgccactgaaatggttaggactctctttgtgtaaataaaaccaatgctttcggaaaa

SEQ ID NO: 59977 - DNA, 270 bp, Zea mays
  Clone ID: MRT4577_154697C.1
aaacatccgtataatccggttaaatgctaaatagaggaggaccgactgcttaccatttagcgtttatgacactgatatttacaactgaaaggatacaacaagaagtcactctaggtgaccaattattttattacagcatagaaacactctacctggagttcctggcctaccaagctactgctaagtgtttttgagcctggcctactggctaacctgaagagaattgagctttttatttatctccccaaacttttcctttaagcgcttgaa

SEQ ID NO: 59978 - DNA, 411 bp, Zea mays
  Clone ID: MRT4577_154698C.1
agatcatacatccttcaaattttcctttccttcacgcgatcccaatggggaaaggtacctttatacacttttgcgtccacagcaccaacactcataacacttgccaaaaaaccgcatatataccgacatactgaacagattaaacacctgattactttatttcatactacattctaaaaaaactatttagaaacaaatctaacttgggcaaactttatactatcatctatataactcttgaaactttctcctcataaaatcctttctaaacaatatacacatcaactaacactctcaacagctaatatcttcttgctatttccatataaagagatcatctctcttcatttcatagaattcttactgacaatttttttgaaatttttttccaaacattcttacaacaacttt

SEQ ID NO: 59979 - DNA, 461 bp, Zea mays
  Clone ID: MRT4577_154699C.1
atgggatatagtgcaatggctttttagttgggttaagttcagggttttcccggtgtttgtacgttgtaaaacgttggttcactttattgaatttaggtttatttttttttttagtttttttttttttttttcctttttttttttattttttttttttttttttttttttttcttttttttttttttttttttttttttttttttttttttttttttttttttttttagtactcagaaaaaaagataagcaaatgctcaaacaaaaccagaaacacttcctaacaagattacaagaaacacgctcccgattacagcactgtcattgtgacaagattattaccgcatgctgtgccagcggctcagtccgctgcactgcagtacatggacaaaaaaaaaacggggcgagtctgatacatacatttcattcaagcctcttgttctatagttctacttcctgttgc

SEQ ID NO: 59980 - DNA, 269 bp, Zea mays
  Clone ID: MRT4577_15469C.1
gatccagagaaccacccacagctatcgtcgatagctatggagctagccatgaacgtgaacgggttgctccttgtagcgaatacgctcgccgacttgctgaggaagaaccaaaccgtcaggttctggttccatatgctgaagaggttcaggcagtcagtggagcgcaatttctccaggttcggtgagcatccaaagcaacttgttgagagggaccatccgactgacataacaatgctggtccagccttcttctgctgtacttcgtctcat

SEQ ID NO: 59981 - DNA, 842 bp, Zea mays
  unsure (1)..(842): unsure at all n locations
  Clone ID: MRT4577_1546C.1
agcaatcacaacatcaaaaacatagctcaacacaaattattcactaaactaaacacagactgttgaaaacgtatgctgttgatacaaagctcccaagtccgatgtacatcacatgtaaaacatcctcaattccacaagctactactctatgtaccttgtaaaaataccactccgatcaccaatcacatcccatatttccatctcggtgaaacaagagtacttttgatgaagttttctgagacctaaagacctgatctatatgtaaaaaaggaagcacaaaatttcctatcgagcacaatgatgaagttttgattaattgtggtccaacttcgtatgtggataagccaatcctagagcacgtctcatgcttaatactgctggagaaaatggacttcgtactctagaaagcagtcagcaacctttacaaacttaaccacttgcaaagttgctgtcccgttgatccactattgctcaggagtcagcaacttgctcaactacagcttttatgctgatggttcttcatttttcataccccactgttcctcactattggttccattcacaaggacagcaccatcagttgaatcctcagcctcaacctcaacagcttcatcctgactttcttctactccatcatcctctgcatcaacctcaacagcatcttcttgactctcttctactccaccatcttcaataacctcgtgaacatactcttcattatcatctggcaccatctcttcctgtacatgcatgtttttaaaagcttccactaaattctcatttgaccttcnagcatgaatcatgtatccctcacccggtggatagataacccggacgctgga

SEQ ID NO: 59982 - DNA, 1078 bp, Zea mays
  Clone ID: MRT4577_154700C.1
tatttgatctattatcttcttttagtttttttttttttttttttttttttttttttttttcactaaacagccatcaaaagattagtgacatggtatacatacatgtgagtaaattatttttagtactcttcagaaaaaaatgataagcaaatgctcaaacaaaaccagaaacacttcctaacaagattacaagaaacacgctcccgattacagcactgtgacaagattattaccgcatgctgtgccagcggctcagtccgcactctgcactgcagtacatggacaaaaaaaaacggtacgagtctgatacatacattttattcattggtgagatgcaacaggaagtagaactatagaacaagaggcttgaatgaaaatttgtgtaagcgcctcaactcattgtaaatcactcttcaaaaatttatgtgataacggtgggggcagagcggccagtgtactcttgcatcttggagagcttgagcgcaacatcaaccagtggagcaagggcctcctgtgaatccctgccggtcttggaggaatccttctcgtattgctcgatgtagacacggatggtggcaccaacagaaccggttccggagagacggaacaccagtcgtgaaccatctccgaagaggtatcggatgccctggtgcttggacacagagccatcaacaggatccttgtactcaaactcgtcagctgcaactacttcagaaacatcagaccggatctccttgatcaacttgttaacatcagaaagtgatgactgcatgcttactaggtttgccatcagctccttagcagccccagcatcaacattctcatagtcatagcgtgtgtaataatggcgaccatatgtggcccaatgctgacggacaatatcttcaacagtgacaagcttatctcctccaaggttgtccttattcttgaaagcaataatagaaagccatgcaagcacagcccagatgccatctttctcacgaatgtggtcagacccagtgccaaagctttcttcaccacagattgagcacattccagcatccatcaaattcccaaaaaattccacccagtagcacct

SEQ ID NO: 59983 - DNA, 293 bp, Zea mays
  Clone ID: MRT4577_154701C.1
cagaaacaagaactttcctatttctttatgaatgacataatgcaaatagagcgaaggagatacacacactgtttcaccgcccacatacaactaggggttgacatctttaggatgcgtcaccaaaccctataaggataaacaggaatgggaacgacccctgacgaagtgcgtatcgttgactctgacgctggacgcttatggaaacgtcatcatggctatcccgagcttcttaatgaaggacaacccgccgtcgtgagcgatgggcacacctgacataaactaccggaggtact

SEQ ID NO: 59984 - DNA, 1598 bp, Zea mays
  Clone ID: MRT4577_154702C.1
ctgaatacaaaggagggctacatatcattaaattaaagtagagagaaaaaggacctatggcccaggacaaacagaacacacacaacacaaacacacactctaaacacaaacacacactcacccttacaaagcacacaagctaaccgaaccctcaagcagtcacaatcccctgccgtagcccgtaaccacacagggaacggttaatcagtaatcgacgaatcataacccaggttccctaaacagccatcaaaagattagtgacatggtatacatacatgtgagtaaattatttttagtactcagaaaaaaagataagcaaatgctcaaacaaaaccagaaacacttcctaacaagattacaagaaacacgctcccgattacagcactgtcactgtgacaagattattaccgcatgctgtgccagcggctcagtccgctgcactgcagtacatggacaaaaaaaaaaaacggggcgagtctgatacatacattttattcattggtgagatgcaacaggaagtagaactatagaacaagaggcttgaatgaaaatttgtgtaagcgcctcaactcattgtaaatcactcttcaaaaatttatgtgataacggtgggggcagagcggccagtgtactcttgcatcttggagagcttgagcgcaacatcaaccagtggagcaagggcctcctgtgaatccctgccggtcttggaggaatccttctcgtattgctcgatgtagacacggatggtggcaccaacagaaccggttccggatagacggaacaccagtcgtgaaccatctccgaagaggtatcggatgccctggtgcttggacacagagccatcaactggatccttgtactcaaactcgtcagctgcaactacttcagaaacatcagaccggatctccttgatcaacttgttaacatcagaaagtgatgactgcatgcttactaggtttgccatcagctccttagcagccccagcatcgacattctcatagtcatagcgtgtgtaataatggcgaccatatgtggcccaatgctgacggacaatatcttcaacagtgacaagcttatctcctccaaggttgtccttattcttgaaagcaataatagaaagccatgcaagcacagcccagatgccatctttctcacgaatgtggtcagacccagtgccaaagctttctcggctcgagggcagagaagccagtctgtgacagatgcggccgggacttgtacggatgaatgaagcctccgaacggagataacttcattttcgtaggcacccatctcgccccagaagaaataataacagagcagaggatgccagctgcctagctacttgggttaccgtaatgcgtatatgaaccattgcaaccttggtgaacatgtcaaataaatgggcagcattcacatgctcaaatatgggcagcattcacatgcactgtgaatctaccatcaagccatatgattccccttacctcttctttgcaacgttttatcaagtatccgaaagttccaacaggaagttggtcacaaaatatgcaatcttaacgatcgataatcagagcaaagaaaaatggatgatctgttcgatc

SEQ ID NO: 59985 - DNA, 283 bp, Zea mays
  Clone ID: MRT4577_154703C.1
ttctttccatggaacatggattgcttagtgagtctgacgaggatagtgatggggagcttcatccattgattgtacgagaccagaattgtggacttcaagctaagactaatgataatcttgaagctttcccagaagataatttagcctgtgatgccatcattgataatagaacaataatgaaaaggccagagtttgtacgtataataagcaagctgatggtcgggatatttctttcgatttgggttcggagaagcctgcggatacacattaagaatttgagagt

SEQ ID NO: 59986 - DNA, 554 bp, Zea mays
  unsure (1)..(554): unsure at all n locations
  Clone ID: MRT4577_154704C.1
ctgggtagaacggcccctatcgaatcctggtccaggcttccaccatggccctaaccctcccgcatcgaccatgaatctgcaaatccccatgcccccaggcccgtactcgaactccatgccccatggacctttttcgccgcaatcacaacaagtaccatactcgccccaccgaatgtatatatccaaccctgcattcccgaacccgggacttccaccacatctgcagccgcacaattttggaacaccgcagtccccgctcagacagacgtatcgcaatccggaagcgaggccgaagaagtatgatgatgagttcggggcgccggcctcggataaggagtggaaacggcgaaggtccaagtcgagaggaaggtatgcggcggatgcgaagaggaagagtagtaataagagtaaggcggcaggagtgttgatgggtgtttgggngggttggactgcgctgttggatgggtttgagtggngttgtaggacctgttggcgcatgatttatgacataattagagtgatgatttacgaattgattcccatgcgacatgatg

SEQ ID NO: 59987 - DNA, 228 bp, Zea mays
  Clone ID: MRT4577_154705C.1
ggccacaacatgcgggactcaggggatgaagctaaacataacgaacatctacattacctcaacaacaggtatccgctaactcttgccctgagggttgatatgcttaccacattcacgaattcgtgctctttttcgcgaggacagaacatcgatgagacacatttcgggagtgcagcattttttgagtcctggggacagggcttctgaataatttcctatgtgatgaac

SEQ ID NO: 59988 - DNA, 591 bp, Zea mays
  Clone ID: MRT4577_154706C.1
ggtggtgaagacgcacgttgctctcgcgtgtgtgtttatcgctgtcgtattttgattgcaagtcagctcgacatccatcaaccaccatgtcaggcaaaccagcttttaaagtcgctgacatcagcctggctgattggggccggaaagaaattatgctggctgagaatgaaatgccgggattgatgtctttgaggcgcaagtacaaggagtctctacccctgaagggagcccgtattgctggatgcctgcacatgactgtacaaactgcagtcctcattgagacacttgttgctctaggtgccgaggtccagtggtctagctgcaatatttttagtactcaagaccatgctgctgccgccattgctaagacaggcgtccctgtctatgcatggaaaggagaaacagacgatgaatatatttggtgcatagaacagactttagtgttcaaagatgggcagccactcaacatgatcctggatgatggtggagatttgactaacttggtacatgagaaatatcctcagtaccttgctaacattaaaggaatttcagaggaaactaccacaggagtccataatttgtataaaatga

SEQ ID NO: 59989 - DNA, 1537 bp, Zea mays
  Clone ID: MRT4577_154707C.1
ctcctcctcagctcctctcgtacaccacgtccctctctgggctgtggtggtggctcccaagcacacggcccgcacgagcagttggaacagattcctcgaccgcgtcgccccggaacccagttcttggcatccggtgcctagcttcgtcgcccctccggcaagcatccggtagcgcttgctgctagtgagctagtatatttctgaaaccggaaacccgcgacacgggaccgagttcttgggagcggattcggctcgctgcaggctgaggctaccggcgcgcgcgagttccgctcctctccacggaggcggagagccagccagtagttgcgactggaggcgggcatgggcgcgggcgcgtcgggcctggcgggcgcggagcccggcggcaaggtggcgcgcggcgccgggctgggcgacctcccggagctgtgcaccgcggaggtgctgctccgcctcggcgcgccggacatatgccggctcgcgcggctcaacctagcgttccgcggcgccgcgggcgcggacttcgtgtgggaggccaagctgccggggaactacgcccggctcctgcgcttcgtggacgaggccgaggaggagggagggagtgggcgggattggagcgcggtggggaggaaggacgtctttgcgaggctcgccagacctgtgccgttcgacggtggcaaaagggaattctggctggagaagaacgaaggtgggatctgcatggccttgtcgtcgaaagcgctggtcattactgggattgacgatagaagatactggattaacatgccaacatctgaatctaggttccactccactgcatacctgcagcaaatctggtggttcgaggtggtgggagaggtggacttctgcttcccggcggggacggcctacagcctctacttcaggctccacctcggcaagtcctccacgcgcttcggccgccgggtctgcagctcggagcaggtccacggctgggacaagaagcccgtgcggttccagctctccacgtcggacggccagcacgccgtgtcccagtgctacctggacgagcctggacgctggatcctgtaccacgtcggcgatttcgacgcgccgccgagctctggtcagccgaccaggctcaagttttcgttagcgcagatcgactgcacccacacgaaaggtggcctctgtgtcgattcggtgctcgtgtatcccaaggggtttcagccggaacgggtggtcagggctcggaaatgaccgtgtgtgggcatttggtagctatagaggcactgcgcattagagcgagctgtcgagagatatgagtagcctgccatttttttttagcttgggctaattgtattctgaaagcgtttatacatagcatagtagcacactggacttttttttgtttgatagcattagtgtgtgcgcgttactttgccatttctcatgaaggccatggcaaataaggaacctttgtacgtgtacctagctccggtacatcgcgtttgcatcggcacacaatgaagccaggaaggtctcctgttttatttcc

SEQ ID NO: 59990 - DNA, 584 bp, Zea mays
  Clone ID: MRT4577_154708C.1
atcttcctccttcagacaggtgtgatagagaggccaatcatctagagcgcgacgaaggcgatggcgagcggaggcaaggcactcacgcgactggagagttcttccggagaagggacgagcggaggaggcaccctatgacggggaaccagttgtgccacgacacaaccggtctcggcatctccatcgccgcctgcgctatctacctcgccggcgaggccgcctacaacacgcctctaccgcccctccggcgactaccacgagtatatcgccgttaggatccgtgactcggccaagaagctggagccaaactttaccaatgactgctgctggtgatgtttttacagatttgagatcataagggcaggcactgacgatattgtaatctgcgatcatctagacttgtccagtgcgccgctacaactattgccgtggaatgctgtgttaatccttgctatatggatctgacagtgctcactgtagattcgagaatactgcactatcttttactgtgcttatatgagattgccagcgcgtttccggtcctatttacacttcgacagaaggcccctgacggaccatcgagc

SEQ ID NO: 59991 - DNA, 607 bp, Zea mays
  unsure (1)..(607): unsure at all n locations
  Clone ID: MRT4577_154709C.1
gaaaattcttcaatgcgaagacatctatagagaaggtcaacacattggttgttcctttgctctgactaatttgaaggattccagttttgaacaacacagtgtccaaatagtggtcaaggataatgcagngaaaaattagaccgtccttcaatatagtgcctttaacttctcatgtgaaacctgatcccccccatattaagcgtctcttcttccaaaatggtaacttgtatgtgcaatggaagaatccacagaatttttatagcagatgcttatcttaccaagtagaagtcaataacagccagactgagacgaatgatatattctacgttgaagaggccaaatgtcagaattcagaatttgagggaaacctggagggtacaatttgtttcatggtccccggcgttcttcctgatactttgaacacagtcagaataagagtcagaacaaataagttatgctatgaggatgacaaactctggagtaattggagtcaagcgatgagtataggtgagaataccgaccccacgttctatataaccatgttgctcgccactccggtcatcgttgcaggtgccatcatagtccttctgctttatctcaaaagctc

SEQ ID NO: 59992 - DNA, 523 bp, Zea mays
  Clone ID: MRT4577_15470C.1
aaaccctctcctctcgagaagcagagcggcggagatccggagagaagccatcggcagccgggaagcccgtcgcgtgcctttcttcctcgacgtgccatgattaacggaatatttgagcactgggacctggagcgacagtgaagtgtgacccaggagagttctggtgccatgtttcacaggctattccattattcccaaaagcagatgatttccagtgatggggatgaatgtgagaggtcaaatgaagaagatgaagactccaaaggacttctactcgaaagtgaagtagcattcatggactatgttagggaagttcgttattaggcaactgaattgtgggtttgcgtttactgctacaaacgggctctaaggcagcatcacaatgtccgatgcgtatttgattattgtgggttgttggaaagttgctgttttttctgctcaacagaatgtgtaattgagattttcttgaattagaaagttgttgttttgcaacgggtattgacatataatccctcatttcctt

SEQ ID NO: 59993 - DNA, 665 bp, Zea mays
  Clone ID: MRT4577_154710C.1
tttttttttttttttttgatgacataattcgttatatatcatttcgctaatcgcagcaaatagctatagagctatatccttttcctccactaacatttgtgtgtccctgttcctgctatgttacagtgctactctcgcagctcataaaccctcgaccataaacgccttgcatatcgtgtttgcttgtaaagaatttaaactttgaaaataggccatgtcgtcatataaaaatgaacctttttaggcaccagtacgccgtagataatgtgttccatgagagaagtgtgataatgagatgaagcctggcttagaaggggctggggttgcttcgccaccattgacgtcgcgattgatgtcacgccccaacagccaaggcagaacgacaaaaaaaatgagaagtagaactcatggtgagagtggagttctagaattgtcgtattctcgtcatgatttatgagtagttggggcttgtgtggccgtttgtcatgccagacgaacgggcgcgctgagccgtagcgttggttgggggtgggctagcaccggaagcctccatctgacgctttgtgtggtcgtgcatgaagcgggaatagcttgagaggtttgtaggaggagggggagacatggacatggagacggagccgtagtctgatcgagcaggcatgatg

SEQ ID NO: 59994 - DNA, 318 bp, Zea mays
  Clone ID: MRT4577_154711C.1
actcgagccggtcctctttggatcctcttatttcttcttaatataatgatgcgcaattctcgtgcgcgttcgagaaaaaaagttactgttttccatgaccatgagtttgatatacttttgctttgtcatgatcataaagtttgcctgtcgatatctctacatgacttactgttaatgaatctttaggagctgagttttgatgcttgcatgatttgtttcatattgtactgcccccaattttattacaatattttggttccctagatccttttttttggtgcaagttcaaatcccagcccaggatatgaagagcccaat

SEQ ID NO: 59995 - DNA, 306 bp, Zea mays
  Clone ID: MRT4577_154712C.1
cacacgcgtccgatcacgcgtacggctagctaagaatgcgacgacgggacttgcacgaacgatgctgctggaatgcctaagctcgaccagtcgctcgtactctgcctgaaggccgattccgccgcggcgtccgtggcgcggaccttcttcgactgcgagcagctcctgctgcacaatggcgacaaccactacctgctgaccacggagcacgccgacacgctcccctacagcatcaatctatccacgcactaagtcacaggccgtttcttcaacgggctcaacatgcacgacatcgtcagcgagcac

SEQ ID NO: 59996 - DNA, 962 bp, Zea mays
  Clone ID: MRT4577_154713C.1
aattctcatctcctcctcctccgctggccgctgtcttccaccattgcccctcccgggctcgcctcgacttgcctcgatttctttcgacgcctcttcctctctttgccctcgaaccgctccccctccctgcccctgcccctgcccctgcccctgagcggccttcaaatccacccgctgtttccccgccttccccttggcgcgcagctccggagcgcccggccggcgccgtccggtgggtcggctcagcttcttggatctcgggcgagactgacagacccgtcggtcccggcgctctcgcggcgattccgattgctcgcttgctgatggatgtggctactccctgtgcgatggctgcgtgaaggttggattgggtctgtcggccacgggattggatcttggcgaggttccagaagcccgaatttgctgtgtctgtcggactggatagccgccgctgccgccgctgcgatttcctaccgggcggcgatggccaaccacgagctggtcctcggacacgggcaggacgcggagctggcgctggggccgaaccaccacgacttcggccacagccacgacctcgacctgggcggccacgcgcacgaccacgagctcgtcctgggccagtcgcacgagcacgaccacgagctcgttctgggccaatcacatgagcgtgaccacgagctcgtgctgggccagtcgcacgagcacgacgacgagctcgtcctcggccaccaccacgatgatgaccaccagctcgtcctcgggcacgaccatcaccaccaccatgacgagctcgacttgtcggagagccacgagctgacgctcgccgagacgcaccacctgggtgttgaccataatctcgaccagctctcgctcgagcaggctcacgagctcgcgctgcagccacacgacttctccagggtcctctcgcggtcgctcctgtcgtccagtcgcgggacatggtc

SEQ ID NO: 59997 - DNA, 184 bp, Zea mays
  Clone ID: MRT4577_154714C.1
ctgctgcagggaatacagatgacaaagacaagctttcagctggttacttatctggtactgacaacaatcagagtatcttagtttcctctcaagcacctgcattcccaaaagctttgcatgccagcgttctcatctcgttcggatcaagtcttatggtagtattgataagccattagggaggtat

SEQ ID NO: 59998 - DNA, 400 bp, Zea mays
  Clone ID: MRT4577_154715C.1
ggtcccccttcaaattctggcctcctttatttctcattcatggaatacataaataggccagctggtcgcccctgtctagctagagatccttatttccttaaaactttcctaaaaactttaaacaactactaactgataaccttcctagataatctaaactaatcttatctctaactatccttatctaatcctccttagggggcccatcgttgttgttaccgaagcccctccgggggcctccttaggccctgacactacacccctcctggacaagcagttcgtcctcgagctgcaacatgacgggggctcaaatactgggtttacttgacctaaaaccagacccctagaagacaggccttttacatttggggttatcttattattccgaatctgaattttt

SEQ ID NO: 59999 - DNA, 336 bp, Zea mays
  Clone ID: MRT4577_154716C.1
gaaaaacctaagaaaagcaggttcccaattttagtaaccaggggaaggtaaaaaaaaaaaaccagccatttaaaataatcccaaccaaaaccaaattaatcaattgccacttccaaaacccaaataaagaacccctgccagaataaattaccaaaaaagaaccacccaaaccaaataaccttaaaccccccttgaccaataaatcccccttttttttcctgtccccctaatccagttccggccgaaaaacggcggggtcttcttttgccaaacttcaaaaaactttttctttgttcaaaactcttgaagccaaccaacaacataatccacttccaa

SEQ ID NO: 60000 - DNA, 495 bp, Zea mays
  Clone ID: MRT4577_154717C.1
atggtgggggccgaggggtggaggcggctgaggaggtgcagttcctaccgcggctgctcgtcatcgaccaacggtggaggagggcgaggtgttggcggatgtgtggtccttgcgcagaaagcgaccgcctacgcgcgggtcacacgtgtcggggacgacggcatggatgagacgctgctctccaacctcccctacaactccgactacggatacagcagtggcggcaatagctgttctacaagcgagcggctggcacggccggctgtacaagtgagcagggccggtcaggcacctgccaaagcttgcggtccgaatctagctgcaagaaattggcttggatttactggggctataccaagtttcttgactgtatatgtttgcaagatcaattccaaatatctctcagggctttcatcaaacaaaaagatggttggaaaagaaacaacaggtcaaatagctttggatgatattacaccaatggatatggctttgtaa

SEQ ID NO: 60001 - DNA, 825 bp, Zea mays
  Clone ID: MRT4577_154718C.1
aattagtcgcgcactaaccggcgggcctggtggcgatcgcgaccgcgcacgcgcttggcgctgttcgtgggcgtgtccgtcgcggcgatccctctcgggcggcaacctgacacccggccgtgacgttcgggccggccgtgggcggcaacctcaccctcctgacgggccctcttctattgggtggcccagcttgctgggcgcccccgtggcgtgcctgctcctcgggttcgtcacccacggcaagcccatcccgacgcaacgccgtcgccgcgggcatcagcgagctggagggcgtcgtgttcgaggtcgtcatcaccttcgcgcccatcgccatcggcttcatcgtcggcgccaacatctcgcccgcggggcccttcagcggcggctccatgaaccccgcccgctccttcggcccccgccgtcgcccgcgggcaacttcgccggaaactgggtctactgggtcggcccgctcgtcggcggcggcctcgctggcctcgtctacggcgacgtcttcattggcggctcctaccagcaggtcgcggaccaggactacgcctaatttattcaccacaccatcgtctccgctctggatgaatggattcaaacccatcgtcgtttgcttttgctcctcgccacgttcaattaatgcttgtgtatgcatgtatgtgccaatatgatgtgccgttgccctgctccattcatttccctttcttttttcggggtgaaatagatgtaaagatctcgtcttgcctgccgtactcgcgctgtgttggaaaaaatttggttttcgttccaagtttgtttacgcatggatttcttggctcc

SEQ ID NO: 60002 - DNA, 355 bp, Zea mays
  Clone ID: MRT4577_154719C.1
aagtgatgggggggtttattcttaccctttgcttttaaacattttcttttttctggggaataggacccctcaaactaaaaagggttggaaaaggttaaatgcaagcgccaacaattttaagggttttcgaacctaaaaaaaccgggttccatagccccccttccaaaaattggtgtgacacccaggcctttcccggatttattttttttggggggcccccaattttttttggcgactggttttacaagggggggccccaaaaaaccaggccccaaaacaaattggttattggtttttgaccggcgcaaaacactattttcttttttttgggacataaagccggtttttctgcccc

SEQ ID NO: 60003 - DNA, 327 bp, Zea mays
  Clone ID: MRT4577_15471C.1
gtcacaggtgattacttgcttcgtggcggtgctcaaaaggtctggaaagccaggaagagtctggcctccccctacaaacacgcgttgcagctattgcaatggacaagctaactggcaccttgtcgtacctgaccacttctatgacaagggacggctggttagactaacggcacagaaggtagacgatgagtcatcctaaaagaacccgtaagcaaaagcagttgcccttgaccatggctgcctatcttgtactgcagttcaagaacaagtttgggagaactcttactgctaatactttcctgaagatgtgttactatatatttgtac

SEQ ID NO: 60004 - DNA, 275 bp, Zea mays
  Clone ID: MRT4577_154724C.1
caaatttgcttttttatactatacctctcctactcttaagagacctatttcaatgggtgaaggccctacatttctccaatataatccacaacatttttcacacagtattatactttatctccattttctatccatatacctatacctcttctcaagacatatttcaaaaataaacccaattttataaattcaacttattaaacaagtacaattacctctaattcttattaaccttaataattgaaccctatatccttttcaaatactacaaaaca

SEQ ID NO: 60005 - DNA, 601 bp, Zea mays
  Clone ID: MRT4577_154725C.1
tccctcataactttcaagaaacacagtggacaaggggatccatggtgcagacactggcgagtaggcctggcgctccggaagaacaacgctctggggctcggcagaggggctgcacatcctgggggtccgacatatgatgttggggttctggaacggcgatcccaaacgcaccctgctgggacgagggcgtccccaccaagtgctctaccacgcatcatcaaggacatcttcttcggagaagaaggaggacatcttcggcttgctcaagacctatacaggggctcttccactagcccacctcaacagttacaacatgaatattgacaagttgaaagcaaacggaatcatctctgttatctgtgtctatttgaatgatccgtatgtgctggatgagatgggcaaaaaagctagacgcttacgatacaagacactatctatggtgactttgttggcagtttccacataagcttggattaggagatagacctttctgctgctttgcatttccgccgactctcacaggttgtccatctttgctggaccaggacagatcaagtctttaaatgtaccggaagcacctgacgactttaaggcttctggt

SEQ ID NO: 60006 - DNA, 1392 bp, Zea mays
  Clone ID: MRT4577_154727C.1
tcattcaatgacactccatcagccatattctggacggattacgtggccactagatggtatcgagctccagaattatgtggctcctttttttcaaagtacactcctgccattgatatttggagcgtagggtgtatatttgctgaattgctcacagggaagccactctttccagggaagaatgttgtgcatcagttggatcttatgactgatctacttggtacaccttcagcagagtctatctccaagataaggaatgagaaagctcgacgatacatgaacaatatgaggaaaaagcctcgggttccctttactaaaaagtttccagggatagatcctatggctctccatttgcttgaacgtcttcttgcttttgatcctaaggaacgaccaagtgctgctgaggccctggcagatccatactttaatggattagcaaataatgaacgtgaacccatagcacaacctatctcaaaacttgaatttgagtttgagaagcggaaactggccaaagatgatgtccgagaattgatttaccgagagattttggagtaccatcctcaaatgctacaagaatacctacaaggagcagaccacaatcagatgaccttcatgtatccaagtggggtggatcgcttcaggcgccaatttgctcatttggaagaaggtactgcaaagggtgaaaaacacagtccacagctgcgacagaatgtttctttgccaagggaaagagtaattggcaataaacatggagatggcaatacaggtgataagctagcgcatgcctcagtgacggatggcatcagccaaccgagcttgagtgagagaagctttctgaagagtgaaagcatcagtgcttccaagtgtataggtgaaaaaccgaagcatgtcaaagatggagaatctgttttagagagcgtggatgaaacagtcgatgatttgtcgaagaaaattcctcaactgaaaacctgatttttctcaagttcactggagcaatgaatagctcgtagtatggcacgttaggttctcaagacgatggacctacggcaaaggtctatagccaatgagaccacaagttctaatgccagtaattctgttgtgatgtaaatttcctcccatttgtgtttgtacttcgcgactgcaaacaacctgtttctgactaaatggctcgtgttttcctccgtggagccatcaccatattctgtaaattttcagttggaagtgaatcttcagctgcagaggcatatttgattttcccccagcaagtaggcctaggcattcagttaattctgtaaagttggttatggaaattttcagttttgacaaaatgttaactgaatttgctaccaaatactccattctaaattacaagacattttgatttaaaaaaaacca

SEQ ID NO: 60007 - DNA, 525 bp, Zea mays
  unsure (1)..(525): unsure at all n locations
  Clone ID: MRT4577_154728C.1
cccgggncgacccagcgnccgcccacgcgnccgcgcaccacacgcgaccgaaccgcacaaacgcgcncggcgcnnccccacccaaaaggcaaaccaaccaccaggcccaccacccnccgcccccgcccgcgccacagcngccganncgaaagcccccggcccgaccccncgcaaaacccnagccccaaccaccangaagggggggggcaacgccnccaagaaggangagggcaggccccgggccggcggcggcggcgccggaaagcgcaagaaggccgccgcgagcggcaagcccaagcgcccncccnccgcccccnncgncnncagggcngaanncaggcnggagnaccaggcgcagcaccccagcaacaagagcgnngcggccgngagcaaggcagcnggggaaaagnggcgcncnnngncagagcaggagaagcaacccnangnggaccaagcnngggcagagaagcagggcccngagaagaccaaggcccccnnngcgaaggagagcccacgcccaaagaa

SEQ ID NO: 60008 - DNA, 486 bp, Zea mays
  unsure (1)..(486): unsure at all n locations
  Clone ID: MRT4577_15472C.1
gtacgcctgcaggttttccggtccggaattcccgggtcgacccacgcgtccgggtcaggagcccctgcagctgcttcactctattggaggtgcatgtcttgaagagcatgagcgttctgcatgatgccttgtatggaagcgctgttattgaatgctatggcggtataactatcgggacagagtacaccatatcacctgcagaacaccactgagtgctccagaagctggtaaggagggcgctacgttgacccactggactcttcacacagatgacacacgcttgaagttaaggaggccacgccatggcggttgctggcctctgctcgggtgttgtaggttgctgttgataggctgcgaccagtggttgtgagcaaatgtgggatgcagagcccacagcctggcctaggctgcccttctccactgtcagccancagcatgtcctgccttcgtgaactgttattgggtnngtgctgcgtgtggctatca

SEQ ID NO: 60009 - DNA, 532 bp, Zea mays
  unsure (1)..(532): unsure at all n locations
  Clone ID: MRT4577_154730C.1
cggggaanaacacaggtctacctcgtatctgtatctgccagtctcttcttccgttccttgagaggaggtgagaagccaagaccacaatggaggggaagaagaataggctcgcctgctgccgcatgctcatgttcctgctgctgccagcgcagcatcagcaggtggcgggcctgtccaaggtctgcctttgctaccggaactgctacaccgactgcatgaagctcacggcccgatacccctgcaacgccaactgctttaaggactgcatcaacgggatgctgccgccgactccggcataggccgtcgccaccgccgattgcagagacatctgcctgatgggcttctgcagctgcatggagctcggcgcagacgccttggctggggaagccgaggcaggtgtgactgactgcaccaagaacctcgatgcctttgcaccaagtggagccaagacgatcaactgaagcatgcattatccatctgaaggagtggcttgagatcgacctggcagcaacagattgagctccatcagcgt

SEQ ID NO: 60010 - DNA, 314 bp, Zea mays
  unsure (1)..(314): unsure at all n locations
  Clone ID: MRT4577_154731C.1
cggctcgagcccttctcttgtggcattcgacgatgttttgttgggtccagtatcttgctgtcggactgtattttttgtggtaaagttagggcggttcaagctgatgctgattagcgttcaaatcccagtgctcagtacttcactagtcgatgcgtttgaatgattcgactggtgatttgcggggcgtactccgcatgattcgtcgttggttaggtagctgtggcattctcgcattttatttttcacttgttctgtgttacagggtaattgcagcccttgtcttagctcagttacatctggtagcganatggtgc

SEQ ID NO: 60011 - DNA, 677 bp, Zea mays
  Clone ID: MRT4577_154732C.1
cattgggaccctcgaggccggccgggatctccactcccctcaagacagaagaggcagcctcgcgcaccgctctgtcctctctgccgggcggcagcccctctacgtcgctggccggaaaggcgaacgaagtgaaaccgctcaatgagatgcctaagctcccaagtctcacttccgctcgcccgctatctccctggaaggagcaagggaccaaagaatatagccgtttgacaatgaatgtcctcattcatgtcccacgatgaactacccgacttcgagccttgactctcatcttatcgaaagcactagtggattctgtgaaccagccgcatgattacccatctcagcgataatgctcctgatgataaaggacgtaagaacttcatgatctatttcatgatggccgatgtttcagctgctgtctcgaagactgctgctgctcccatcgagcgcgcgaatatgcttattcagaaccaagatgacatgattaaccctggaccttatcatatacgtacaaagatattgttgactgcttcagacgtaccattaaggatgaggcactctcttccttgtggaggagaaacactgctaatgctattcgatacttccctactcatgctttgaactttgcatttaaggactacttcaagaggttgtttaacttcaagaaggatagggat

SEQ ID NO: 60012 - DNA, 460 bp, Zea mays
  unsure (1)..(460): unsure at all n locations
  Clone ID: MRT4577_154733C.1
tttgggctgctttatgtgcttggcccatttgtaggtaccgcaccaccggtcctgcatacatccgacggaatgttgggacgccgtcatcaaaatcgccccacgaagaaatacgccggtctagtagtgtacgtagtaagtcacgacggtaaataacgtgggtaacaatccattcgattgaagcgtaagggtactcaactacgtaagcagcaatacgatcctcgataattagctctactaagttctttaactagccggcgtcgtaagcctctacgacggcggcaacgcttaaagataagacttggaatgactcattttcgaaagcggtataaacattagttacgactaaagctaatagagcctcataggcgtcgnaggtctataagccttgtccagatgcaacagtggatacgggcgggcaatcctcgtaagtagcgtacccgacgtcgtaaaagatacaacg

SEQ ID NO: 60013 - DNA, 448 bp, Zea mays
  Clone ID: MRT4577_154734C.1
ggaaaacgaatttggcccggaacccccttcccaggggttttccccaatcccccccggccctttgcgggcccccgggccggaaaaagacccacggggggggcccacgggggcgtaataaccgggcaaggtgggtctttaaaaacaaaaggggccgacccaccccccccccattttaaaacaaaacagccagggaagctgggggtttgcccccaactcaaccctcccaggagggggcccccgggccccccccccatgggtggtggagaaagaggtgccccccccggggcgacccccccggccccggggggaggcccccggggggggggatccaaattcgggggagaccccgccagcccccccacaaccattttgggttcccccacgggccttttgggaccccccacctgggccaccacgtcccccacgacccttaggaaagccttttctg

SEQ ID NO: 60014 - DNA, 282 bp, Zea mays
  Clone ID: MRT4577_154735C.1
gcatctggttcgggcgctgccacctgtggattagcgagaatgacggcgacaatgagctgtggaactgagacaatggcctagatctcaagaacgatccattagttcgaatttggacggtgccaggccaacacgtatacaagtagatcataagctacgactggatcatataacttgaagatttgaactacctagtctctaggacatacgatgaaactagagcgctggtagaggcaaacaaatgggacgtgtcagtgcacaaagactatctagctatggagagac

SEQ ID NO: 60015 - DNA, 684 bp, Zea mays
  Clone ID: MRT4577_154736C.1
gagcctgttgtggccctgcctggyaggcctggggattggcggcctgttcccgatgagcctgatcctgtccctggaccacctcgacaacccgcgccgtgccggtggccttaccgcgtttgtgcagggcatcggttatctgatckccggcctgtcgccgctgatcgccggcatgatccgcgaccagttgggcagcttcgaatgggcctggtggtcattgatggctgthagccggctgatgctgctgatcgtcatgcgtttcaacccgacgcattacgcacgccatawycgctgacgtcgtattaaaaacattttttgtcccacccaaaacattgaaaggtcctacagagctttctattggtacgagcgttccgttaacattttgctcagtcttgtactgagttcggtacaaagggtttacggacgaaaccgatgctaaacagtaacttgctcagaaagctcgatatgcaggatttgatggtgtttatcgccgtctacgaccagagcagcgttaccgaggtgtcttaaacgctgttcgtcagccagtccaccgtgagctatagcctgaagaagctgcgcaccagctttgaagatgagctgtttatcaacacbcgcgcaggcatgcgtcctacgtacaaggccaccaccatgtacgarcaatgttcagaagattctggaagcatcaac

SEQ ID NO: 60016 - DNA, 416 bp, Zea mays
  Clone ID: MRT4577_154737C.1
aaaacagaaaaagtccaaacatttttaaattggggtttgggcacacatccaaatttttacaagttacaatatccataaaagggttaaaaacctttttttttttttggttgggggcccaccccccgggtaaaagcctttgaaatctttgggggcctaagaagggttttgttttttaagccttttacgaccaccatgcccaaattgggaatccctggccctcccgttttttcctcctttacctggtttagaaagaccaccaaacctgtcaccaggaaaaacaccggccctttttttttttgatgggaaaaacccttcttctccttaaaaataaagggggggcacataataatttcccttggggaacccccctggggggctttgttttctccacttttggacggactaaatcggctcct

SEQ ID NO: 60017 - DNA, 397 bp, Zea mays
  unsure (1)..(397): unsure at all n locations
  Clone ID: MRT4577_154738C.1
tggacgcctgcggtaccggtccggaattcccgggtcgacccacgcgtccgctgagttcatcagtcctagcggaagcgccgccagcatgtctgataaactgccctacaaagtcgcggacatcggactggccgcctggggacggaaggctctggatatagctgagaatgagatgccaggattgatgcgcatgcgggagatgtactcagcctccaagccactgaagggtgctcgcattgctggctgcctgcacatgaccgtggagactgctgttctcattgagactctcgtggccctgggtgctgaggtgcggtggtccagctgcnncntcttctctactcaggaccgtgcngcggctggcnttgccnnggctggccttgccctgtttgcctgggcgggc

SEQ ID NO: 60018 - DNA, 238 bp, Zea mays
  Clone ID: MRT4577_154739C.1
gagcacctagtagcgacctgatcgatcatccgtgtagagtgatgtaaggagaactgtctatcttgaaggatgattgcaaagatcatggtgaaatcatctcgtcgagagcccttgctgttgctgagcctgggcgtgctggtgtcctgctccttcgcggcggacagcttgtaccagaagctgaacatcccatgcgctcaacgggcacaccaacgccccccacaacgaaaccctgatgacc

SEQ ID NO: 60019 - DNA, 432 bp, Zea mays
  Clone ID: MRT4577_15473C.1
gctacactacgcctggcgaaacagcaacagggccacggcatggcggaaatggcgctgttgctgctggtgcctggcggacaccggcaggccgccgacagcagtgcgacgtgcttacctgcgaacgcacgaggcatgctaggcaggtggtagcgactcccgcatacatacgcatggctcgagacagcgcacgccacctacacgtaggcgctgcgagctgccatacctctgacggacgctggcagcgcctcgcttctcgccaccatggcgaagaaccccacctactatggctacaacaacacccccagcgcgcttccggacagcgcctcctgctgagattccgaccacttgctgactaaactagtacatatgcctggccagcatgcctgtacatgagcacgggcgatgatctgcctgcttgtttcgtgtcatgcc

SEQ ID NO: 60020 - DNA, 321 bp, Zea mays
  Clone ID: MRT4577_154740C.1
acggttctagatcgcgggcggtcgctcgcgatctataactaggttctacatcacattcgggggctggttaaactcataatatgacagctcctttatttttaaacaatatgttcctctatagccaaacttacaaccaaacaatttgttacggttttataacgtcctgaattccaaaactcttatcctaaccaacttaatatgcttcgattacaacccacttaataaatctaacatcattaaaaataattctatttcaattacacctttacaacacacacttatcctacacatcttaattcatttcacattgtatcactacat

SEQ ID NO: 60021 - DNA, 282 bp, Zea mays
  Clone ID: MRT4577_154741C.1
acgcgtacgcgtaagcattacagctcagggacttacgcctaactgcccggcttctagacccatgacagggacgatgaccgaggacgctgactgacgtcgtcgacaaacggctagatggtgcaagacacttcctcatggatgtctgtgacgctgaagctcaaaggcgcgcgcgccgcgtgctatgtgaccggataaccccacgatgcgcctgctagcacgaagcgcacctgtcgcgagaccgatgtgatggccgagaagaaaaagacctattctgacgatgag

SEQ ID NO: 60022 - DNA, 607 bp, Zea mays
  Clone ID: MRT4577_154742C.1
ctgggaccatgagctacgattaccaccatagctggggccgggatggcgggccccgcagctccggcggcggctacggaggaggccacggagggagccgaggccccggcggcggcggaggcggcggcggcggcggtcgaggcggccgaggccgacaccccgggcacctgaagggccgcgagatcggcctgtggtacgcgaagaagcagggtcagaagaacaaggaagcggagaggcaggagagagctgttgtacacatggatgaacgtcgagaagaacagattgtgcagctgctacattcagtccaagctaagaatgataaagattcagaagcacagatctcttggtttgctcccgaagatcatggatatggtactgaaattcctgcagagaacaaaccaaactcagagaagaagctggagaaccaggaaaagaaattgataagtcaagaaaagagaacatttagaatcagggacaaatatattgaccgagattctgagtatctcttgcaagaaaatgaaccagatgtagccttagaccaacaactattggaagacttacgaaagaaaaaaagtgaccttcggtatatagaaatgcagcatttcaggga

SEQ ID NO: 60023 - DNA, 459 bp, Zea mays
  unsure (1)..(459): unsure at all n locations
  Clone ID: MRT4577_154743C.1
tgcccgtctcgacgataaacatcctccgtggctcggcgccggatagccctaacaagagcggtgcgtcctcgagtgctaagcattcaatcgcatattgtttctggttactgtgggaacaaagcggcgacatttccgctgcagctgcttggattcgatgttgatgtcatgaacaccgtcagcttctccaatcacactggatatccgtcgtggacaggcgaaaaggcaacaggcgaacaacttaccaagctctttgaagggcttgaggcgaatggcctcgtagagtacacacacattttgactggttatattggtagtgcccagaatctgacagctgttacagagattatttcccagctgaaggcacagagcaatccgttctttgttctagatcctgtcatgggcgataacggacaactttatgttcaaccagatgtgattccaatttacanggagcttatg

SEQ ID NO: 60024 - DNA, 766 bp, Zea mays
  Clone ID: MRT4577_154744C.1
cctcgaggccggccgggagagcatagcgcatcgccgaagcaaaagtacgtatcgtctagcatcagtagcatccccacatggcgaagtccgctgccgctgccattctgctcgccgccgccctgctcggctgccttgtctcggcgtcgctcgccgaccagggcaccgccacctactacaccgtctacactccgtcggcgtgctacgggaaccaggacgagggcacgctgatcgcggcggcgagcgacgcgctctggaacggcggcgccgcgtgcggcaccatgtacacggtcacctgcgtcgggggcaccaacgagaccccgaacccctgcaaccccggcgcctccgtcaccgtcaagatcgtcgaccgctgcccgtcgcccggctgccaggccacgctcgacctctcccagcaggccttcgccatcatcggcaacctcggtgccggcaagatcgtcatcgactacagccaggcgtaagatacatgcatgttgtgggaagcacgaactacgtatatacatgcaaaagcttcattcaagcttatatatattattcggggatgagttagtaaatactaagcaataacaaatcatgtcgtattagtctcaagctacgactatacaatcctagtgcaaacaagtgattttgtttgctgaaataaagacctgcaccatacgagtgtgcgtgtataatcgtacctttggagaaataaataaccgggcagtcggggcttatctaaaacaaaaaaaaaaaaaaaaaatttgcggcc

SEQ ID NO: 60025 - DNA, 470 bp, Zea mays
  Clone ID: MRT4577_154745C.1
grggggcgccacccccattaccaggttttgcattggsgstaacacctggaggatatgrtcttcctccactagrtccactttgggacaaaggaggcacaagccattaagkgtatatgcagcagratggktgcttctcgcaaaaatattvgstctgggggrgaagggagggccaarrgctcscatrgcaarggstarttkgtaatarataragkgtacaaaytatttkcaaacaaaaatacatkttcacaaatttacgsaaagcctaaaagcaatctararrgstttttacargsarttcttcttctarcaaaggraatcctatakcaaaaggktccttaatcattatacatcttaatgsttacattttakcaaaaacaarttttcaacaatttatataaractataaactaacctctaatcaraaatarcaaccttcaaatttttttttaccataaaacatttacatcaac

SEQ ID NO: 60026 - DNA, 287 bp, Zea mays
  Clone ID: MRT4577_154746C.1
acccacgcgtccggcctcactgctagccacacacctgagctcgccgcccgtcagacgcgacaccactcagcgcggtgcggcagcaccgcaacaaccattggagcccgcggcgatggaccgcatctccacccgcttctccgccgtcgatgacctctacttcccgtcgtccttcctcggcccgtctaccgccggtaccggggctgcgcccgttcctatcgcagccgctgcgcatggcggtgctccgctctctcatctctcgcgacacgccgctcttcatggaacggtac

SEQ ID NO: 60027 - DNA, 216 bp, Zea mays
  Clone ID: MRT4577_154747C.1
taagctcgtaattcggctcgagaggaattttggctagcgtctatttttcccacagcaccaactgcaagcgcgcgaattttaaaaaacaatggggtttacacaacggtgcttgtatcaaggacatcaggctggttattgagatacacaattactgttctaaccctcagaccacgctttactcaagccaataaccgggcccttcactaaaacaccaaa

SEQ ID NO: 60028 - DNA, 288 bp, Zea mays
  Clone ID: MRT4577_154748C.1
gtgttatgaacgcacatgacaagaccaaacacataagggaacgagacggcaggctcccgtgtgacaatctccacctcccacgtagggcgtataacctatagaccgtgcatggtcaccacgtaacaacaatactgtgcacatttaacaattgaaaggctccaaacttccagaagaagcccgcacaaggaaagctcacagatgcctggacgagcaggggtattctggaaaggttgaacaagaaatgaaagcttgcagttcctgttaaagctagcacaaatcccaaccgac

SEQ ID NO: 60029 - DNA, 935 bp, Zea mays
  unsure (1)..(935): unsure at all n locations
  Clone ID: MRT4577_154749C.1
attgactcgtcctgaatgcctcctcctaacctttggatcaacaatggagggcggggaacgcacgcgttgcaattgcaattgcaacatccgaacgcgtcggcgagctaggcgagcagatgaaccccggtcactgttcccaacatctccatcgacgaacatttccacgaaaatctcgctgctctcgcgaaaaaggacgccacccgcccttgcttgctctccagtttgcaccctggaggcaggtgcaggtgcaggggcgctcctcgccagcgggcagtcaaccgcccgcgtcggccatggcggaggcggggaggcggacgcttgcgctggtgaacctggcggccatcatggagcgcgccgacgaggcgctgctgcccgcggtgtaccgggaggtgggcgcagcgctgggcgccacgcccgtggcactcggcgcgctcacgctctaccgctcagccgtgcaggccgcctgctacccgctggccgcctacgccgccgtgcgctacaaccgcgcccacgtagtcgccgttggggccgttctctgggccgccgccaccttcctcgtcgccgtctcagacacctttgcccaggtagcgatagctagatgtttgaatggtattggcctagcacttgtcaccccggcgatccaatctctggtggcagattgctctgatgacaacactcgaggcgccgcatttggatggcttcaacttacgggaaacattggttcaattnattgggtggtttgttttccctgatgcttgcacccaccacagtcatgggtattgcccggctggcgtgttgcatttcacattgttgctgttataagcgttgtagtcggntggtgttggttggnctatttgcagtggaccctcatttcctccagggttgaagtggcgagcagctgttacgcaagtctgcatgggcagagatgaaggatt

SEQ ID NO: 60030 - DNA, 517 bp, Zea mays
  unsure (1)..(517): unsure at all n locations
  Clone ID: MRT4577_15474C.1
gggtacctcgaggccgcgcaacatttgttccgccagccagattgagatgacggcaaaggcaaaggcaacggaaccagccaggtccagcctcaattccagactggccgatcctgccgcaaactgcaaacagccccccgcaacggatgtgcatgtgcgtggacccaccgccggggcaacacgccatagcatgcccagcgagggccagcgtttctacggagatgaggacagagacgcagagccgctgccgatgaataattacgctcacagtccgttttataggggaggcggaagtcgctggccggcncgacgatgacggcgtcggcgcatcttagtctggggtctcccaagcccaacgaccgcgtgggcatcttctacaagcgcctggacgtgttcgtcacctaccgcgacgaggccgtgacggtgcccgtgtctctggcgccgcagttacagagccaccgcgacttccccgtcctgaccccccgtgctgtcggacgagaccgcgtccgttgccacctac

SEQ ID NO: 60031 - DNA, 343 bp, Zea mays
  Clone ID: MRT4577_154750C.1
aacagaaacccacccacaacggggaggggggaaattttaaactaccaataaagcaaccaacccaccacaaataaagatataatccaacaccaccgtaccaactgaccaaaactatcgggaggaactgtgacatccaccaactgcatcacactcaagaccgaaaacaaaccgatcaatccacctcctaaaccttggggccagggccgcccttgccggcagggacaaacatctacatgccgccagcgccgcccatgtcttcacccccgccctgatacatcttggcgatgaagggggtggaaaagctcttcagctccttcattttgaccttgaactacaccacctt

SEQ ID NO: 60032 - DNA, 504 bp, Zea mays
  unsure (1)..(504): unsure at all n locations
  Clone ID: MRT4577_154751C.1
tgccccagagacacgctgagcgggagacagacgatgcgagccctgacaggatcccttgccgccctggcgctgctgcttggcaccgcggcattcgcccccatggcccatgccgcgggagaggccattcatattgagcgccagacctggagcttcggcgggtttaccgggcagtacgacccgggccaactgcagcgcgggttccagatctacaaagacgtctgcgcgggctgccacgggctcagacgcgtgcgcttccgcaacctgttcgagccgggcggccccgagttcccggaggaggccgtcaaggcgctggccaacgactggccgaacaagattaccgacggccccgacgaccagggcaagatgttcgagcgcgagcccaaaccgttcgacccgatcctcgggccgttcaagaacgacaacaaggcgcgcgcggcgcagaacagngcgctgccgccggacctgtcgctgatcgcgaaggcgcgcaacgtcgagtaccatggc

SEQ ID NO: 60033 - DNA, 960 bp, Zea mays
  Clone ID: MRT4577_154752C.1
cttttctcccctgctgtccccctgcgcgcagggagcaccaaggccagcgcccacttcctcccatggcgcgcgtggagccgccccctacggccagcgccactgcgacctccagcccctgtgctcggcacccctccccaaaacagcagccgcaacagctcctctccataccgacgcccctgctctcccttggccgcgaccttccctgctctttgctccatggccgccagcaggcttctccatggccggcgagcagccctggccgagctccttgggagcacgccggcgcccttgcagcaggacgtacagagccccatggcgccttgatttctagcttcatccatccatggcgccctcctttcttcctcctctgttccagatcggcattggggcagtgcgcgcaaggttctcccagccgtggacagcacccttccctccctcggatgccttgctcgccccagccagggaccatcgcgcagagcgccgtcggcctcttgagcgcgctctccattgctccggcgtttccccctgctgtttcctgcgcccactttttctcgtcgtgagcagcagccccaacgcctccgcgcggctcgctgctttgtgtggagcagtgagcagcacgccgtcgacgcccgccgtgtgctcgctattttgcgtagcccccaatcgcgctgtcgaaactcgtgctaacggtcgacgtcgcgcttcgcgccctgcccattcgacgaaacgctgagccttgtggacagtccgtgcggctagatcccgactcgttcaggttgaatccatgtgactgacttacttgcacatttgtcattgtcgcgtatatatatgtatgtgaatatgttgtatgcgaattaaaattcatggaggagatagatgtctagatatgttctatttatgcgaaatgcaatgtactggttaggcgaagaatatggtggtagacgaatgtgcgatgtacag

SEQ ID NO: 60034 - DNA, 1954 bp, Zea mays
  Clone ID: MRT4577_154753C.1
ccggccgggagctccctcccgagatctcctctcttcttccctccctccctccctcccttctctcttggcgacgtttacgctcaccagcgccaggtacgcgggtctttttcggccgaggtcgctgccgccccacgccaggtggtcaggtcttctccggtcccttcgccggcgacgtgcaccaccaggctgagctccacagtggttcttgcagaggtttcaggtttgtaacagactgctggggtgaatacacctactcaaaaaaaaaaaaagagagaaaatgggaaagagacaaagttctcgatgaattgaagtccatatgtcaaaaacaagagcaaggagctgttgtacaaggggcttgtggaaggagcatatcatatatttgtaggagataactttgcacttgactcatgggcgattggattataggggcgttgataaacatcgtgggaagtgttgccataaactttggtactaaccttctgaagttgggccatgatcagagagaaaagctttcctcaattaacaacagtgagggaaatgaaaaattcgttccaaaatctgttatgcatttccagacttggagaataggtatactcttttttgctgctgggaactgcctcaatttcatgtcatttgcgtatgctgcacagtcactgcttgcagctcttggatcaattcagtttgtttccaacattgcttttgcctactttgtgttgaacaagactatttcagtgaaagtcatggtagccacaacgtttattgtttttggcaacatcttcttagtatccttcggcaaccatcaatcgcctgtttacacgccggagcagctgatcgcaaaatacagcaatttggtgtttgttctttattgcatgtcattggtctttgttgttgcatttaaccattatctctacaggagtggagaaactattatttcaaatagttcaaaagatgctggcacatattggcgaacaatgttgccattttcttatgctattgtatctggtgctgttggatcttgctcagtcttgtttgcaaaatcattgtctaacatgctgagactgacaatgagcagcagatacgagttccatagctggttcacatattcgatcgttctcctgtttctgtgtactgctggattttggatggcaagattgaatgaagggctgtcattatttgatgcaatactgattgttccaatgtttcaaattgcttggaccttcttctctatttgtacaggatttgtttactttcaagaatatcaagtatttgatacgctcaggataattatgtttgtgttaggcatgacatttgtctttgttgggatttccttgctagcacccgatgacagtaaagctgatacgaaagatggttcaagcaccgccgatgactccataattgacatagacagaaatggaaagatgccgatggaggagacagacacagatgatagcatctcctttgttacttctgtaaaagtaaatgcaaaacgtgtactttcaaaggcaaagtctgcatgctccatgtcccttggccttggggagagcaccataagcgcttcatcggtgcttgccatgccgatggtctcgtcaagaacaaccggcttcagaggaatcggaaatgaccgtccaaagtatgtccctttaagaaccacagattggagtaacctatagccggtggtaatatataggtacacaggaaatgtctttgtttttgatgttgcctagcggatggcagtgaagttttttttgttgcttccagaggcaactgtttgttgtgatcgtagctagctataacacgagtgtatagttcaccgttgtaccctacaaaacactgtccatacctagctgcatatacatgtgtaagttttagaatacaactcaaatgattcgattcgcctttgaattgcgcaaccatttcagtggttgcatgttgtaaccatcttatatagaattgc

SEQ ID NO: 60035 - DNA, 221 bp, Zea mays
  Clone ID: MRT4577_154754C.1
tactacgcgtacggatggatattagctgggcaactgattcgctagcggaggcaattaatactatcgagaattcttatgggagcagaccagcatgcgaagatctaatgctgaaagcaattttgccgaaatgctcgcaagatactatagcttcccttcttcccccgtacactgtgaccagcggtgtagttggtatgtgaaaaccctattattaaccctacagg

SEQ ID NO: 60036 - DNA, 510 bp, Zea mays
  Clone ID: MRT4577_154755C.1
tttacttttacagaagtaaatgcaaaacgtgtactttcaaaggcaaaggtcatttttgtttcttcctagatctgattgtaccatataaatctgtcacaagtcttgcctctctcacctgatcttatttgtagtctgcatgctccatgtcccttggccttggggagagcaccataagcgcttcatcggtgcttgccatgcctatggtctcgtcaagaacaaccggcttcagaggaatcgaaaatgaccgtccaaagtatgtccctttaagaaccactgattggagtaacctatagctgatggtaatatataggtacacaggaaaggtctttgtttttttatgttgcctagcggatggcagtgaagttttttgttgcttccagaggcgcaactgtttgttgtgatcgtagctagctataacacgagtgtatagttctccgttgtacccttcaaacactgtccatacctagctgcatatacatgtgtaagttttagaatacaactaattttggg

SEQ ID NO: 60037 - DNA, 857 bp, Zea mays
  Clone ID: MRT4577_154756C.1
tttcatttgtctttgttgggatctccttgcgagcacccgatgatagtggagattggtaaaacgttgattttcatgtgtttgcacatagaatattttgactcttggtgaactgtcggcagctgatacgaaagatggttcaagcaccgccgaggactccataattgacatagacatgttctattccacgaacttgtagaaagtttcaagatttgctctgttgcattttgtgttcagtattgcattcagtgttttgatatataatctagacactgcagaaatggaaagatgccgatggaggagacagacacggatgatagcatctcttttgttacttctgtaaaggtaaatgcaaaacgtgtactttcaaaggcaaagtctgcatgctccatgtcccttggccttggggagagtaccataagcgcttcgtcagtgcttgccatgccgatggtctcgtcaagaacaaccggcttcagaggaatcggaaatgaccgtccaaagtatgtccctttaagaaccacagattggagtaacctatagccgatggtaatatataggtacacaggaaaggtctttgttttttatgttgcctagcggatggcagtggagttttttttgttgcttccagaggcaactgtttgttgtgatcgtagctagctgtaacacgagtgtatagttcaccgttgtacccttcaaaacactgcccatacctagctgcatatacatgtgtaagttttagaatacaactcaaatgattcaattcgcctccgaattgcgcaaccatttcagtggttgcatgttgtaaccatcttatatagaattgcaatttcttttacaaaaaaaaaaaaaaaaaagcggcc

SEQ ID NO: 60038 - DNA, 1856 bp, Zea mays
  Clone ID: MRT4577_154757C.1
ccggggacggctggggacgcaagtagggagagtcgcctttaaaaggagggtgacccccttgaaaggcgatcatgtcttcgcgctcccttattcatcgtgtctttccaccttccgagcccccagatggggatgcccgcagtccttccgccttgtcgttgggggaacgcaactccgtgggagttggtacctttcagccatcgttcggcttcaaggattttcatcatgcagcctggttgcacccctctgccggcggtcacccaagacggtgacctccagttcgatggcgagggaaagcaagtgatgaagacatccacactactgatgcatctataccaatacaagtaccaatttctggtcccattactcgcgctcgtgctcgtcaactcaaccatcaggtgattacactcttgagttcatgtccatcatatttagaccatggagacccgtgcactcttgttttgcttaggaatcagggagaagaccgaaagggaaaaggatttgaacatgctggattcggactgcagaagaacaccaacttgtgacggtcaccacggtcagatgcgggctcggattggaatgttcaagcacaacatggaaagcttatcaagtctactttcatatggatccggaattatagtcatatctgttctgaggccgccgtaatcattgttttcttaccgagacatttcctgccttttctgcccatggtgctgcgtcaccctattttggcccaatgggtcgtgtatcaagttaggtccattagggacgcatcctagggttgcagcacgaccccaatacccttgtggtcgtcctcccatgtttataaaccccctagccgccaccaagaacagcgggttttgtttagatcaagtttagctctcgctacttgcttgcaagcgcgcgtgctagttcagccgcccgtcttcttgtcttcggaaccccaccatattgtagtttgatctttaaacctacatttagatctggtaattcagtacttgttctacttgttcttgctagttcttcgattgcttgcaggacgagtgccctagtggccagggtgtcacgctccacaagatcgtgacagccataggaggtggtgtatcggttgctaaggcgcagcgtctttggaaggctgtagtcgggccgtgaacgtcgtctcctcccccaatcgagttattccacaccctctcatcgaaagatcgggcaatcacccaacgggtgcacatcagttggtaatcagagcaaggtttatcggtgagagatttacttttcttcgctgttttcttatctcctatagtccagaaaaagccaaaaaatagtagattagttttaccacaatcctataaacctttgagcatttactagtactacttagttagggcttgttgagtttttggttgcatcggttgtgtcgagttgctggtcttagtttattcctttagagttttgagttctaccacgttttggtcaccacgaaatccaccatcaccaaaaacatctctggttcgtttttgccaccacggatacatatcatatccgatttggaagtttaaatacaatctggaaagcttatcttatcttctttccaacggatctgaccttatctcaaaattcgttctgagcgctccgcaatcatcgtagagatttctggacttcctatattaacaagatttgttaaatctgatttaaaggggttgttagcaatatctttattgtttgggttgtcatagtgaaaaaaagggtttaggcccctgcaaaaaaaacagaagaagaagaaaaaaaaaagaatagaaaagaaaaaaaaaggaaaagaagaagaagggggctgaatctctaaatctgtgtttctctcccgg

SEQ ID NO: 60039 - DNA, 2649 bp, Zea mays
  Clone ID: MRT4577_154758C.1
ccggccggggggtaatcccgaacgcccagggctagctctatctccctcccgaggtctcctcccttcccccccttcttctctcccttgccgacgattacgccaggtgcccaggtcttcttcgggccgaggtcgctgccgccatacacttggtgcccaggtcttctccgggcccttcgccagcgtcgagcagcaccaggctgagctccacagtggttcttggagaggtctgtgatagactactaggctgaatacacctacacaaagaagagaaaaggggatcttggagaggtttgtgacacactactgtggtgaatagacctatgcagaagagaaaaagggaaagagagaatgttctcaatgaattgaagtccctatgtcaaaaacaagagcaaggagctgttgtacaagtggcttgtggaaggagcatatcatatatttgtaggagataactttacacttgattcatgggcgactggattataggggcgttgataaacatcgtggggagtgttggcataaactttggtaccaaccttctgaagttgggccatgatcagagagaaaagctttccttaattaacaacagcgagggaaatgaaaaattcgttccaaagtctgtaatgcatttccagacttggagaataggtaaccctgtctgctagaatttatttactaattttagagtcttttaatcaagaccaactttaatgctacatctgcattcaggtatacttttttttgctgctgggaactgcctcaacttcatgtcatttgcttatgctgcacaggttcttttcgttgtcctcgagacctcaaaagaaaaattagtttaacatgtaggatgtaatataatatgggaaactcatgaatggttgtgtaaacatgtaaagaataaaactctcatggagactgtatttgcgccctgtatttgcgccctgttttttttccattagttcttgggggtaaaaagataagagcttatcagtcatacagtttccatctctccttgtttcttagagctaataatgccatccaatcatattttcttttctctttctagcccagtgttttggtttgaacattgattatttacttgctatattacagtcactacttgcagctcttggatcaatccagtttgtgtccaacattgcttttgcctactttgttttgaacaagactatttcagtgaagtatgtatgattctcactttctggtagctggaatgaaaattacaataactacatggaatcatgtgactatgaagcttctgctattctttccagagtcatggtagccacaacatttatagtctttggcaacatcttcttagtatcctttggcaaccatcaatcacctgtttacacgccggagcagctgatagcaaaatacagcaatttggtgtttgttctttattgcatgtcattggtctttgttgttgcatttaaccactatctctacaggagtggagaaactattatttcaaatagttcaaaaaatgctggcacatattggcgaacaatgttgccattttcttatgctgttgtatctggtgctattgggtcttgctcagtcttgtttgcaaagtcattgtaggttatattttattttgtaaacatccatgcatctaggatgctgattctttcagatttatttggtgctgactgccatgtgttatccccactccttcctgttccctgtctaggtctaacatgatgaggctgactatgaacagcagatacgagtttcatagctggttcacatactcaattgttcttctgtttctgtgtaccgctggattttggatgggaagattgaatgaagggttgtcattatttgatgcaatactgattgttccaatgtttcaaattgcttggaccttcttctgtttctgtacaggatttgtttactttcaagaatatcaagtatttgatacgctcaggataattatggttgtattgggcatgacatttgtctttgttgggatctccttgctagcacccgatgacactaaagctgatacgaaagatggttcgagcactgccgaggaatctataattgatatggacagaaatggaaagatgcagatggaggacacagacacagatgatagcaactcgtttgtcacttctgtaaaagcaaaagcaaaacgtgtactgttgaaggcaaaggtcattggctttctttctggatctgattccaccattgatctgtcacaaatctgcctctccctgatcttgtttgcagtctgcatgctccatgtcccttggccttggggaggacacaataagcgcttcgtccgtgcttgccatgcctatggtctcatcaagaacaaccggcttcagaggaattgaagatgaccgttcaaagtacgttcctttaagaaccacagattggagtaatctttagcggacggtgatatatagatacacagcaaaggtctttacttttgatgttgcatagcgggtggcagtaaagtattttgttgctccagaggctattgtttgttgtaatcatagttagctgtaacacgagtgtatagttcaacgtttctcccttcaaaacactgtccatagccagctgcatagtacatttgtaagttttagaatacagatcaaatgattcaattcgcttcttatttgctcaacc

SEQ ID NO: 60040 - DNA, 782 bp, Zea mays
  Clone ID: MRT4577_154759C.1
ctctgttggacgaggccatggcgatactctcgatactgtccagtcaccccgagggcaaggccgcgatcggggcggccgagcccgtccccgtgcttgtggagatgatcggaagcgggtcgccgaggaacagagagaatgctgcggctgtgatgctgcatctgtccgtgcagtccgtgcatctagcccgggcgcaggagtgcggcatcatggtcccgctacgggacctggccctgaatggcacggagagggggaggagaaaggcggtgcagctccttgagcgaatgagcagattcctggttcggcaacaagagggtatcagctcccatgagcagatgttggacgagctcgaacgtcaacttgatgccttcggacctggtgttacagaggccgatatccttgaacaatcgggacttctttaacccacggttgcatgatgatgatgatgaatctatcttcgccacaatactatcaaaagaggtcttcttttggggatagtactaccaaaagagtttatgctgaaccagagttcttttatggcgacgttctatcggtactgatgcttatctgtccgtccggtttggcttcttccatgcttgtgtgctgaagctcccatcgctccatcagtttctgggaacgtaaggtagcacataatgatgagatgtgtacagtctactatgtatgctgctccagacgtcatatagctatgatatgagtagaaatgtacattttttttcactatggtactataaaaatgaggagttttagcggcggacttgatcagt

SEQ ID NO: 60041 - DNA, 336 bp, Zea mays
  Clone ID: MRT4577_15475C.1
cttaaaaacagtctgtctcacaaacttttgacaagaaaacacgagaaaacaatgtgacagtctgcgtgactttacttacatactgacatacatgacgcgatgagtacgatcaaaggataaaaaaataaattaatttatactagcaagcagcaacacttcgaagagttttttttcgcagcacacggattagaaataaattacttgatcaagcaggaaacatatcacatctccgcatttttttaacaccatcgtgaccgccgtataggactataggagcagcaggggtcatcgtgccacacaactcggccgtcgatcgatcggcagacaagcacgcgt

SEQ ID NO: 60042 - DNA, 829 bp, Zea mays
  unsure (1)..(829): unsure at all n locations
  Clone ID: MRT4577_154760C.1
gttctaccacgttttggtcaccacgagatccaccatcaccataaacatctctggttcgtttttgccaccacggatacatctcatgtccgatttggaagtttaaatacaatctggaaagcttatcttatcttcttcccaacggatctgaccttgtctcaaaattcattctgagcgctccgcaatcatcgtagagatttctggactttctatattaacaagatttgttaaatctgatttaaaggggctgttagcaatatccttattgtttgggttgtcatagtgaaaaaagggtttaggcccctacaaaaaaaagaagaagaaaaaaagaaaagaacaaaaaaaggaaaagaagaaagaagggggctgaatctctaaatctgttgtttctctttgtgctgtgctagttgttctttttcagtgactacctttgtgcctaggctcacgtctctagcatggtttagcctagaactagcacagtaccaccgttgaacgattattcagcttgcttttgtaactaacgtggtactagtgtattccttgcttcagcccacctacaactctacatatttcgactacagtttgacaggtcgtgttgctgcggcaccgatacacttattccacggttgcagacttattggttgctgacccacctgttgtgcaaggtaagaaattggaagagcttgtgtggcaggttgagagtgagtgccttgcagtagctacatcctaatagttgtagagtttttattccttcacatttttttcttgntgcctctgttcgtctaaccatggcaggattggagggtgatgatgcttctcgtatatgccacac

SEQ ID NO: 60043 - DNA, 414 bp, Zea mays
  Clone ID: MRT4577_154761C.1
ctcttttttttttttttttttttttttttttttggggtttttttttttttttattcgggggtttctcaggagaaaacaagaaccccttagggaacccgccactccccaaaaaaacaaagcagggccaaagtgaatacaagccaacgcccacaatagaggggggaaaattattttacaggttcttccaaaaaaaaaaaaaccaccaggggcccaaaaaagaaaccaacggcaagggcccaaaaccaagggccaccaaaaacaccggaaggccaccccccctctttatttatgacaaaatcaccccaaggcacgcaagggacccccccacaaacaaatatgggtggaaaaacaaatggatagccccggggcaaacccacggaaagacttcgaagggaacaagaagcccaaaatccc

SEQ ID NO: 60044 - DNA, 234 bp, Zea mays
  Clone ID: MRT4577_154762C.1
tgataccaagagtgcctatccatatccactgaactatctataagtacacatatcacaaacaccagaaatgctaaagcatttgcactcttatcttacgaaggcattgccaaaagaattaagaggataacagccctgactgctggatgtgccacccaagctatggaattggcgtcatctatcgattctcatatcaataaaacatctcaattggagggaactttgattgaaaagaaa

SEQ ID NO: 60045 - DNA, 798 bp, Zea mays
  Clone ID: MRT4577_154763C.1
ccgggcagtgcgtaggatgtaatcatcgctccgccttagtttatataccttagttcatcaggttcagtggatcatcaaccgtttcatgtctccttcataccttacctgccagtagctaccatttaccatgttgcgcttgtctgggttagaattctgcataagcaatgaaaccctaattattctgcatacaactaatataagcgtctgcaacttcattttgcaattagctcgactgacatgcacatgcttaaaaaagggtttagtggaatctaggattcagtttgttatagtagttggctgtcattacagtaaaacacaaatacattggggctatcttgctgctttgttagatcatataagcttcagcttcactgtttgtgcatggtttggtcctactcctactgttatttatagggctgagaagcttgctatgatcactgaacaattatgtgtcttaccaactctattttctgcttataatatgcactagaccgtcagtattcaaccttggaatagcacagcagcatgttttgatttataccttccagcgattcctctagtttattgtgtgtttcaattgatatatttcttcactatcggtgatgtgatagtcttcctggagtgagctttgatgttcttgtttgtctcttgctgtgcattattttatttacctatgttcactaccctcagcctgcctgttctagtttttactttgtcctctattcctctgtccatccaacaaggcaacaactgcatgaaatagtcaagataggcattgtgaccacagtcttaaacaat

SEQ ID NO: 60046 - DNA, 1970 bp, Zea mays
  Clone ID: MRT4577_154764C.1
gcacgaggtctcgagttttttttttttttttttattactgatcaagtccgccgctaaaactcctcattttttatagtaccatagtgaaaaaaaatgtacatagctatatgacgtctggagcagcatacatagtagactgtacacatctcatcattctgtgctaccttacgttcccagaaactgatggagcgatgggagcttcagcacacaagcatggaagaagccaaaccggacggacagatcagcatcagtaccgatagaacgtcgccatgaaagaactctggttcagcatgaacttttttggtagtactatccccaaaagaagacctcttttgatagtattatggcgaagatagattcatcatcatcatgcaaccgtgggttaaagaagtcccgattgttcaaggatatcggcctctgtaacaccaggtccgaaggcatcaagttgacgttcgagctcgtccaacatctgctcatgggagctgataccctcttgttgccgaaccaggaatctgctcattcgctcaaggagctgcaccgcctttctcctccccctctccgtgccaccaagggcatagtggcttttgtttataaaaatcttgaaatccgaaacccacgcgctaacattcagtagctagaactgagattttactgataataaagtccgccgctagaacttttctatataagtatagtagtatcatagtgaaaaatgtaccataggttaaagagcccccaactgttgaaggacatcagcctccgtaacgccaggtccaaaggcggcaagctggcgctcgatctcctccagctcctgcacacgtggatccaccgcgtcctcctgctgctggaccaggaacctgctcatccgctcgagcagctgcacggccttcctcttccccctccccgtgccattcagtgccagctcccgcagcggggccatgatgccgcactcctgcgcccgagccagatgcgcggactgccgcacgctggcggacaggtgcagcatcacggcggcagcgttctccctgttcctcggcgacccacccgcgatcatctccacgaggacggggacgggctccgccgccccgatcgcggccttgccctcggggtggctggacagtatcgacaggatcgccatggcctcgtccagcagagctccggtggggttcgtcacgagccccatgacgagtggcacgaggccagcccgtatggcgcggcccttgttcccctggtagatgcacaggttgaacagggcagccgccgcgtccttcttcccgcgctgcctgccctcgctcagcaagaccacgagggcagggatggctcctgtgcccccgatcgtgaccttgtattcatccaccaccgacaggctgaaaagggtggccgcagcgttctcccgtgcctccatgcttccgttcttcaggacatgaactatgcccgggacggcgccggacagtatgatgctcgccttgttgtcctcgtgtatggagaggttcagaagcgccgtcacagcatgttcctgggtctgcagatcagacgacgacaggagactcagtagtaagggaatggcaccagcctcggcaatgcagatacgattgtttgcattccgctttgccaggagccggagctccgcagcagctgatctctgttcctcaggatctgcggagcataacttggagagaagagcgtcgatgttagcacgttcgctcgaagagcacgaagatgtaggtttgtcaggctgcgtcgagcgcttcggtggatcgatcccgttggcctcgcaccactgtgcaataaggcttctaagaacatagtttggtgtcagtgttgtgtttggcatcctctgttgagtatttggacaagtctggtgcccagaagctagccatttctcgatgaatgcccgctcatatgtctggccagtagcaacaataacggggtctttcatcagctcaagagaaattggacaccggacccgg

SEQ ID NO: 60047 - DNA, 248 bp, Zea mays
  Clone ID: MRT4577_154765C.1
tgtgtgctcatttccctcgccacatgctgctcatctcatcctcatccttgcttgcaaagatctgtctctctctctctctccctccctctcttcttcaatggcggcggtctcctgccctgttgccctcgtattcttctcctcctcctgtatgctcctcctccttcaaacaatctgctgttcatgagtatttgtggagctatcatacgtctcgacacaggtcttggtacaggtactgtccacctcagtgg

SEQ ID NO: 60048 - DNA, 584 bp, Zea mays
  unsure (1)..(584): unsure at all n locations
  Clone ID: MRT4577_154766C.1
ccctcgagttttttttttttttttttttttttttttttttttttttttttttttttttttttttttttttttttttttttttttttttaccctaaaatctcactcccccttggttgtaaaaaaattgggttttgcccccaaagatgggggccccaggggaatatataattaaacttttaccgccgttaaatggggggaaaacaaccctaggaaagcggttaaaaattgggttttgaggcctcctttttttagttacaattcaccccctgcccggaggggcccttttggttcatccgaaacatgggggggggtttttgcaccccttggttgaaaattgcccaaaaccaaaggggccccccttttccagggagggggggggggccttttttgttttaaaaaacctttttgttggaacaatttgggggacaattttccggttaaaaaatttttggtgtttttcaagggacttttttgccgccttttcctggttggggttaaagaaagaaaacccctgacctaaacggggttccaaaattattgccctttcggttggaaaaaggggggntccgcccttgggccaaatt

SEQ ID NO: 60049 - DNA, 673 bp, Zea mays
  unsure (1)..(673): unsure at all n locations
  Clone ID: MRT4577_154767C.1
cgcgtcgcctcccctcgctctcatccggtgagcccctccgatccaccggtctcaatcagccccagctttcaaatttggaagtttcctcttagaattcggtcaacgcgcccggttcccctttcgagttcgaggtgtcacgacacatcgaggtttaggaaaggattgtttatgatggcatcgcctgtttcttgcatgttgttttcctgtttagatgatgcggagggccgagttggtgtcagggtgagatctgtctgcgtggataggagctgtttatgttgttgcttgggagtcgtgtgtgggtcggacatccacagttggaaatgttgaaatcttcatccatgtagatcactagatgttgatttcatgggagttgatgaaacagaagtaacttctttttttgtgatagttataatattttatttttcatgtttgttgcttccatgatacattccaccaaatccatatatttcttgtgagttcaggtcttctaggcttgttgggtattttacgttctaattacttacaactggtaaagaagtttaaattcttcaccgtctctttcaaaaggcagtgaactccattcgaagagctcaaggtgtctccttgntggtgtagttctgaattgatcaggcggtagttctgttttgtttatgacatgcataactcatgtggc

SEQ ID NO: 60050 - DNA, 385 bp, Zea mays
  Clone ID: MRT4577_154768C.1
gccggccgggtcgggaccatgaatcgtcatccacactaggtctccgttcgatatactccacactgtacacgatcactgtacgcgagcaatgcgattatagacagtcatgtgtactacttgattccgcggtgccgcctgcagcgactccacagctgcttcgccgcgcctggcatggcatcaacgactacgacatcatcgacgacgacctcgtggacatcaatggtgattcagttgcggcgccagaaggatcagctgcattggacactgccgttatgacagcgtaagatggcgggagaggaggatatagtatcatatcagatcatgaccgcctgaatcgcatgctcgtattaagagtttcctgcaaagccaatcatgatgacgctgg

SEQ ID NO: 60051 - DNA, 2093 bp, Zea mays
  Clone ID: MRT4577_154769C.1
gccggccggtctgggactgggtaggctgtggcgctatgcgacggtgggaattccaacaggaccgccgcgcgcgcgcgcaccggctttatcgtcgacgtcaccatccaatcccctcctagtaacggcgcatgcaggcgggcggcagcccggggtgtgtgtatttaaacgcctccggccgtatcaatcatccggactggtcactgtgccattgccgccgtccgtactagctagcaagctccgccgacggtcgatcgagcccatccactagactacaccgccgcggcaagcaatggcgtgcggctctgctacagccgctcgaccagcagcccgcctcccgctgctggcggcggtggtggtggcgtcctccttcctcgccgtcgcggcgccgccgggcgcgctgttgacgagcgtcccggggttcggcaacaagcagcagctgccgtcgaagcactacgccgggtacgtgacggtggacgagcggcacggcaggcggctgttctactacctggtggagtcggagcgcgacccggcccgggaccccgtcgtgctctggctcaacggcgggcccggctgctccagcttcgacggcttcgtctacgagcacgggccattcagctttgagtcatcaggagggacagctgggagcctgccaaagcttcatctcaacccttatagctggtctaaggtgtcgagtgtgatatacttggactcccctgccggcgtcgggctttcctactcaaacaacgtttcggactacgagactggcgacttcaagaccgccgccgattcgcacactttcctgctcaagtggttccagctctaccctgagttcttggcaaatccgttctacatagccggagagtcgtacgctggcgtttatgtccctaccctttcaagcgaagtcgtcaaaggaatccacaaaggagtgaagccagttataaactttaagggctacatggtcggcaatggtgtgtgcgacaccgtctttgatggtaatgctcttgtgccgtttgcgcacgggatggctctcatttcagagagtatatacaaggaagccagcactgcatgccaagggaattactggaactctagcagtgcaaaatgcgacgaggcgctgtcaaaagtcgagacggaaatcgacggattaaatatctacgacatccttgagccatgttaccacgccccagctgataccaaacaagcagcagtgaccccacaggcacagagtactagcgagctgcctcagagtttcaaagacctcggcgtgaccagcaacaagcctctccctgtaaggacaagaatgcacggacgggcgtggcctttgagagctccggtaagagacggccgcgttccgtcgtggcaggagctggcggctgatgtagcttcgacttccagtggagttccgtgtatgagcgatgaggttgcgacagcgtggctaaacaacaatagcgtcagatccgctatccatgccgaaccagtcagttcaatcggaccctgggaattatgcacggataaactggattttgatcatgacgccggcagcatgatcatctatcacaagaacctcacgagtcagggctaccgtgctttcatctacagcggcgaccatgacatgtgtgtaccttacaccgggactgaagcatggactgcgtctttaggctacgccgtcgttgatccgtggcgacagtggattgtcgacgaacaagttgccgggtacacccaaggatatgaaaagggccttacttttgccactattaagggtgctgggcacacagttcctgagtacaaaccacaggaagcactagctttctacagccgttggcttgccggtgctaaactgtgaggaggcctattttgtgtgcaaaggtcatgcagtactgaatcaaacagaagttggataaagcatgcagcaataaggcagtcgaaggatcaaagtatccaacgcgccaactacaatgttgcattcattttcacatgttataccaatgcagttgcttaaaaaaaaaaaaaaaaaaaaaccaaaaaaaaaaaaaagaaaaaaaaaaaaaaaaaaaaaaaaaacaaaagcatacaaagaaaaaagaatattaaat

SEQ ID NO: 60052 - DNA, 240 bp, Zea mays
  Clone ID: MRT4577_15476C.1
tccctcctccacgccaacacaactggccagtgctaaaaggctgctcatgaatggcaaaaggccgccagggcacaacatttgacacggaccatctgacttgccactggtatttacacgcagaggtcgagagatttctttcctttccagcaacctacttcgattgatgcccaaacgggcctacctgcacatatcagcccttcagctctcgccacttttgacaccaacgatctgaacaaacca

SEQ ID NO: 60053 - DNA, 544 bp, Zea mays
  unsure (1)..(544): unsure at all n locations
  Clone ID: MRT4577_154770C.1
cccgggnctagttctngaacgcgggctgccgcccttttttttggtgtcttcaggagagggtttattatttgctgtttttgacctcacgagggatttgtcctcgcacaactcaaataccgatgctgtggctacacaatggtggatagaataatattttggccaaaaaaaaaaaaaaaaaaaaaaaaaaaaaaaaaaaaaaaggaggagagaaaaaaaaaaaaaaaaaaaaaaacataaaaaaaaaaaaaaaaataataaaacgaaaacctaaaaaaaaaaaaaaagcaacgaaaaatatacaactaactaaactagggaaaagggcgggcgtttttaagaaattaaaatgttttgcacctggatggcaaggttcataagctttcttaataggggaagaggaaaataaactttcgggcttgggaacaaaaagacagcctggaagaaaaatgggagggaccccaaaaaaaatcattaagagcaaatagccgttttggttacgcgcataaagacaaaaagactcgccagggtcctatttcccaaaaat

SEQ ID NO: 60054 - DNA, 2182 bp, Zea mays
  Clone ID: MRT4577_154771C.1
cattgggtacctcgaggccggccgggagctaccgtgtgtgtatttaaacgcctccggccgtatcaatcatcccgactggtcactgtgccattgccgccgtccgtcctaggctcctagctagctagctagcaagctccgccgacgacggtacgtcaatcgagctagccctgcccatccactacactaccgcagcggcaagcaatggcgtgcggctctgctaccgccgctcgaccagcagcccgcctctggctgctggcggcggtggtggtggcgacctccttcctcgccgtcgcggcgccgccgggcgcgctggtgacgagcgtcccggggttcggcaacaagcagcagctgccgtcgaagcactacgccgggtacgtgacggtggacgagcggcacggcaggcggctgttctactacctggtggagtcggagcgcgacccggcccgggaccccgtcgtgctctggctcaacggcgggcccggctgctccagcttcgacggcttcgtctacgagcacgggccattcagctttgagccatcaggagggtcagctgggagcctgccaaagcttcatctcaacccttatagctggtctaaggtgtcgagtgtgatatacttggactcccctgccggcgtcgggctttcctactcaaacaacgtttcggactacgagactggcgacttcaagaccgccgccgattcgcacactttcctgctcaagtggttccagctctaccctgagttcttggcaaatccgttctacatagccggagagtcgtacgctggcgtttatgtccctaccctttcaagcgaagtcgtcaaaggaatccacaaaggagtgaagccagttataaactttaagggctacatggtcggcaatggtgtgtgcgacaccgtctttgatggtaatgctcttgtgccgtttgcgcacgggatggctctcatttcagagagtatatacaaggaagccagcactgcatgtcaagggaattactggaactctagcagtgcaaaatgcgacgaggcgctgtcaaaagtcgagacggaaatcgacggattaaatatctacgacatccttgagccatgttaccacgccccagctgataccaaacaagcagcagtgaccccacaggcacagagtactagcgagctgcctcagagtttcaaagacctcggcgtgaccagcaacaagcctctccctgtaaggacaagaatgcacggacgggcgtggcctttgagagctccggtaagagacggccgcgttccgtcgtggcaggagctggcggctgatgtagcttcgacttccagtggagttccgtgtatgagcgatgaggttgcgacagcgtggctaaacaacaatagcgtcagatccgctatccatgccgaaccagtcagttcaatcggaccctgggaattatgcacggataaactggattttgatcatgatgccggcagcatgatcatctatcacaagaacctcacgagtcagggctaccgtgctttcatctacagcggcgaccatgacatgtgtgtaccttacaccgggactgaagcatggactgcgtctttaggctacgccgtcgttgatccgtggcgacagtggattgtcgacgaacaagttgccgggtacacccaaggatatgaaaagggccttacttttgccactattaagggtgctgggcacacagttcctgagtacaaaccacaggaagcactagctttctacagccgttggcttgccggtgctaaactgtgaggaggcctattttgtgtgcaaaggtcatgcagtactgaatcaaacagaagttggataaagcatgcagcaataaggcagtcgaaggatcaaagtatccaacgcgccaactacaatgttgcattcattttcacatgttataccaatgcagttgctaattacctgcattgttcatgagttcacagtccatctaattggttgaccacaccgtctcatcttgcaccactatatacgttaactttattttagccttttaataccatttgactgcacccacacatacgccagaaaacgtcgtatctggccagccaacatcttacgaacctgcacctgagcgcacaaccatccaatcatgttgagtgtgaccaaacatttgtgaaaattttcccgtgattttttttaataatagtatatacggtggttgggctgt

SEQ ID NO: 60055 - DNA, 245 bp, Zea mays
  Clone ID: MRT4577_154772C.1
ccggaatactggggccgcccgcccttcttttttttttttttaacgaacatgatttgcctctatcagggaggtaaatgtcctcccttctccttcacaacagggtttaacagcaacatgatcccaccttttagccaaaatgtctcaaaagaaagaagtcctcttgatactagtcccatcgactgcctgccatgaaatacattactgccactggtagaaacaggacagcttttttgcttctgaacaaa

SEQ ID NO: 60056 - DNA, 263 bp, Zea mays
  Clone ID: MRT4577_154773C.1
attccgagaaatccagtgctttccaaacgtgacgaaccagaaagaagaacctcccttcgggaaaagagcaaaatgatcagggtacgacacaccaatgtggggcctgcaattgcattgtgtgcgcactagcttaataaggacttgggccggccaaaggcgttgccccccggaatccatcagatccatcaatttcttgaacgcttttacatgtcaaggattgggatccggatgctcatatggcataacgttggtttgcatgaccc

SEQ ID NO: 60057 - DNA, 855 bp, Zea mays
  Clone ID: MRT4577_154774C.1
actcctatgggcgattgggaccctcgaggccggccggggccgtcggccagacccctcacacagccgtcgccccccgccagcccgcctgcgagagaagtccgcttcatccgttcgccgcctcaaggacgagatggacacatcaagccctgcagcacttgtcaatgcacagatgctgaacatgtttgttgggcgaagagtgcgcacggttgttcaagtccaacacaatgaaggtggagtgcttgtcgggcagtccaccgatggccatcagttatgtgtcaaaagtgccatggacgtccccgtttcacactttatggaggtttatggaattgctgaaaacagccagaccatccgtgctgaagtttgcacagattttggtcccaactttgatcccaaggtttttgatgagttgtgcaagctggcgagtggcaggttcaagcacttgttcctgtagagataatcatcgcatggaggatcttcagccaactgaagcttgtttgaaactgaatgtttcggctttaaatttaagatttggctacatgttccttcattgcatggaggaccttcagtaccctgttactcgtcattactggacttctattagcatgtataagcaacgtaggactgcgaatacaagcaaaatatgtcatgtagttgaagaacctatggtttttttctacctttaggcaatccaaccctaagctaagcaaaatatgtcatgtagttgaagaacctatggtctttttctacctttaggcaatccaaccctaagctttttatgtagcaaaaaaaaaaaaaaaaaaagcaaaaaaaaaaaaaaaaatttgcggccgccaattttttttttttttttttgac

SEQ ID NO: 60058 - DNA, 908 bp, Zea mays
  Clone ID: MRT4577_154775C.1
cccacgcgtgcgctcttcctctaggttaagtccatgccactccattggtacctcgagctcgagggcggccggggagacgatatgttcaaaaaaaagcaaatttgccggctgcaaaacccctcccacagccgtcgccgcccgccagcccgccagcgagagaagtccgcttcatccgttcgccgcctcaaggacgagatggacacatcaagccctgcagcacttgtcaatgcacagatgctgaacatgtttgttgggcgaagagtgcgcacggttgttcaagtccaacacaatgaaggtggagtgcttgtcgggcagtccaccgatgggcaccagttgtgtgtcaaaagtgccatggacgtccccgtatcacattttatggaggtttatggaattgctgaaaacagccagaccatccgtgctgaagtttgcacagattttggtcccaactttgatcccaaggtttttgatgagttgtgcaagctggcgagtggcaggttcaagcacctgttcctgtagagataatcatcgcatggaggatcttcagccaactgaagcttgtttgaaactgaatgtttcgcctttaaatttaagatttggctacatgttcctttcattgcatggaggaccttcagtaccctgttactcgtcagtattggacttctattagcatgtataagcaacataggactgcgaatacaagcaaaatatatcatgtagttgaagaacctatggtctttttctacctttaggcaatccaaccctaagctttttatgttgctgtcgcttgcatttggaccctgagttgctacaattgtcatggagtttgatgagaggaaaaatgattctaatatgctagttacatgtccaaaaaaaaaaaaaaaaaaaaagcggccctcgagctcagcttt

SEQ ID NO: 60059 - DNA, 468 bp, Zea mays
  Clone ID: MRT4577_154776C.1
aaagggggggccaaaaaaaaaaaaggggggcgaaaaaaaagcggaaacagggggggaaaacggggccacacccaaaaaggggggagcaggcccagcaggccaaacaaattaccctacagcagggaccccatgggcggttaacacaacttgggggccctcgatacaaaaacagcacaaaggggttaccagcggggattaaaggcccacaaaatagggaaacacgattatcaccggggaccaaaggcaaccccttcgagggggggacgggggacccgggaaaaaccatggaaacgaccccccacttggggggaacgggggaacccccgcaaatctgggaggatccggtccccccccaggtctcgccccacgaggtcttgaagaaccagaaagggtgggccctcaggcgaaggggggggaaaccagaagccccctatccaacaaggagaacaccaggggcaaggggcccgc

SEQ ID NO: 60060 - DNA, 956 bp, Zea mays
  unsure (1)..(956): unsure at all n locations
  Clone ID: MRT4577_154777C.1
tgggtacctcgaggccggccgggccggtcttcccctccgtctgttgtccctctcccttatctccttctagccgcgcctgctcctttccagcgacttcctctccatcttcttggcgctcggccgcccctctctagtctccagcgcccagcgcgcgtgcctggctagccccagctcggaccgagccatttccgcccgtccacgttcctccctgctcgcgcccatctccctgagctccgtgcgcgcgtgctccctacccagccagcgctcctcccctccccatccatggccatcgcgcccttcttccctgcccctcccatgctgcccctgtttccccaagccgcgtgctccttcctgctgccgcgtccatggcgcccagccgagcccctcttccatggtcgctgtcctctgctttcctttctcagcctccaccccgtcaggtcgcgcgctgacctcgagctctagccatgagcgtcggcgtcttctatctctattcctccctcaactccaccatgccgtgaagtttccctgcgcgcatcgagctccctacgcctaccattctagcaactctggcgtcaacgctccctgttcttgttgcttagagtgctccagcatctcgccaccatggcctttgccattcggcgatccaaactatgtacctatgtgtgtggaatcgcagcagagcaattgggtgtcagggagggtgacagctccgtgcatcgcttgtgtggtgctcgacgtaatggcggaattagaaatcatagctgtgctcgtggccttcgagttggattaaattactggtgagtgtcgtgctgtcggaccattgctcatgcttgtttacgacacccgcaaagtacttgacaaattgtctaaacctgnngatcgtcgccgtttccgtaaattccgtgtcgatctgggttatggtgatctgacttgctattccctcttatatgattgaa

SEQ ID NO: 60061 - DNA, 331 bp, Zea mays
  Clone ID: MRT4577_154778C.1
ggaacgcaaagtaagttcattattgatgaactgaatacagtcgttattacaatcagctctcacggagggcacttacgggaaagacaacttgcatatttgtacctgaccgcgcaggcgacagccacccttcacgtgaaggggccgagaatccgctaccaatactgacaggacactccgtcctcagctcccacgacataactcaatgcagagctgctactaaagcgcttggagatgaaggcgctggagacgcacattctgtatcacgtgatgtcttctagcagcccgtctgggaactcgggcgggcggttgcggcccttgtcgcgacgctcct

SEQ ID NO: 60062 - DNA, 289 bp, Zea mays
  Clone ID: MRT4577_154779C.1
caaaaccctgagccctgtgcatgctgtctcagtcttgcggtgcgactggatacaatgactaacttcccctcctcccctctgtaaacaccattttccatggagttcaaaaaaagttgttttcttaacggtacatatcatagtgaatggtttccccagtgtatatgaatgttttaagtgtctccaatagcttatgcagtctaggagctttccaatactcatttaattaagatttaatcatttgctaatggaaatcttaccacctttcattttccctctgttaccaaatttc

SEQ ID NO: 60063 - DNA, 273 bp, Zea mays
  unsure (1)..(273): unsure at all n locations
  Clone ID: MRT4577_15477C.1
annnnnggtttttgtttggaaacacaaanaaataccatttttttttttagnnntaattttatataatattttaaaatatttacagcaattatttattaaaaaaacatgctggttgatacataggaatgctggagccaaggattaacacatcactaacaactgacaaaaaaagaccttgcaatcaaaaacacaaaaaggcaacaacaatcgatactaacgaatataaaccctttggactagggttaacatcactgaagctaacagaataacttg

SEQ ID NO: 60064 - DNA, 483 bp, Zea mays
  unsure (1)..(483): unsure at all n locations
  Clone ID: MRT4577_154780C.1
acccaccccaccccctaccgggcggcgccccagacccgaggccaaacccctttcttagcgtccttgccttgcaatctaagctcccctcttcgaagctccgcggtcttgcaagtaccctagatcacttcactctggcgaggagggagggggtctccgctacctcgcgcgacttggatgataaaggcagcgcaggaggaggatgccctacgggcacagagactccattattgtgctcgaagctgacatacaacacgccaacaccctggtctctacagcttccccaggactataatcgtgcattcctgcctatgccgttggcgtacaatcccgcatctcatatattactcttcttggcgcaacaatacacgactgcangcctgactacggactctccgtctgctgagaatactcatatacaacaggacataggaggtggtacaacacccactcagcgactcgattatatgaaagccaccatcaaat

SEQ ID NO: 60065 - DNA, 595 bp, Zea mays
  unsure (1)..(595): unsure at all n locations
  Clone ID: MRT4577_154781C.1
tgtggctccctggnaagtgcccgaagcttttcaataagctttcctcaagagacttggttttgtggaatgcgataatcgcatgctgtggcactcatggatgtggtcatgatgcccttgctctgttccaagaactgaacgaaaccggaataaagcctgatcatgcaacatttgcttctcttctgtctgccctaagccactctggtcttgtggaggaagggaaattctggtttgatcgcatgattaaggagtttggcattgaacctgcagaaaagcactatgtatgtatagttgatctcttagcacgttctggtcttgtggaagaagccaatgacatgcttgcatcaatgcaaactgaaccaaccattgcaatttgggtcactctgctttcaggttgcttgaataacaagaagctagagcttggagaaaccatagcgaaaaagatccttgagttgcgacctgaagacattggtgtccttgcactggtatcgaatctctatgctgctgcaaagaagtgggacaaggtcagggaaatcagaaagctaatgaaggatagcggcagcaagaaggtgcctggctacagcttgatagaagtcaa

SEQ ID NO: 60066 - DNA, 444 bp, Zea mays
  unsure (1)..(444): unsure at all n locations
  Clone ID: MRT4577_154782C.1
ctttgggctgatttatgtgcttgtctagacccggggagcatcggagcagtaaggccattcatccgcatgatgcatgttaacgtgattcgcgcagtcgcgagcagctcaacgccgtagcgatacgcaacggtgtatttttgcttcatcaatagacgtccatcggagaccgttacagtcgactccgcaacccgccacagggtagcacgaacacacccacggcagtccgaactcacccgcggaccaaaaaaaaaaaaaaaaaaaaaaaagggtggttgtctcagaggacttaagtccatgcatgtgcgtacgtgatgctacagtctcctcacagcgctattcaaacctaacctatcggttgctgccccataatgctgcgatcgggaaaatttcggtgccatttaatccaactgttccgtagtatacnttttccctgttagtcggtgc

SEQ ID NO: 60067 - DNA, 675 bp, Zea mays
  unsure (1)..(675): unsure at all n locations
  Clone ID: MRT4577_154783C.1
aattggcacgagggtcctcccttgcttcccccacacggtgtctccttctctgattgcagttgtggagcancagctgtcgttgtcttccctggcttctcccatggccgcctatcccccatcccctccaccgtgccctctcatctcctatcccctctgctcgccaccatcccctatacccttgctagcagcatggcgctcatcccttcctgatgtgagctgcacatgacgtctccagctctccattgatggcagctagctgcgccctcacttcctcccatggtgagatcgcccatggtggctcctcctgctcggcgtactcccctctgcaggagctcgcccagcccctctctgctaggaacagcagcacctccctccatggatgcctagttgttgacttgtgcaattcatagtcatcggatttagtggagaagaagcacagtccaatatgacgcccgccgggtgttcgacgaaatgggagaccaaggaactgtcgtcgttcttgcaagataaatcaagtcggatcatgatgtggtacgttatttgatcgcacgatgtggaggaaaagtgttggattaacctcanagtgatgctgacgaataaaccagaggaatggatgatctgatcaagtgccaggatggaagatgctcaccaagtggtcatcatctaacaacactt

SEQ ID NO: 60068 - DNA, 387 bp, Zea mays
  Clone ID: MRT4577_154784C.1
gacctacccgtcctcaagagcttccgttttctacctcagaccattttcccgaacatgggggtagatatctacaagtgagttctaaatctcaatggagccaacgattctgttgtggctgatttccaccgggcatcaaaggatggtgcactggctgacgagaacatgcgtggaattcgctttgaggtctgagatgtcgatcttcatgctgatgctatccacaggggtggtggtcaagtcattcccactgccaagacggtcatctatgcctttcatctcacggtcaatccaatgctgctgtatccagtctacctggtgtagatccatgccccagaaaatgcacttggtggtatctactgtgttctgaaccacaagaaaggccatgtcttt

SEQ ID NO: 60069 - DNA, 1069 bp, Zea mays
  Clone ID: MRT4577_154785C.1
ttttttttttttttttgcagcgaaaataaattatttattacaaaatggttacaagttacaacatttacaagttatagcaagattacaatatatatcatcggagttggttacaaaagaaattgattcaaaaagattacaatttgaatgtataaaacatttataagttttaaaatacatgctagcttaagtgacaatcctcaataaagaagctaaagatgggatatacttatataagaaggccgagcccaccggcacttagcagcatccacaacagaacaaaattataacctgggataacactaagtgttgttagatgatgaccacttggtgagcatcttccatcctggcacttgatcagatcatccattcctctggtttattcgtcagcatcactttgaggttaatccaacacttttcctccacatcgtgcgatcaaataacgtaccacatcatgatccgacttgatttttcttgcaagaacgacgacagttccttggtctcccatttcgtcgaacacccggcgggcgtcatattggactgtgcttcttctccactaaatcctgggatttccccctcacatctcacacataagcacacacatactcacaatcaaccacaaaccacatatatcgattaaggagataagtagcataagacaaagggacctcaccgatgactatgaattgcacaagtcaacaactaggcatccatggagggaggtgctgctgttcctagcagagaggggctgggcgagctcctgcagaggggagtacgccgagcaggaggagccaccatgggcgatctcaccatgggaggaagtgagggcgcagctagctgccatcaatggagagctggagacgtcatgtgcagctcacatcaggaagggatgagcgccatgctgctagcaagggtataggggatggtggcgagcagaggggctaggagatgagagggcacggtggaggggatgggggataggcggccatgggagaagccagggaagacaacgacagctgctgctccacaactgcaatcagagaaggagacaccgtgtgggggaagcaaggga

SEQ ID NO: 60070 - DNA, 158 bp, Zea mays
  unsure (1)..(158): unsure at all n locations
  Clone ID: MRT4577_154786C.1
gcggcagtgcgtatagaggatcgncaatcagaacagcatgaagatgggcatcgnncgcngcttgtaacaggctctgacagctgccaacgcctgtgcaatgcagatgccctgcccctgcacggggctgcaaggcatgtacagcactggcgccggcctga

SEQ ID NO: 60071 - DNA, 667 bp, Zea mays
  Clone ID: MRT4577_154787C.1
attccaggaagattcgccatagctattgcttctccccgccgccgagctgaccacacaaaacaccaccagccctcacgctccttcctctgctgtcgagccattgataatgcccctgagcttggagccgacagccgggctcgttctggacgaatcagaacttacttctcttgtctatgcgcacaggtatcaatggactacttgcatcttgatgtgatgctactaatcggagttctaacaaggacgaggatagaattcatagccatggatctagtgagctaattttcatcggacgtaagactcgcctcttgaggtacaagacacgagtgacgtgtcgaccagccatgaggcatcaagaagttccagactgctgcttattccaactgcgtgctccagacatcgtgatatcgcctcacatgcgattcgcgggagagtaagatattaaatcatgtttcctcttgtgacagcaggtttccgttgaatctgggtgccttcctctgcttctgagattccaacttgtcttgcccatctctccttttcctctctcatcctctctttcttggacacgtatccattgccgatgtcatcagcagagtcttgagtctcttcacctgcatcccctagtgagtttgagggctatgagagaagcctggagataacggtctctgac

SEQ ID NO: 60072 - DNA, 259 bp, Zea mays
  Clone ID: MRT4577_154788C.1
tcgagcccaaaagatgatcttcgtcgggtatgagcgaggcactaaagcatttagggcatatgacccaatcaccaagtgtgtaaccataactcaagatgtggtgttcgatgaataagcttgctgggataggtctgatggcaacaagggtggtgaaggagatgtcactaattctagtgatcttgttgttgattaccaggtagctccaaatgtggctagggcaggcattgttggtgaaacaattatggaactaagatttatc

SEQ ID NO: 60073 - DNA, 140 bp, Zea mays
  Clone ID: MRT4577_154789C.1
tctcacacacactcactcagacaattccttttgaaagcctagtgtgtgtactagcaaccagcttggttgctctgcagcaggcactcatcatgtctcatgagaagcaccttctcttcttcaaccaccacaagttacgacta

SEQ ID NO: 60074 - DNA, 645 bp, Zea mays
  unsure (1)..(645): unsure at all n locations
  Clone ID: MRT4577_15478C.1
ngatgatttattgtggatggtagcccttacgcacgtaataacttgtataaaaattgtaagtcgactggtagatcctaatttgattgttttaactctaacaaacggtaaagtgttagagtaattccaatcgctagaacatggtgatttttgaagaaaatagaagctgaaatttattaatcgctgttttggactgcacgtactgttttcggtgtgttgtatgtttgatgagctaaattgtgttttctctatatatgtgctatagaaaagttgtagataacatgattatcttgcttgtactaaaatttgacaaccataaacctgatcgtttaggagttgtgcttttcacaagcccagcacctgaatttgtcaaatttctgaacagatttcagaaattgcaatggttgcttaagttaatgttgaaattagttattggtggtcacaagaaagttgtagataactttattatcttgctggtgttaaaaattgacaggcataggtctgacggtttaggagttaggatttttacaaattcagtaactgaatctgtccaaattctgtacagatttcagaaactgcattgtttgcctaatttaatgttgcaatctgttcatgggtcgttataataaagttgtagatgcttttctg

SEQ ID NO: 60075 - DNA, 520 bp, Zea mays
  Clone ID: MRT4577_154790C.1
acacccctacatctccccgcgcggccggctgccaaggcccatagccctagttatggacttggtctggactccctgctggcatgctcgactacctatctttgcttaccaaccctacggtctaccactggatcttagatctaatctttgacttgcgcatatccatgacaatgatgtatgaacccctctttctgccctataagccacatacttgccttccctttaagcgctgcctttgttgcgatctcaattatgattgagagacttggccattttcagttttagagatggaagaagagccacttgacatggatcagagctccgacaccatcgacaacgggaaggcaaagatccagcacagagagggcatccccccagaccagcagcgtctgatcctcgctggcaagcagctggaggatggccgcaccctaccagactacaacatccagaaagagagcactctccacctggtgctccgccctccgtggtggtcagtcagccatggttcatttaagctgctgct

SEQ ID NO: 60076 - DNA, 1039 bp, Zea mays
  Clone ID: MRT4577_154791C.1
cctcgaggccggccgggagagcaatttcccgccacgcgcttccacaaccaaccacctccttgcttattgctgctcgcttcctcctcttccgctaccagctattgcttacgtgctgcttcatctttatcctcgtctctgttcgtcatctccatctcccttaccgatccgatcgtcaagcaagctaagccaccctgacatggcatcttcacccccctcctccgcctcgctacggcagaggccagccgcggcggcggcggcggcggcgacgcccgatcagcagcacgagccaccacgtctcgaagacggcctcctcccgaaccaaggcggatccccggcgacatcggcgctgtcccaggcgctgtcctccacggcgaacctggccaacctgctcccgaccggcacgctgctggccttcaacctgctggcgccgacgttcacgaaccacggcgcgtgcgacgccaccacgtcgctcctcacgcggggcctcctggcgctcctcgccctcgccagcgcgctggcctgcttcaccgactccctcaggtccccgcacgacggccgcgtctactacggcgtcgccacccgcacgggcctctggctcatcgactacccgccgggcgcgccgccgctgccccagggtgccaccgggcgctacaggctcgcgttcatcgacttcgtgcacgccgcgctgtccgccgccgtcttcggggtcgtcgccgccagggaccgggacgtcgtcgcctgcctgtacgggcccacgccggacagggccacgcaggaacctgctcgacgttctgccgctcggcgttggcgtgctctgcagcctcctcttcgtcgccttcccaaccaccaggcacggcatcggataccccgtcgtcgccaatgccgtcgccgcagccaccgccacttcctcctaacaatagtttaatttaatttaatttcttcgaggctttaatgccttaatgtaactgcgttcgtatgtactattcatattttttttcatcaatcaaaacgacaacaacacacgttcacggaggggggg

SEQ ID NO: 60077 - DNA, 647 bp, Zea mays
  unsure (1)..(647): unsure at all n locations
  Clone ID: MRT4577_154792C.1
gttaagagaatctctgatctacaggcttcaaaggaaagtccagcaagggctgttgctagcgataagggtacccctgtaccctcaagttctagccaggagaaggatccagtggctaagactatactgaacaaggtgaaggaaaaaagtgatgacgaagtcgagaaagagagagatcaagagggcgggaacgtgatgccaggggtagggattctgatcgtgatagcaggggtcgcgagtctgatcgtgagagggaccggagacgctgctctagggaaagaagttcaggacactcagacaaggagaaatcaaggcgccattcatcacgcgaccgggctgactactacaattcgcattcatctcgtgagaaagatcggcataggcaccattgatcaaggtgacgaggatccccggtctgcagggcttcgctgcatggagaccaccacttggcagtgccgaccggatcatgaaaacttgtggattatcatcccactggtggttgtattggcttgattgtgttttgcaccttggattgtaacttgcaagatacgctagccatgagctgtgtgcaacttgaattataaacccncatataagaacaattgacgcacgtgcactaactgccattcagcagagcttgtggatgtata

SEQ ID NO: 60078 - DNA, 303 bp, Zea mays
  unsure (1)..(303): unsure at all n locations
  Clone ID: MRT4577_154793C.1
gcgcgcactcacacgcgcgctgacnaggtcttatgcattgcgcgtgggtaccacctacagccgcacgagccatattacaccccccgatggggtgccttttcttcccagactaggaaaccaaactatccagacgacatccattcccaacttcaactgcgcctggactcctatcccgaaccctagccaccaaaccggacgctatagaccagccatcgctccatacctcgcgctcatgctcctcctcatactcggactctacaacgtccactaccactacgacacgctcttcatccacaagcacaa

SEQ ID NO: 60079 - DNA, 316 bp, Zea mays
  Clone ID: MRT4577_154794C.1
ccagccgggaaatcacttgaattctgattttctgaagtttgcagcagtaagattacatttttccattcactaccacgactggctacatacatttcctgttctccgtggggggtccccagataaaataaaaccaaatccggggtccttaataggggaggggtcatccagcacagtacccacggtttaatcccagtcagcatggaaaaacccagcatccttaatttaaaaatagtagacgttctttaggagcatgttttcctcctggaagaagtctgctaaaaaagtcccatttggggggggagggtaaagagaatga

SEQ ID NO: 60080 - DNA, 1987 bp, Zea mays
  Clone ID: MRT4577_154795C.1
cattgggtacctcgaggccggccggggtcgcaagcgcatgtcccccgtcccgagtcctagcgcgactccgtgcgacggcgaggcctctgtcccgtcctcgtctcctcgaggcccggaggctgcgagtctgtgacacttgaccgtgaggcggacggcgactcggaggacttcaccagcgagtccctcaagcaccgaggccgagccgcccaccgcccgccgccgcctcgcctggcgctagtcgccgttgccgagcctgttcggcacatccgttggggtgccggggcaccgatcaggctgcgcacagccgaagtcggcctccgggtgccccaagctgcagagcagcgcgccagcgcccgtggaccggtgaatcagactacccttgtttcaaatcctgggtccgccattgggggcggtgaggccaccctagtagaggctagaggatgatatacacggcgatcgacacgttctacctgacagatgagcagctccgtgactcgccatcacggaaggatgggatcgacgaggccaccgagactgcgctccgcgtctatggctgtgacctcatccaggagagcggcatcctcctcaggctaccacaagcagtgatggccacggcacaagtattgttccatcgcttttactgcaagaaatcatttgttcgatttagtgcaaagagagttgctgctagctgtgtttggctggcagggaagttggaggagagtcccaggaaatcaaggcatattatatttgtcttccacagaatggaatgtaggagagaaaacttgccaattgaatttttagatgttttttcaaagaaatattcggaactgaggcatgacctgatacggacagaacggcatctgttgaaggagatggggtttatttgccatgtcgagcacccccataagttcatatcaaactaccttgcaacacttgaagcccctcctgagcttactcaagaggcatggaaccttgccaatgatagcttaaggacaactctgtgtgtgcgatttaagagtgaagtagtagcatgcggagttgtgtatgctgcagctaggagacaccgggttccccttcctgaagatcctccgtggtggactgtctttgatgctgatgaagcaggaattcaggaagtttgcagggttcttgctcacctctacagcttgcccaaggcccaatacattccagtatataaagacaacgattcctttactgttaagagaatctctgatctacaggcttcaaaggaaagtccagcaagggctgttgctagcgataagggtacccctgtaccctcaagttctagccaggagaaggatccagtggctaagactatactgaacaaggtgaaggaaaaaagtgatgacgaaggtaaaccattgcccgctgaatttgatggaaaagaaaacccggtggcaaactcaaaaaatgacaagtctgattctggtgtcgaccggagtcgagaaagagagagatcaagagggcgggaacgtgatgccaggggtagggattctgatcgtgatagcaggggtcgcgagtctgatcgtgagagggaccggagacgctgctctagggaaagaagttcaggacactcagacaaggagaaatcaaggcgccattcatcacgcgaccgggctgactactacaattcgcattcatctcgtgagaaagatcggcataggcaccattgatcaaggtgacgaggatccccggtctgcagggcttcgctgcatggagaccaccacttggcagtgccgaccggatcatgaaaacttgtggattatcatcccactggtggttgtattggcttgattgtgttttgcaccttggattgtaacttgcaagatacgctagccatgagctgtgtgcaacttgaatttataaacacaacatataagatacaattgacgcacgtgcactaactgccattccagcagagcttgtggaatgttataaagaaacagtttgtggaaaaaaaaaaaaaaaa

SEQ ID NO: 60081 - DNA, 1993 bp, Zea mays
  Clone ID: MRT4577_154796C.1
tgggacctcgagccggcgggaaagggggaggattattatcgaatagtagaacaccacttacctggtattcatgcgtcgaccatcaccggcgacggcgtatctccgtgctcacgtcccggcgtcccgagccggcggccacgggccataacagacccggaggacatcaccagcgcgagcgccgccagccccaagcaccgaggccgagccgcccgagcgcggagcggcggtaccacgccacccgcccgccgccgcccgttgcggaggctgtgcagcacagccgttggggtgccgaggcaccgatcaggctgcgcaaccgccgaagtcggcctccgggtggcgccaagctgcagagcagcgcgccagcgcccctgtatcggactacctttttcggcgagaccaccctagtagaggatgatatacaccgcgattgacacgttctacctgacggaggagcagctgcgcaactcaccatcacggaaggatgggatcgacgaggccactgagactgtgctccgcgtctatggctgcgacctcatccaggagagcggcatcctcctcaggctaccacaagcagtgatggccacggcacaagtattgttccatcgcttttactgcaaaaaatcatttgttcgatttagtgcaaagagagttgctgctagctgtgtttggctggcagggaagttggaggagagtcccaggaaatcaaagcatattatatttgtcttccacagaatggaatgtaggagagaaaacttgccaattgaatttttagatgttttttcaaagaaatattcggaactgaggcatgacctgatacggacagaacggcatctgttgaaggagatggggtttatttgccatgtcgagcacccccataagttcatatcaaactaccttgcaacacttgaagcccctcctgagcttactcaagaggcatggaaccttgccaatgatagcttaaggacaactctgtgtgtgcgatttaagagtgaagtagtagcatgcggagttgtgtatgctgcagctaggagacaccgggttccccttcctgaagatcctccgtggtggactgtctttgatgctgatgaagcaggaattcaggaagtttgcagggttcttgctcacctctacagcttgcccaaggcccaatacattccagtatataaagacaacgattcctttactgttaagagaatctctgatctacaggcttcaaaggaaagtccagcaagggctgttgctagcgataagggtacccctgtaccctcaagttctagccaggagaaggatccagtggctaagactatactgaacaaggtgaaggaaaaaagtgatgacgaaggtaaaccattgcccgctgaatttgatggaaaagaaaacccggtggcaaactcaaaaaatgacaagtctgattctggtgtcgaccggagtcgagaaagagagagatcaagagggcgggaacgtgatgccaggggtagggattctgatcgtgatagcaggggtcgcgagtctgatcgtgagagggaccggagacgctgctctagggaaagaagttcagatgactcattggtcattgcaatttgaacgcaggacactcagacaaggagaaatcaaggcgccattcatcacgcgaccgggctgactactacaattcgcattcatctcgtgagaaagatcggcataggcaccattgatcaaggtgacgaggatccccggtctgcagggcttcgctgcatggagaccaccacttggcagtgccgaccggatcatgaaaacttgtggattatcatcccactggtggttgtattggcttgattgtgttttgcaccttggattgtaacttgcaagatacgctagccatgagctgtgtgcaacttgaatttataaacacaacatataagatacaattgacgcacgtgcactaactgccattccagcagagcttgtggaatgttataaagaaacagtttgtggaaaaaaaaaaaaaaaaaaa

SEQ ID NO: 60082 - DNA, 758 bp, Zea mays
  Clone ID: MRT4577_154797C.1
cctcgaggccggccgagagcagaataacgtgctctatgtccatctcgatcgtcgctcaacggagaattactctacgacgaagatgaggtgcgtcaccgcccgcgccccggtcgcggccctgcgcccgtctgcgtctctcaagtacgacgaccccgacgtggagcttacttggacactctagccgcctcgcgcgcactgctaccgggtcgccgacaagaagcacgctaaaggcggaggccaaggccgagtggatcccggggcttccctcccccgcctacctcgacggcagcctgtgcaagtgacaatgccttcaatgcggtgcgcctggagcaagacccgtagataactagaatgatacatgtaggtggagctggtgaacgaacgatagataagatgctgcgagtgtgcgtgatgatgatcccatagggggtgagcaagggcgagatgatcagcgcgccgcagtgcacgacgcctctcagtctgagtagttcgcgtcagcctctacgctgatggagatcgagttattctgtgtcctacgtgcagattgggtgtggtgaggacatatatgaaccgcggccagcgatgaccaggaccgcatctataatagatacgactgccgccgttattagtgcggtacccccggaagagtgttccacccgctcaacttcttgtccactctagagaccaaggatagcgagctcgcaacgacaggctgatcatgctgtcctgcctgaacttcctgatccatcacaacgtca

SEQ ID NO: 60083 - DNA, 863 bp, Zea mays
  unsure (1)..(863): unsure at all n locations
  Clone ID: MRT4577_154798C.1
caggaattcaggaagcttgcagtgttcttgctcacctntacagctgcnnncaaggctcaatacatccangtgtataaagaatatgattcctttactgttaagagaatctctgatccacaggctttaaaggaaagtccagcaagggctgttgctagcgataagggtacccctataccctcaagttctaaccaggagaaggattcagtggctaagactataccgaatagggtgaaggaaaaaagtgatgacgaaggtagacacttgcccgctgaatttgatggaaaagaaaacctggtggtgaactcaaaaattgagaagtctgattctggtgttgactggagtcgagaaagagaaagagaaagagagagatcaagagggcgggaacgtgatgctaggggtagggattctgatcatgatagcaggggtcgtgactctgatcgcgagagggatcggagacgtcgctctagggatagaagttcaggacactcagacaaggagaaatcaaggcgccatccatcacacgaccgagttgactactacagttcgcattcatctcgtgaaaaagatcggcatagacaccattgatcaaggtgaggaggatcccgggtttgcagggctttgctgcatggagaccaccacatggcagtgccgacagaatcatgaaaacttgtagattgtcatctcattggcggttgcatttgcttcattgtgttttgcaccttggattgtaacttgcagagcaacatgaatttgtagaaccttcatctccactagttcccaaaattctcgagaattaatttagggtgttactaataaaaaatcatcctctaaccattttaaaaaaaaaaaaaaaaaaaaaaana

SEQ ID NO: 60084 - DNA, 162 bp, Zea mays
  Clone ID: MRT4577_154799C.1
attcggctcgagctcatctgcggtgctttttcgctttcaatgtgtagctgtatcacgcgggcaggataaagctatacggccactaacaagcaatggacctatgattcaacccctcctacgattggtcttgtgatacaatcattgatgaacgggacggatcaa

SEQ ID NO: 60085 - DNA, 2742 bp, Zea mays
  Clone ID: MRT4577_15479C.1
tcaccgcctgtactcagtactcgcactaggaagatcagcagccccgccaccctccacatgcgacgaagactccgccgcggccacatctaacgcagcaaaataatccaagccttcatccgaggactcctccgtccaggaaaacaaactcccagactcaccatcagactcaaaacactcagatccagagccaaataaattatcatcggcaggcacaacggttgaggccgccacaaaatcagtattgccaacagcgtttgcttgcgtaggcccaaacgttggaaccaccttcgaagcgtcctcacccgtcagcgcagtggctggcacggggtctttgccagctccagtcggcgcgggggtcgccgaagggccctcgccagcattggatggcggcgccagctccaccaccgatgcctcgggcagcgtgctgtccagatcaccgaggtcttcgacctcttcatcatgcgccatctgatccattgcccggtcggacctctcccggacagtctctcggccgtgagggccccacatcctatcaaaaagcgccccagtcgaccgcttcagcatcgggtcctcgacctggaagattccgcgctcgaagccttcgtcggactggtcgaagacctcgaagtgcctgcatccctcgtgggacaaggcattcatggccccctcgcaggtgatgagggaggcgaaggacatgaggcccgtcataatggttgcgagcacctccagctcctcctgtagccacccaaggaagcggaggcccacctcctgaccgggtgcttcgaagggagcagtccgtgcacctagctcccggtacgcgtccacaagctgcgtatgtgtccgctcgacctccgcgcgcgtcgaggcctcaattttatccaggcggtcgcgcaggccgccgagcctcgtctccatctcctcggcacgttggcgggcgagactagcctccgcccgcgcaagcttggcctcagcttgtgcagcctgtgcctcagcacaagctctgtttgcgtccctcctctcctccgccaactgacgcctgagatcctccttctcggcctctgtagccgccaacctctttttcgccagcctgcggatcttgttctccgcagctgacttgtcccgaacagcatccgtatgctgtgctcggaggtgctcgatcctgccatgcttcaactgttgcgatgcatgcctcagttgctgggacacagagcccgccacgtctttggcggcggcggccgacgaaatctcgccgctggcgcagaatttggaccatgggtcctgcgaagtacccttctctccaaccgccgctgtaggaaaagtggccgccaccagagccgggacaacagccagctgccccgcatccgatccaacgaggtaatcctccacgcagatatccgtgtcgaagtcggcaccacccgccgccgcttcgtcggtgtgcaccggcgacggcggccttcgctccttcgtgggcttagccgagggcggcttgcccgcaccagaagcggtagcccttgaacccgtcgaagacttcccgggcccggggacggctggcttcgctgccggcggtggtttgctgctaccaggggcggttgacttcgcgcctccccgcgcccgcttcatctcgtgactagggtccccgaccctagtgaacgcccggcgcttctgtgctacatcttgacgatccttgtccatcacttcagcattcgcgccgaagactcctggagctcgggcgaagacatccttcccccgagggccgcacaagtccccatcaactatttttctcttcttagtggccggggcagcctcccgtgaagggccttcctcagccacggccactggttttttcctgcggcggtcaacagctgcagcagcatcgtctccagggtaaccaccgtatggaaaacggtttaactcgaagacccgattcaagcgaacattggatccacgaatatcccaactccgcagactctctgtcctcggcgcataccgccctacaatcctcacagccccatcctccacttcacgaatgaacgcggctgggtcagagggccccttgtcctcatcatcctccgccacctcaaatggtgggaatgccacataacaatgggagcacattacggtcgcagggagccctgggaggtctttgacttcgcttcccgaaacataaaaccaataatcccaccagttgccccacttgttgcgagcacagggaactaattctacgacctccgccgaagtctttccggtcctcggcatgaaggtgcacgatccaaactgtgcaatcttacttccaatttttctcttttgccagtgcagacagtaattcttggcaaagacctctatggaaggctgaccgtcgtacgaagtaaccgcccagacatacttcgccagagccaccacgacgttaggtgtcaactggtggacctggacctcaaacctctgcaggacctccaccacgaaacgatgtgcaggtaggcgaaggccggcgatgaagaacgcctcaaacacgactaactcgccctcaggctcgggaatctcttccgcccctgggacacgcccaacaccatccccaaaataccccaactgctgcatatcctccatgcaaatcgaggaaatcctcgaaacgccgaactccaccgtgtggcccggctgtaactccaccgccgccaaatcgctcaaggtatcttcggacaacgaatcggccggcggcgcatttgcagcagatgaggaagaagacgacat

SEQ ID NO: 60086 - DNA, 1407 bp, Zea mays
  Clone ID: MRT4577_1547C.1
gtataccaacatagttcgtttaagtctgattccattcaaagggccgctttgtttttttttttttgttatacgtattcatgtaaactttatttgaaataaaacatgctcgtaaaaaaatggtctaacacgcgcgcaatgcactagtctgttactattagtgctgctatttcgctttgcattgatagttcctgcttcacctcatgccctcgcaatggcaaccagctgcttgcctacatttttccccgagaacaacccgattagagccgccggcgcgctctcgatcccctcagccacatcctccacgaccaccaccttcccctccttgatgtacctggccatctcctcctcaaaccttgcgtacaggtggaaccagtcaagggcggtgaacccctccaccctgatggcgtttgagatgatgtagaacagattgcgtaggccatggccgtcccgttcctccaggttatactgggagatcatcccgcaggcggcgaccctgccgccatggcgcatgtgcagtagcgcggcgtcgagcgtcgcgccacccacgttgtcgaagtagatatcgattccatcggggaggcagcgcttcagcgcggcgccgaggtcgctctccgacttgtagttgaaggcatcgtcgaagccgaacttggtcttgaggaggctgaccttctcgtcggagccggcgctgccgaccacgtagcaaccggcgatctttgctagctgcccgacgatctggccgacggcgcccgacgccgccgagacgtacacgaagtcgcctttcttgggcctggcgacatgggtgaacccaccgtacgcagtgagccctggcatgccaagaactcccgtgtagtaggagagcggcagctcggtgtgtttgatcttgtgcagcgattccggctgggtgacgagggtgtactcctcccacccactcagcccccagacaagatcaccggcggtgaactcagggtgcgtcgagccgaccaccttgcccacaccgaaattcaccatggcctctccgatgacaaagtccgaggctggcacggtggcgccgtcttcatgcttgctcatgcgaccgcgcatccaggggtcgcaggacaggtagaggttcttgatcagcacggccgtcagccccgctggcacacccagctcgatagtgtccaccgtgatctccatgtcttcttccgtggggaacccggtgacgtgcctccttagcaccaccttcttgttcttctccaccaccatcgccgccttacgtccggccatttcctcaaccaatgaacagagatggctggcttctgtactggaactacgcttagcttgcagatcgtctggtatgctactgcatgccgatccgggccagcactaccactaccggccggcagccccggccggcctcgaggtacccaa

SEQ ID NO: 60087 - DNA, 449 bp, Zea mays
  unsure (1)..(449): unsure at all n locations
  Clone ID: MRT4577_154800C.1
gggcgcttccaacccttacaggnatnccaacaggncaatcaaaggcatgaggtggtacctttatcacccttgtgtccaccaacaaacacgaggcctattgagacagttgcctgtggtgcattacattgacgcaaaacaagaggtacaacaactacaacaacttgtgctagcgaaccttattaactactctcagcaacaggagcttcttgcattcaaccagcgaggttcattagactctgcttcttatttgcaacaacaacaactaccattcagacagctacctgctgactacccccagaaattagtatgattcaaccaactagcactgttgaactctcctacttatttgcagaaccaacaactacttccatagggccagctagctggtgtgagccctgctacctttttggcacaaccacagataaagccgttgtaccaaaaggagaggg

SEQ ID NO: 60088 - DNA, 353 bp, Zea mays
  unsure (1)..(353): unsure at all n locations
  Clone ID: MRT4577_154801C.1
gctttcccaaaagtagattgattacgaaatgcatgccgagtgtcctggaacgtgtctgtttcaaatgcaaaatgtcgattctctcgccgaaaccagataactagctagattggaaaaaaaaaagcccagtgattagtgaggtctctgagctgcgtcaccagacaattacccttcgcttccttccgatctgcgtcgagaattccggaagcatccgggtctctagaatgttcgggtcattgcagtgcagctgtatactctattattgttttcaccgacacgacgacctactgaaagttcacaaccacacaggcagtctctgacctactgaatgttcangtcatcagtcatctgca

SEQ ID NO: 60089 - DNA, 447 bp, Zea mays
  Clone ID: MRT4577_154802C.1
gtcatgcgtgcgtggaggcggagctcctcctactatagcgtgccagcgtggggcagctgcctcaactatcgccggagcagagaacccacgggccactgccccaccccacccctctcttttccccagccaccggtggctgcggcggcagcctaggcggcgttgtcgagctgccgacagaggagggaggactggaccagaaaggtgaaggctgtgccgtgtgtcgatcaataggcccaaatcccaatacaaggaatgcaataagagacatggttgtccgtggtgctccagcaatagccatagcagcggcactagcattagccgttgaagtttctgatttagattttattggtacgcctgaagaagcagcttcttttgtttcaaagaaattggaataccttgtatccagccgaccaactgcagtgaacctatctgatgctgcaacaaagc

SEQ ID NO: 60090 - DNA, 290 bp, Zea mays
  Clone ID: MRT4577_154803C.1
atgtcatagacgtagttttcgcatccttgaattaaactgccttaactccttttgtggtataagcaaaactacatggactctgtcctggtatccttttcctgtgtggttgccccgtgtcctctggcctagggttaagtgtgcaagataactactcgtgagtattcagaatgttgttcctaataaatgcacttgttgtctgtcttctttaatccaatcacatcttatatacagcagtcagagatgagtatactagaatcatggattgctggaggtcttttaatctgatgttc

SEQ ID NO: 60091 - DNA, 626 bp, Zea mays
  Clone ID: MRT4577_154804C.1
aattcggcacgaggcgccgccgccgccgccgctgcccaaaaccctacctaccctcttcttcccctcactctcctttcatctccattctaatggcggcggctgctgctcagaaagccgagacgaagaagtccgccgtggcgcctgctgggaaggctgcccagcctgcggcgaccaccgaggtcccgaccaagcccgctcctccctcgcagacggttcgggatgcacgcggcggtggctcatcagctcgtggaggctttggccgtggtgaacgtggccgtggcagaggtggacggggatatggccagaaccgtggcttcagtggtgacaatggcaatgacttccagggaggttatggtggcggaggctatggggatggtgctgtaactggtggatctgaaggagaaagggagagagacactcgtcccccgtaccgtggcggaggcagacgtggtggttacaggaatgttgagtttgctgatgactctgagaggccaccacggagaaactatgagcgccacagcgggactggccatggctatgagatgaagcgtgatggcgcagggcgagggaactggggcactgccactgatgaacttattgcccaggatgcagaggactctccgaag

SEQ ID NO: 60092 - DNA, 284 bp, Zea mays
  Clone ID: MRT4577_154805C.1
agctcgagccgttttcgggtcgggtagtttgggcttttgacaattcgggttttcagaaacaatgcccgaatatgtacccaatttaagcaaaacccgaaaattcgggtacccaaaaaattcgggttcgggttcgggtagcccgttctactcgatttcgttgcagatcaatgtgacatcaaatatttgcacatgtatttttaaaataataccaggaatcaaacaacattatagcgttctggctacagcagtacgacaccacagcgtgctggcacattggattattg

SEQ ID NO: 60093 - DNA, 573 bp, Zea mays
  unsure (1)..(573): unsure at all n locations
  Clone ID: MRT4577_154806C.1
attgcggcacgaggttccatctcctagccgccgccgccgccgccgccgccgctgcccaaaaccctacctaccctcttctccccctcactctcctttcatctccattctaatggcggcccaacccgtccggcgaagctgctagtgcttgtatctactatcttcatcagctgattgcggcggcggcggctgctgctcataaagccgaggcgaagaagtccgccgtggcgcctgctgggaaggctgcccagcctgcggcgaccaccaagttcccgaccaagcccgctcctccctcgcagacggttcgggatgcacgcggcggtggctcatcagctcgtggaggctttggccgtggtgaacgtggccgtggcagaggtggacggngatatggccagaaccgtggcttcagtggtgacaatggcagtgacttccagggaggttatggtggcggaggctatggngatggtgctgtaactggtggatctgaaggagaaagggagagagacactcgtnccccgtaccgtggcggangcagacgtggtggttacaggaaatgtgagtttgctgatgactctg

SEQ ID NO: 60094 - DNA, 323 bp, Zea mays
  Clone ID: MRT4577_154807C.1
ttcggtcccttccatctcctagccgccggcggcgccgtcgccgccgctgcccggaaccctacctaccctcttctccccctcactctcctttcatctccattctaatggcggcccaacccgtccggcgaagctgctagtgcttgtatctactatcttcatcaggtacttcgcgatcctactgaagtattccccgccgccgctgccatggccaccctcaaccctttcgaactcctcggcggcggctgctgctcagaaagccgaggcgaataagtccgccgtggcgcctgctgggaaggctgcccagcctgcggcgaccaccaagt

SEQ ID NO: 60095 - DNA, 774 bp, Zea mays
  Clone ID: MRT4577_154808C.1
actgtgccgtggctttagcgtcaacgccgacgccccccttcccacacacagccccctccgcccgccgccgccaccgccgccgtcgccgtcccacctcgtcgcctccgccccgttcgcaacccccgacatctgctcctgaggtgaactgagcacccaacttttgtcaagatgtctgatagtcatgaaaccgacaagaatattgagatgtggaagatcaagaagctgatcaagggactcgagtctgctagaggcaatggcacaagcatgatctctctgattatgcctccacgtgatcaagtctcgcgtgtgaccaagatgttgggtgatgaatatggtactgcttcaaacataaagagtagagtcaatcgtcaatctgttttgggagccatcacctcagctcagcagaggctgaagctgtataacagggttcccccaaatggactagttctctacactggaacaattgttactgacgatggcaaggaaaagaaggtcacaattgattttgagccattcaagcccatcaatgcgtccttgtacctttgtgacaacaaattccacactgaagccttgagtgagctcttggaatccgatgacaagtttggcttcatcattatggatggtaatggaactctttttggcacacttagtggcaatactcgtgaagtgcttcaccaattcagtgtgaatctccccagaagcatggaagagaaggcaatctgctctgcgttttgctcgccttcggatggagaagcgccacaattatgttccgaa

SEQ ID NO: 60096 - DNA, 388 bp, Zea mays
  Clone ID: MRT4577_154809C.1
ggcccagcaaagttcataaactgggtgggcttccctggggggggggggcagaagatattaggggttacaacgaggggtctttttgggtggtgtgggctacttgtcggggcttgcagcttggttaaataaataaataaaacaaagggaagcccgccaccattaaattcacaccccgggggggaaaaagaacaaaaaacttcctttgggaaggggagggaaagttacactgtgttggactggtggatgggcttcatgtcgagtcccttaaagttcacaaaaaaatccacatgccccttgagtgggtgaaggttccgcagcctttcaatcttgggcctcctttttgcctttttagccatttgggttaacttattgtacccaaccttttttg

SEQ ID NO: 60097 - DNA, 485 bp, Zea mays
  Clone ID: MRT4577_15480C.1
gaaacaaagaattacttcagacatcccggaacattggagagaagataagggggggccataataaaaatttcttaggagttccaggaagctcaacctagaaggccggggtcttatcctaggccttggcggggacccaaacatgaaatagggacttggtcggatggacaaggcccgccctagtattacatcccagaacatctcgtggctgcaccgaacagattcttggggccccaccaattggggcctcagggggccggtctatcgaaaacccatggcttgggatggacatggtgggaacaccaggaaccctgcttatcctccttttcaaatcgctatcacaaggggcaactatgggggattggggcggagggaccctctccacaaggcaggcataagcatagggtcccttgggggggcatgctaaacttgggaacccaggggccctggcaattctcaagggcacacgatacttttgccccagcttt

SEQ ID NO: 60098 - DNA, 299 bp, Zea mays
  Clone ID: MRT4577_154810C.1
gggaaccattatggtttcattatttataaaaaaccaaatgttttttttttgtacaaaaaaatttttagggaagattttaagggggttttgggcaaactgttaactggcacaaacgggggggggttgagcacattggaaatagaaaattttattggggggtcctaggagtgggggagggtaaaaaaaaagaggttgaaacggggggaggacattttgaggggacacctttaacgggtttggaggggttggtttccacctggggggaggatttttttgacgtatttttttttagccgggaa

SEQ ID NO: 60099 - DNA, 1595 bp, Zea mays
  Clone ID: MRT4577_154811C.1
actagacatgtcatagacggagtggtaggggagggtacgcgcgagggtgaggtcgccggttcgaatactagcaaccgcgtagtgcgcgaaaaatgccgcgacttgcgacttgcgggtggggtgggcctaataaaaataaatttttctaccctcgaggccggccgtgagatccagatccagatccagcaaccagcatgggccgtggcgtggcgtgcttgcagctgcagtcctgcacgtcttgccgctttgattgccttctccttcccgcaactactcatcctttccatcaaaactgaggaaacccctcatcctattctcgcgcccggcgtctcccttctccaacctccgtttctaatccgcgctgctaatcccactcccagtcccagctcgtccgctgagatggacagtagcagcctcaaatccgcgcagctcctggagctgatgcgccagcacctggccaccgatgccggcaaggaggtcaccaagaaggtcggcctcgtctaccagctcaacatcgcccccaagaagatcggcgttgatgaggagatcttcgtggtcgacctcaagaagggcgaggtcaccaaagggccgtaccagggaaagccggatgccactttctccttcacggacaacgatttccttggaatcgccaccggcaagacgaatccgcagattgcattcatccgaggggcgattaaaatcaaggggagcatcagtgcggcgcagaagttcacccctgacatcttccccaagcctgccaagctgtagaaggttagattgtattacttggtcgaggtgaataataatgtttgcaagcttcaattactatgtacgagatacaatgagtggaacatgaaaagcacgttctcggtgggaatttggatatggttgaacttccacggacaacgatttccttggaatcgccaccggcaagacgaatccacagattgcattcatccgaggggcgattaaaatcaaggggagcatcagtgcggcgcagaagttcacccctgacatcttccccaagcctgccaagctgtagaaggttagattgtattacttggtcgaggtgaataataatgtttgcaagcttcaattactatgtacgagatacaatgagtggaacatgaaaagcacgttctccgtgggaatttggatatggttgaacttccacgtaaatcaagctcaatgttcgtttctcgtaaaaaaaaaaaaaaaaaaaaaaaaaaaaaaaaaaaaaaaaaaaaaaaaaaaaaaaaaaaaaaaaaaaaaaaaaaaaccaaaaaaaaaaaaaaaaaggaaaaaaaaaaaaaaaaaaaaaaaaaaggtttgtccctccccgggcggccgttaaaaagggcaaattttgcaaatttccaaaaaactgggggccgttcaaccttgcttttaaagggcccatttccccttatagggagtcgtttaaaaattaactggccgtgttttaaaaacgtgggaattggaaaaaccctggggtacccaaattaaatcgctttgaaaaaaatccccttttcccaagttggggaaaaaccaaaaaggcccgaaccaatcgcctttccaaaaatttgccaacccta

SEQ ID NO: 60100 - DNA, 263 bp, Zea mays
  Clone ID: MRT4577_154812C.1
tacctccctctttctatctccccctttccaacatgacctcctgctagctcccgtcagaacgcctcccagatcccagactcatctctctaccccactcgaacgaaagccggcgctcgacatgggagggtgccacgcgaaaccgctcacgcaggacgcggactgctcgccgtcacacgctgcgccttcgaccccgcccccgggcaacgctacccccggccccgggaaaaatcacttttcggtgtccccgttcttcgcgttctcca

SEQ ID NO: 60101 - DNA, 527 bp, Zea mays
  Clone ID: MRT4577_154813C.1
cctcgaagccggccgggccgggactctacacgacttgccgtgttggtcctttacttcgagaactaacggtgcttgtggttctgtccgtcgggaagactctacggattctctaaggcgtagcgacatggttgatcaccagatgttcttacttgttcatggacacttcgaagggatcggagaaccatgtacgacgccagcgaagtgaacctgtacctcggatccagtccacggagagatgatcgctcttcgacgatccgagtagtactaattacttgcatctatcttcgaggtctagcggcgcatggcgcgtctccaccacaggggtcaaataattccagagcgacgcgtccgttattgtgttactgataatacaccttgctgatccagataatgaagatatgggccttattggtcagtccttatttcttgagacagtgtccacaatgtctttgatggacttgagatagaggtaagttagagatttgctgagtactgagaatagaacactgcgagctgttaactatcta

SEQ ID NO: 60102 - DNA, 430 bp, Zea mays
  Clone ID: MRT4577_154814C.1
accgcgaggagaagctgtcccacgggctactgctctggacgagtcggcgcgcagccgcgcgctcccgtacctcacccgcgaccaccggagaggcgttctacaacctcgtctgcgccggctacgccaacccggagcacttcgacttccgccacttagacacgctagactatgcacgtcgacgacctcgtcgagatcctcggagctgtcgacatcgctcgctaggcctccgtagtgaaatccgtgtccggcatgaggagcatcctcgtgtccataagacacctcgagctcctggcctagatgggactcatagtggcgccctgcagggtcgtgtacaaccacaactgctgagcagggtcagagaggacggagacccaacatgagccccacgagatgactggacatatactcgatgttggtgcgactgagaact

SEQ ID NO: 60103 - DNA, 252 bp, Zea mays
  unsure (1)..(252): unsure at all n locations
  Clone ID: MRT4577_154815C.1
agatcgggagcggccggccttttttttgtttttttttgggngaacggacaaggataccgaatcattaattcaattacatgagcgacttggcccttacgtacctttttttaaaacataggttcctacctatatatatctatatctatatatttcctccaaaccggattttacggaaggaaaggaaggggaaaatttggtgggaacccattatttcaaggaccaggaccaatttgccaggaggagaagaatttt

SEQ ID NO: 60104 - DNA, 698 bp, Zea mays
  Clone ID: MRT4577_154816C.1
ttgggtacctcgaggccggccgggatttttattctcagcctgccgaagccaagggcctgtttcaccgacctacctaagacttcaagacaaacatgagagagattgttcacatccagaccggtcagtgtggtaaccagatcggagccaagttctgggaggtcatctctgacgagcacggcatcgaccccaccggtacctaccacggagactctcccctccagcttgagagaatcaacgtctacttcaatgaggccaccggaggcaagtacgttccccgtgctgtcctcgtcgatctcgagcccggaaccatggactctgttcgtgccggtcccttcggtcagctcttcagacctgacaactttgtctttggacagactggagccggtaacaactgggccaagggtcactacactgagggagctgagctcatcgactctgtcctcgatgtcgtccgcaaggaggccgagtcttccgactgcctgcaaggtttccagatcacacactctcttggaggaggtaccggttctggtatgggaacccttctcatctccaagatccgtgaggagtaccccgacagaatgatgtgcaccttctccgtcgtcccctcccccaaggtgtccgacactgttgtcgagccctacaacgccaccctctccgtccaccagctggtcgagaacgctgacgaagtcttctgcatc

SEQ ID NO: 60105 - DNA, 668 bp, Zea mays
  Clone ID: MRT4577_154817C.1
gatggctgatcagtcttctggtcagatgtttggggtgcgggagagatacgcacccaaactgacttcttcttctttggaggagcagcactcccagctctgcactgcggggggggggaccttatgagaagatagcctcttgaacaccgagaggcgtttgccgggctcttctaaacgatgccaaactgacctcttgcccaccgggtatgacctgtcaaattccagacggtcacgcaagcgacctggggtcttcagctgcagagggccggcctgaatggcagggcaccgagaggcttgatgtccgagcttgaaacacctaaaacagcgaggggggcaccgacacgaagccacgagatggtttggagagagacagttgaagcatctcccgcggaggttcacactggtccctctccgcgccgaagcacaacgagactgctttctgctcttcaccacctgccagccatcctccttgtcgaccggcaccaggtcttcacgccggcacagcctcctctccttgtcacagagcttcggccttgctatggtagaagtgcgtacttccaactccagggaggtggcgctagaagaggaaaggagggcctctttataggagtgcaccgtaccaccagaggaggaacccgaagcgttgtcatcccatcgctggaacttggacc

SEQ ID NO: 60106 - DNA, 383 bp, Zea mays
  unsure (1)..(383): unsure at all n locations
  Clone ID: MRT4577_154818C.1
tcgggtcaggggcatggaaaacaaatcggagggtgccacccaaggtcccgtttttaccaaccaacccctcccccataacccaaaataatggcacccctgccccaaaaaagggggaaccttggtaaaaggccgggagcaaacccttttttttaccgggggccgaataaggaccaaaccanaaaaaacccccctgggaccagggcaagaagataaaatcttcccttttcaagggcttcacccaaccaagaaccagcaactttcggttccaccggatggtccaggatatttccaaagagaattcacggttacccaccccccggcaagtctggaggccaataccaaaacttggtccggccgcccggattgagaaataccattacccc

SEQ ID NO: 60107 - DNA, 517 bp, Zea mays
  unsure (1)..(517): unsure at all n locations
  Clone ID: MRT4577_154819C.1
gcactggccgttcctgcccgcgnacagcctgagctcaagcaagcgtcggaattccgctatatcggcaaggaagcgttccgggccatcgacggcgcggatatcgtcaatggccgagcgttgtacggtgccgatgtgcattttgaaggcaccgtctacgccactgtagctcgtcctcgagtgtacggcggcaaggtcaaatcctttgatgccagcgccgcgctgaaggtcccgggcgtgctcaaggtcgtggaaatcgaaagtcgtccgttgccttccgagttccagccgctgggtggtgtggcggtgattgccagcaatacctgggcggcgatcaagggccgcgatgcgctgacgatcgtctgggatgacggcgtcaatgccggttatgactcgattgcctaccgccaggaactggaagcctcggcacgccagccgggcaaggtggtgcgcgataccggcaatgtcgaggaggccctgaaacgcgccgacagccagttcgaagccggttattacctgc

SEQ ID NO: 60108 - DNA, 311 bp, Zea mays
  Clone ID: MRT4577_15481C.1
atcaactcgcaattccgtcattcatctcctactcctgagcactttctcctcgtccccgacatcctatcgaagacgagatacttccatggactccaccggtaccggagcagggggtatagtgcgtacataagggacgcggacggacagcaaggtcagagagatcaaggaagaagtcggagcccaagtactcttacgtggtcctcacggtgctcgtcgggcacatcggcggctacttgaacaatatcctctatccgttcactgtcaaccacttctccctcgactaccattccagctgtcctcgtatagctcgc

SEQ ID NO: 60109 - DNA, 781 bp, Zea mays
  unsure (1)..(781): unsure at all n locations
  Clone ID: MRT4577_154820C.1
cattgggtacctcgaggccggccggggaagatttcgtggcagtccccgcacacccgcaggttcttgtacaccctgaccggctccccgtgcccgccgccgtctacgccgttgcgcagcagccacaggccgacggcgagcctctcgctgtgcgccctcaggctctccgctcgggactcctcgtcgacgtcgtgcagagcgaagcgcgcgtcgtcggcgttgtacccaagctgctcccgcatcctcgtctccatgtccctcaggacgcggcggatgtcgccggcctgcgggtgcgtctcctcttcaccgccgccgccgtagaagaagtgcacctccttgccgacctccacccaactgcacccgccctgcttcttgagccccctgcgcctcatggcgtccctcaccttgtggcactcgcgccactcccccgcctccgcgaggacgttggacagcgtgacgtagttcaccgggttgtcgccgcatggccccagagaaggacgtcncctgcctccctgccgacggcgacgtccttgtgcaccctgcacgcgctcaggagggtctgccatacgccgacggtcggctccatcggcatcgtccggatgaggtccctcgcctccctgagctccccggcgcggccgaggaggtcgaccatgcacgcgtagtgctccgctttcggcctcaccgtccggtcccgccggatgcaggagaaataccggcggcactcgtcgactaggccggcgtggctgcacgccgacagcagcgccaggtaggtccacctcgtcgg

SEQ ID NO: 60110 - DNA, 282 bp, Zea mays
  Clone ID: MRT4577_154821C.1
gcaccagagaaaagggcaagccaaaaggcataccgcgcgacacatggcagctgctcaagccgggcaccctgatgcagcggcagatcggggcggcgccctttgctcgtgcgtccgccgtcgcgaactcgctgcaggcgttcggcgtcacccggcccgcaggatcaggctcctgcagactgcagcaggcgtgacccggaagctcgcggttgcgctgcactggcgctctcgttggcgcagcgcgaggacgccaaagctgcctacacagatcaagcaaacgtacat

SEQ ID NO: 60111 - DNA, 332 bp, Zea mays
  Clone ID: MRT4577_154822C.1
atcaataagaaagctcagtacttactatctgaggctaaatgcagcaaatgctaaccacggttgacaagaaactcaattataactaacttaaattacaaatcaaatgaggagcagctggcatcaacaaccgatcaagcggacgacgggagctgcacaggatctacaccaacggaaggtgcagctcttgggatttcccatgagaagacgaggggctcttcgaggtggactggcagagcccctcagatattcggaacaccttctccattgttaggcgccggtctggcaacttgatcgcgcacaccatggctatttgcataatgagaaccaactgc

SEQ ID NO: 60112 - DNA, 361 bp, Zea mays
  Clone ID: MRT4577_154823C.1
ctcacgcatccgttgacgcatcccggctacaccgtccaactgctgtaccaggcggacggctacatccctcgggctggcagtatcacacgcctaaccagccacaacttcagcatcctgaacctcgtacagataagctcggctcctgtatacctgtaccaggacgccatcatgtttccgctctggaacttcaacgcctacatctccatctaccacatcaagggctgtacacgggtacagctcgtcagctacaacgctaccacgtctttagacgacctgctctgacctgcgctgctactcatcgcaccttactgctacctgcaagccacctatgctcactgagcaagctcgcattacatcgcct

SEQ ID NO: 60113 - DNA, 332 bp, Zea mays
  Clone ID: MRT4577_154824C.1
gttacgcaacaatatttaggctttatttataaggcaaattaattgccggttccaaaatggcacccgaagtttctactttgtgggggtccctggcctgtaaggggcggggcacttccataaaaaaaacccccaaaggggaagggtgtttataaaaacggggggttttacatacgtggctactacgggggttcgggcggatgcccctccttatgcatgccagggtggcaaaactgggtatgaagcccctcacgtgcgtaccatggtttaggaggccttgttgaaaaaataggccggccaaaaattggccgcttgggggtccttcccgggggttt

SEQ ID NO: 60114 - DNA, 2468 bp, Zea mays
  Clone ID: MRT4577_154825C.1
tgtattcggcacgaggtgctcccgaagaagacgaagttgtgatcttccgaagcttcttcaaagctggacttcggttcccgttgagtagatttgtggttgaagttttgagtacataccagatctaccttcatcagattactcccgaagcaattattagaatggggattttcgtctgggctgtgagaagtcaaggtctggagccaagcgcaagatgtttttgcagtatgcatgagctctcgtatgagacgaaggcctggggtaaagaacaatatcacaacaatttcggctgctacagctttgttgctcgctccggcgtaagctacccagtgccaacattccggaagaggtggcccggagactggatgaaagaatggttctatgtaaagaatgatttaaaggcgagagaagacattaaagagatcatcatgcgccccatttggtcccacttcggcctccggaagccgaaggttgaaattgacgaggcagtcgaagcatgccgaagggctttcagcacaatttgctcttttgttgggacaagggacttgcttcaagagcatatagcctacagaatatggccacttgtagacagctgggaaatgccagaggaaaccatcactaaccctagcgaaggtggtttggttcgattgaaatataccttcaggtttggagaccaatttatcgaaccagacgatgactggctgaaatatgttgaaaatactagtgatgaactacttggagcatactccaagtctgaagataacgcactatctgcggccttcgggagccgaaaaaagaagaggctaaatagagtttttgatgctattggattcatgtaccctgactaccgctactcgtcgcgggggcagaagagaaagaatacaacttctggaaacgtcgctgcttcgactgctccaagcaagcctgcgccgaagaggaaaaagttgaaggtccttacccaccgaccgcgctacattgaaccggccatagtgcctgaatttggcggtgagacctcttcggctattgaagccaaaggacctgctcttatgcagaggattgaagagccggctacaatgccgaagactgacaaaattgaagaaccgagaaccgaagtgacgaaagcattagaagttctaagcccttcggcaggagtggaggtgccgaaaacacaaaagggtctagccgcgacccccaagagaaaaaggatggctagtgtactagatgtgttggagacaataaaagcttcaagctctactccagggaaaattgccaaggcttcgaaagcgcaaattgaaatcgagacaaagctaaccgaagccgaagctacaatgagccaggtctacgccgaagctgggccttcagagcccgccaaggagaaatccttggaaactggagaaaaagcagcggaagaagaagctatagaacagattatgcctaaaaaagatgccactcctactcccgaagcgccttcggaagttcttgattatattattcgacacgcttcgggaaaaagattatctgaagaagaaatttttgaagctaaacactacgcccgagaaatgaagtacccgaaaggggccttagtgttcaatggcacagatgaagatgacttcttatattgcctcccagacaacaaagaattatctgtctgccgggagatggccagaagtatgggctttccgaagctcgaagttgtcctttgtgccatgacgaaggacgatctcgcggatagccttgcgtacaacagtctgaaggttattaagctgaggaacgaagctttggaaaaagacaaaattctgcttacattggtggacaaagtaaagagggatgaagctaacttcaaaacccaatctgaagcccaaaaaattgagattgaagaccttcgaaagcaactagccaaagctaaagagaagtgcgtagttgcagaagctaaacgaggaattagcgaacagtggacaaatcatttagagaaaaacgttgaagaacttcgcatatccaaggaaagatgctttgaaaaatctatggactgcgtgaaaaagataaaaactagcttcgccaacgttggcacatattcaagcgaggacaacttcataagaggcgatcctgagggcccaattgagtggatcagcagcgaagccgaagcttttgaggaaattttgagtgaccgtggggacgtttgtgccttctctggcgcgagaggagttgcagctattttggagaaagcagggtgcgaacatgttaaaactttggcccaagccgaagctgctttctccattgatgatacgaaggacccctcggccgaagcaagcttaataggcgaaaaaaatttcactgacatctgggaaaatggcggccgagggatggctcacgaaataataaagaaaagcgaaaaagatactcatgacactagagaagcaacaaaagcagctgaaaaggttgtggagcttgagagacgaataggtattacttaa

SEQ ID NO: 60115 - DNA, 395 bp, Zea mays
  unsure (1)..(395): unsure at all n locations
  Clone ID: MRT4577_154826C.1
gactctagaaatgccgatntcatgacccacgttggtatcgccactcggcaggaccaaagagggggtttcataaggcacaccgggtacgacccacgacacctagaccataaagggctcgaagggcgaccactaaggccagagggggacggtcagttaagcaaactctccaaggccaggtgctgagaccagcacttgccggaagcgaacggacaagcccataccagagcttaaagaattagagtcacccgtgaaggccgagccatcagtctgggggtggtagagcaaaacttccgatcagcatactacccaaagactaacccaattgctacaagaatcaaccaaaccagtgggctccccaggcagagacaaacatccggaggaacccgtgcaaacac

SEQ ID NO: 60116 - DNA, 462 bp, Zea mays
  Clone ID: MRT4577_154827C.1
caccaaagggttgccaggacccccaaaaacattgaaccggccccctttcacgggggccaaaaaaaaacccccccaaaagtccccaccaaccccaaaaaaagtttaaggggaccccccccaccaactgacaaaaactttcgggaaaaactgggccacccaaaaactgcagcacacttaaaaatgaaaaaaaaccgtttaacccacccccttaatcttggggccagggcccccctttccggaaggggcttccttttccattcccccaggcccccccattttttaaccccccccctggaacaatttggcaaaaaaggggttgaaaaagctttccaactccttaattttggcccaaaacccgccccccttgggaagctggttggcgcccaaccaacttatggccccgtcaaaggcgcccccaatcttctttttggaattggccggaaatttgaacccaatcttttt

SEQ ID NO: 60117 - DNA, 635 bp, Zea mays
  unsure (1)..(635): unsure at all n locations
  Clone ID: MRT4577_154828C.1
ccccgcgtccgccccgcgtcagcccacgcgtccgcccacatacaaaagtctcgaatagaaagaagaaaggttcaagtacacttgtttagtgatgtcgatcgtataatataatattaatatatatatggctgccctttttcctatctctctaaagcgataagaacagtacaggaggagatagctacatttgggtcgttagaagggtccaagtccccaatagctaaccctaaccccacatgcatctttttggcttttgagttctgcgtttggtccatgacgcgcccaggtataccaaccgacggtcataaaagcgctaccagtgcccatccacggcagttcacaatttttaggacagcatgtataattttgagacggtagaacggttttctaagtttaagtgacaatatagtctctaatcataaatacagttagaagacaatatatatgcataaagaatcatgtatatatagagaaccttttcgtgaagatgtccgtctcttatattttttcagttaataatcttctagaaacccctcaataggcctcctattaaatatggttgtacacgtctntataacgtcaatagttttatatatacgcagtagatagatacagtatgtggaaaataaaaagcg

SEQ ID NO: 60118 - DNA, 869 bp, Zea mays
  Clone ID: MRT4577_154829C.1
tgttgcgacgagctgcggtcatttgaggccacaggcgtctaccgcctcaatggcacctgcaccagcgccggagccacttacctcgacccggtccgcctcctcaacgcgtcctaccagcgcttccgcatcgtcccttctgcgtactactcccgaagcttcggcccccagcatcaggaaggcgagccagagatcgagcggcccgagaaaaggaggaaacgcaagcgtaatcagaagccgaagcccagggagctcaatccaatggaacggatcgctgaagcccggcaccaggtgatgcgttacactgctttattggcttaaggtgaacctgattgactaattggtgatttagacttgttccatcacaggccctatgagtgcctcctccttggctacataaatgttaatgcaaatgctaagaaagggtcaaatttcaagttgttagaaagaagccaagtaatcatgagtgtccctggtgctcactcaaggaaacctccccttgagaaattactttcagaatatattccaggtcctaaaccttcaagatgcatcgagcttttcgccagagagttgtttcccagatggacctcttggggaaatgagccgcttcatttccaggataccatgtacttctcggagaaatagttcgatagccaagagcaggatataagtatgtggattctgatgcaactgccacgtgccacctaaggcaagtggttttgcaatagcattgtaccttgtgtttttcggtaagtagttatttcccccacctattatccagtcacttcatgactgctgtataaattgttgtatgtagcttctcttgtcgactcttattgacttgtaacatcaggacaggccttcttcaggtg

SEQ ID NO: 60119 - DNA, 521 bp, Zea mays
  Clone ID: MRT4577_15482C.1
atatgaaagagcattcatcaaaacatatggctgcgcccgccgctcgacctctggtgaccgtccagaccctcgatggcgacatggcgacggactccgccgtcacggtggctcttccggacgtgatgaagtcatcgatcaggccagatatcgtcaacttcgttcacactaacatttcgaagaacaaacgccagccctacgccgtgtccaagaaggccggccaccagacttcggcggagtcatggggaactggacgtgctgtgtcccgtatccctcgtgtccccggcggcggtacccaccgcgccggccagggagccttcggaaacatgtgtcgtggcgggcggatgttcgctcccaccaagatctggcgccgttggcaccggagggtcaatgtgaaccagaagaggtacgccggtgtctccgcaatcgcggccactgccatcccttccctggtcatggctcgcggtcacaagatcgaaaccgagcctgagcttactctcgggatcggtgactgcgtcgggagc

SEQ ID NO: 60120 - DNA, 1864 bp, Zea mays
  Clone ID: MRT4577_154830C.1
tcgccttgccgctgccgccgcagatggaagtctgcgacgaactgcggtcgtttgaagccacaggcgtctaccgcctcgatggcacctgcagcggcgccggagccacttacctcgacccggtccgcctcctcaacgcgtcctaccagcgtttccgcatcgtcccttctgcgtactactcccgaagcttcggcccccagcatcaggaaggcgagccagagatcgagcggcccgagaaaaggaggaaacgcaagcgtaatcagaagccgaagcccagggagctcaatccaatggagcggatcgctgaagcccggcaccaggaagcgaagcctttactattgaacgcacatgaatcactcgttaaggctaaacatctactggagtacatttccaagacaatcaaaggcaatgaacacacacttgatgcgggtagtggttctgagaataatttcgttgagcttgggacctcatggcgggcacctttctatgagatcactctttgcttccagaaaccccatgtcctgggcaatgaggaaggtttctttcatgcccaaaagacatcatttcctctatttaatagcataatcagtgttgaagggactgacgaagctgaaggagaattccgtaataggcgttatattttaccaagaggaagttgcttcttgatggctgacttcaaacgagttagagatctcattccttgtagtccaaatcaagggtataatcttatagttgttgacccgccatgggagaatggatgtgttcggcagaaagaagtgtatcctacactgcccaacaaaaaattcttgtatcttccagtgcaacaacttgcccatccaaccggagcgcttcttgttttgtggattacaaatagggagaaactgcgggcatttgttgagaaaaaactgcttccttcttggggagtggaagattccaccgtgttttattggcttaaggtgaaacctgatggctctctaattggtgatttagacttgttccatcacaggccctatgagtgcctcctccttggctacataaatgttaatgcaaatgctaagaaagggtcaaatttcaagttgttagaaagaagccaagtaatcatgagtgtccctggtgctcactcaaggaaacctccccttgagaaattactttcagaatatattccaggtcctaaaccttcaagatgcatcgagcttttcgccagagagttgtttcccagatggacctcttggggaaatgagccgcttcatttccaggataccatgtacttctcggagaaatagttcgatagccaagagcaggatataagtatgtggattctgatgcaactgccacctaaggcaagtggttttgcaatagcattgtaccttgtgtttttcggcctttcttcaggtgatgaaaacgccccatctccagacgagtttgccgtctgctattgctgagtgctgacctactgtgtgacctctcgcttcccagcacttgattggtatcaagtcctttttttttggccaaaagctggaggtttggcgaatcctatttatagggtgacctgtggggcagacatctcatattatttcttgcactacgcagttccctgcattgcagtgttcagtgtgcttctgggaatctcagatcaagttgtaacgggcagtcagagagatggaaagaatttgtacacagctagattcgttgggctcatctgcatcctggttactttccctagaacaattcggaacgttcctgtaaagttagaacagaggtttccatttccctgagcggctgagcagaactggttcgaagacaatggatgcaggccgtatccagtgccgattcttttgctgataccacattcttccgttatgtgtcc

SEQ ID NO: 60121 - DNA, 506 bp, Zea mays
  Clone ID: MRT4577_154831C.1
tttttttttttttttttttttttttttttttttttttttttttttttttttttttttttttttttttttttttttttttttttttttttttttttgggggaaccaggcattaaagagggggccccttttttgggaacaaatacagaacttaatccttagcagggacaaggagtaacttagtttagcgggggtacagaaacccaaatacccaggtacaaagaaaacctaagggactaaaaaaacacatggtgatacgggagcatccggggggggccaccagggggaggaaaggacttagtcctgggaaccagccgaaaccttggggctgccgccgccggcctttttggggagaaaaagggtatgggtggggggcattacaccaccggtggggaggggcaccgggcccagaaagggggaaagctttttgtcgttgcggacgggaaactggatgtggcccggaacaaagggggtttttttggtgtcacgggccgaattggcggccagct

SEQ ID NO: 60122 - DNA, 254 bp, Zea mays
  Clone ID: MRT4577_154832C.1
ggaaatctctagagccagggtctatccatgggccatcgctgtgcgccacagcttgctccatctctccgcggtggcagcgcaacagccgcccccatgagagtcgccatcctccccccccgcgagcctgccccatcccgcttagtgtcgtcccccgccgccgcgtagcgccactacccctgcctgccctgggctatggacacgaagatcccctggatggaagtggagatctcagaggcttatgatctagaactcta

SEQ ID NO: 60123 - DNA, 388 bp, Zea mays
  Clone ID: MRT4577_154833C.1
aaataatttttttattttttttttattttttggggggggctttttttgttgtttgaaaaaaaaccacctgattaaaatcaagggtgtggtgtacaagaccttggtgatggtacaaaccgctacaggtatctctgggactaaaaaaacacaaggcgacagttttttaagattgggaattgaacaaagatacaacgggagccccccccggcggtaacgcaatggtggggggccggaggaaacaatgtaatgatcaattgttgcacatatggaccgactttttcctgaacggggtgggggcccacaacggggttgtttttgactaaaaggttacctgggcttggtggtgtctctctttgagcgtgaccatcaaactttttggccgcctaat

SEQ ID NO: 60124 - DNA, 194 bp, Zea mays
  Clone ID: MRT4577_154834C.1
aaaacaaacttaatatgttaacggatctgtgtggccgtgtgggctgtattcctttgctactgattgctgcactgttgatcaccttacaaactatgtcgtctagttacttcgatgtatgaaactgcagattggctaaaatctaattgggaggataattacattttgaggcttagttactgtctaaaacacaaatt

SEQ ID NO: 60125 - DNA, 256 bp, Zea mays
  Clone ID: MRT4577_154835C.1
ataactagtagcattattcttccattcataatgggtgctttcacattcgaggacgaaatctactcccctgtggctcctgctactctttacatggccctagtttcagatgccgacaacgtcatcccaaaggctcttgagtccttcaagagtgttgaaaacgttgagggaaatggtggcccaggaaccatcaagacgatcactttcgttgaggatggagaaaccaaggttgtgctgcacaaaatagaaagcattgatg

SEQ ID NO: 60126 - DNA, 478 bp, Zea mays
  unsure (1)..(478): unsure at all n locations
  Clone ID: MRT4577_154836C.1
ggggggccaaacaaacaacgggaataaaataaatatataaaaaaaagcctctcaagggggggggcaatatagtccaccaaaacaaaaaaaaaagaaaaaaaaaaaaaaaaaaaaaatccggggggacgggggtacctccgcaccgcacgtaccaccccccaccaaaagggagggggactggactaaaaatacaccggccaaaaaaacaaggcggggccccccaccggctgaatccccgtaaccaaatcctgtcgtggtccccccccgggtgcgggggggccgtgcaagggccaccccttcgcgcgcgcgcccgtgcctaagcaaacagggccacaaggcccaacgcggcccccccttttttttttttttttttttttttttnaaaggggggaagctaaaaaattaattaaacctttgcaaaattatttaccctgggaagaaccccaaaaacaaaaagcaatagggctctaaaattttt

SEQ ID NO: 60127 - DNA, 453 bp, Zea mays
  Clone ID: MRT4577_154837C.1
gggaggggcagcacagctaaagggtaccttaaaaaaattaaggggggggcacaacaccccgggaaagcagggacgggaaaggaaaacggggcgaggtctccccacggcccaagaaaaaaaggggaggagggaccgacccaggctaccgggggtcaaaaaaaccaaggggacatcaattataggaaaagggggctttattttcacggccacccacaattaaaaatgggaaaaaaattggggggggaaaaaaaacccccacctttggtaaccaaaaaaacccccctggaggtttgccctccaaccggtcaaaaaaaaaacggagcccccccgggggaaggcagacaggaaaacccccctggtcttttcaaaatcagctaaccccttatctaaaacaccaagggaaccggtcaggtcgacccccagcaatgacatcacgaaaaccagccctcttaa

SEQ ID NO: 60128 - DNA, 1437 bp, Zea mays
  Clone ID: MRT4577_154838C.1
cattgggtcccacgcgtccgcccacgcgtccgggccgagccgaacgggcgtgcgccatgcgcatgcgaccctgacgagcaacgacaaccacagagcccaaccggaaggaggatcggtaccagctcacggcggcgccagcaccacacgccgccgccgccgccccacccccctcccgacaggcacgcttcttgcgcctcttgtgggatgctactacggataacgtacgcccaacccacgccttcggcggcggcccagttgaggctccctgggccgcgtttacgccgacgccgcgtcgctgcttccgcagcggacggcgccggcaattcaagctctccgctccattgcgacccttcgccccacgcctacctcctgggtccgggcgtcgaacccagtggctcactctcactctttgatctttcattgcaggagtacatatccaattacagagaagggaaagctgaggtcttgggtcggtccaagtgggcagtactaccgtgagctgccttgccccagctgtaggggtagaggttacactccatgcaaggagtgtggaatagatagatcaagtttggactgccctatgtgcaatggcaaggggattcaaaccttgtctacaatgtagtggagagtgtgtgatatggcaagaatctgttgatgacagccatgggagaaagttcggtcaagttctcccttgaaagtaaaagaagatgacgaagttgaccaagttagagataaatatcaacaaccccaaaagatcaaagcgtacttatgcatctacttcaccggaagttgccaagaagattagccggtctttaagaagtctaaatgctcaaacaggattgtttactaacacatgaagattatacaccaagacccagaattgcgtgctcaaagagttgctgcaatcaagagaacaaaaggaagtgatgttgcaagaaagcgtgcttttcagattcagaaggcattcttcagtgatcctgagaaccggctcaaaagaagcattgccatgagaggggtgaaattttactgcagcaaatgtgggcaaggaggaaaaagaagattttattcgcctacagtgagggtaggttcaatcagggtgcggtgcaggtggcggttgtgttaccgaaaagggcagcttagtttcacatgtgtatcactatagtccgagaaggagcacaaacaacgacctcaccactgcagccgatgcggtgaaaagggacataaccggcgcaactgccccacatgcactgatttgggtagtgatgcttcaggctatgtggttaacaaagttaatggctctaattcagctgtttatcaatgtagtatatgcttagaaaaggggcataacagacgaacatgcccgaaaagaaaggctaccttactaaaatgaaaagtgtgagtaaaattaaaagaaaggctatcttttatgcctgtgtt

SEQ ID NO: 60129 - DNA, 796 bp, Zea mays
  Clone ID: MRT4577_154839C.1
cctcggagccggccggagcgagattcaaaaaatttcgactttcgagcgcagaaacgagagggccgcagcaggcgcagtcccggcgatcccgccgccggtcgccctcatacttccgcgtcactggcttcggttctctttccaacaatcaagatgagccgtggcggtagcgcgggtgtgggccataagttctctggattacctctttggaagcgcggagccccccaaaacatcactgacaccagctgcaagtgctccacctgctggtgtaggtgctccacctgatgataaaccacctgctgtcataaggctgatggaagcaggcatattgctgttggtgataccagccaaaccaataactaccacaggctcgacggacaaaagaccgtaaacttccttacggaccgtgcttcgactaaggtccacgctgctcctggtggaggatcttccctgggatacctgtttggcgtgaactgcatgccgatcaccaagttatcaccccccactgtcgccgaatgctttttctgaatcgtgaacagatcgttggcatttgatgtgtacccaaacctcccgtatccgcgagggatccgtaagctgtggctagatttcaggggtaatcgtgtgcctgaaccctcatcataaggcgagctatgtacccaggttctcgattcgtttgcacccgtgatgttaaaggtattgattgttgcccgctggacctatctattctttgcatttttcctttgaaatgtatccttgtccaaaaaaaatgaaaaaaaagcgccctagggccctcgagtct

SEQ ID NO: 60130 - DNA, 765 bp, Zea mays
  Clone ID: MRT4577_15483C.1
cattgggtacctcgaggccggccgggatcgtgcgccttcgcttcagccgtgagcccgcaaccgacccgccgcaaaagaccaaaaccctagccgtcacagcgccgcccccgaaccataaacctccacctcgccggcggccatggcgttctccggcaggatccaggagctcgtgaggaagtatggcaaggtggccatttgcgtccacctatccgtctcctgcgcctccatcgccggcctttacgtcgccatcaacaacaacgtcgacgtcgaagccgttttccggaggttcggtatctcccccggcgttaccgtaggcggcgaggcctcacccgcccccgtttcccgcgatgaacacctgcgcgacgtccccctgccgcccatggccaacgaggtactgcaagaagagacggagcgagagcggcagccccgcaacaggacgatggagctcgtggcgtcaagtgggcggcgcgttcgcgctcgctgtcgtctgcaacaaggcactattccccgtgagggtccccatcaccatcgcgctcacgccgcccgtcgccagggccctaagccgctggaggctcgtcaagagctgatctgtgagtccgtttgccgcttcggattgccctctgctattttagtttcagagtcaaactttgatgcaaccttcaacttcaatatgctgtaggatgatgtgggcctattcataatttgtgtgaggcttcgttgagcaaaaaaaaaaaaaaaatggcggccttacaatttgctgggtat

SEQ ID NO: 60131 - DNA, 750 bp, Zea mays
  Clone ID: MRT4577_154840C.1
ggccgcttttttttttttttttttcttttttttttttttttttttttttttttttttttttttttttttttttttttttttttttaaaacccaaaacaaataacctaaatccaaaaaagaaccttacatggggggaaaggaaaaaatctaaaactattgggggtgggccctccaacaccttatttggggaaataaaacaaaaaagggcgggtttttattgggagggatttccttctgggcccctggacacttgagaggttttattgggggagcaccgaggcgtgtaaactatcacctactttattttaaaaaaaaacgggtttcaccaaaaaaagaaaggccaagttgggcattttgatcaccttccccctggccacgggaccattttccaagggaggactcccaccccacaattgaaggtaaaacaacgggtttttccatatttccaaccccttttaaaattatgcaattgataagccgggcaccagttccaacgcgcgcatttggtgataaaaaaacatgggggccaatctttgaagtaggaggccccttggcagagggagggataaccccatcccctacaaaagggggagtttttttgccatctccgggggctaaaaaatgaggaggggtccgggggaaccgaaaaagatatatcccaagcatttaaaagacatcccgggggttttaatttggccccaaaaataaggggctggtaggtgacaagttttttttttcccggccgggggg

SEQ ID NO: 60132 - DNA, 1249 bp, Zea mays
  Clone ID: MRT4577_154841C.1
ggcccacggatggtcgtgagtgtccgcacgaacccatcacacgctccgcccactcccccaggcgcacggccgcacctctccacctccggcgactaccaccaccatggcggccacctccctcgcgcgcctctcccgacgcaccaccatttccgctaccgccgcggcgccctccctccggcgcctcctctcagtcacctccacagcctctgtcgcggcaaccgccccgccgccgccgccgcccagcgcggccggcgccgcggccgtgggcgcggatcgggtgcggtgggactatcgtgggcagaggaagcttgttccgctgggacaatggatgcccaaggtggccgtggacgcttacgtcgcccccgaggccgtgctcgccggccaggtcaccgtccacgacggcgcctccgtctggagcggcgcagtcctgcggggggacctcaacaagatcacgctcggcttctgcgccaacgtacaggagcgatgcgtcctccatgccgcatggacggctcccacagggcttccagctgagacactcgtggaccggtacgtgacagtgggcgcctactgtctgttgcgctcttgcaccatcgagcctgagtgcatcattggccagcactctgtcctcatggaaggttcgctggtggagaccaactcgatcctcgaagctggctctgtattgcccccaggaaggcggattccgaccggcgagctctgggcaggaagcccggccaggttcgttcggaagctgaccaatgaggagatcatggagattccgaagctggcaactgccatcaacgatctgatgcagagccatttctcggagttcctgccttactctaacgcttatctggaggtagagaagctgaagaagtcgttctccatccccctgtaagagcctgttgccctcactcgtccagttgaatggacgaggaaataaataaaggtgcccaaatactagatgttttgcgttgaaatctaacttgtgctgggttggatctgttacgtcccaattttttttgttcattgttgttgtgagcatggggacacgtgcaggaatgtcttcgtgtctttttacccaacccaatggacactatgttctgcaaattgtgccttctgtgttgcttaccttcagttctttgtgcagtaactgaatagtacaagttttagctcggtgttattcctttccaaaaaaaaaaaaaaaaaaaaaaaaaaaaaaaaaaaaaaaaaaaaaaaaaaaactcgaggg

SEQ ID NO: 60133 - DNA, 276 bp, Zea mays
  Clone ID: MRT4577_154842C.1
gtccagctttctcgctgtgagcctccaccagcgccctaagccacacgctgaggctgtcgccgatgtctacaaccgcgacgatcacccagccgatctgtataaatgccttaacgacacgacatccagtctcttgcttgccactatggcactgcaatgctcaaggctccttttgctgaccatcatgcaccaatggctgcctttcctaacattggtggccgtcctcgacacactgccgtcactgtctggaccggaccacaagacgcatttgctggccat

SEQ ID NO: 60134 - DNA, 1635 bp, Zea mays
  Clone ID: MRT4577_154843C.1
tacaagaaggtgaaatatgtggtcgaagtagtaagtatgttcaacatctttactactccttaagaccctaccgtaggcatccaaaatgattttggtgcacggttctgccaagttcgcgccgcggatcccccaccctcttcccctctgctcgccatgctcccgcacatcgtgccgccccgtcgtcccacccactgtgatttccttacctattacaaaaattacaatgttttgtttttaacccatttcttccatttgccggtcgtccgtaggacagaggtggggaggcttccaagcatactaattatccgcagcgtgatgaatcatagttgagttgcatgccatgtgtagtaattctacatctatgagatgtctttctaactgatgtctcgtgcctttctaaataggctcaagtcacctgtttctatttggttttggtttcatgtgtcccccaaataactatgatttccttgaatacatagaacagaactcatctttgtgttgtatttttatggcgttggcacaggctatataaattcaagtaggaatgcaggatggggtgcattcaactcatgcaggtggcaggttcgtatgcaggtggcaactgctatattctgcatctttcgtatgttttgtcacgcgaggtcgttcagggcgtattaggttaatggaagtggccaattctgtggcgtggctgagatgattggacctgtcgatttcgacagaagtgttgattactggcagcaggataagtggagtggccagttccctgtgaagtggcacataattaaagatgtaccgaacaaccttctgcggcacatcattcttgagaacaatgacagtaaacctgtcacaaatagcagggacacacaggaggtgaagctggaacagggcctccagatgctaacaatcttcaagaaccatgaggctgagacaacgatcgtggaagatttcgacttctatgagcagcgggagaaagccttgcaggagaacagacgtcaacagcagcctcccaccacctatcctcagaagctggtggataccaacgctcaaggtcctgtggccgatatatcagatgcatttgccaaggccgtccagttgaaggatactgcgaacagcgggacgaccccgaaagctgagggtgcctcagctgaaaatggatccgctgccacagccaaggttgaagggagtgcaaacctgaacacaggccctgtggagtagagtccgtttcccttctttctgctaatttggagcagcagatgaattgcatgctgcaatgtgaatgccggaaaagtggaaagtgcaggttgatcgtgttaaatatggtcgtggctgcgtcagttgtacaacatcataggctttgttttatctccatttatgttatataagttcaatatcatagttccaaaattattgttcccagttctcttctttcctgctttattttgcttccgacttccgtggtcctcgtgtcgcaccatgaatgatcgttccattttagcgggtttataggcataagaagctgcagaattatgctgcgatgaagttgcattttctgcagttgaatgtgatactgtcgagtcttgcactgtctgtaatttcagagatcctctagtgtatcttcgtcttgttactctc

SEQ ID NO: 60135 - DNA, 789 bp, Zea mays
  Clone ID: MRT4577_154844C.1
actctagttagcaccaaagcaatccaagagtagtagtactacaaccagcctcactacgtgagcatctccacaacgagtgtgtgcgtgcatcacttgtgtcctgctagcttcagttagctgcagtatagatcgtctgtgcctctgatcctcggcagttctgccagtagatagtttgggccaacaattggcatcagagccttaggttatgccgaaggaaggcgtcgccggcgacggctccaagaccgccgagcatagctcggctgaggacacccgtgcggcggacgcgctcgcgctgcgaggcaggccgggaggtgagctgggtgcgccacgctccgtgcgtgacgtgagcatgtccagcacctccttccctctccttacgcggaccaactaccccagttggtcggtcatgatgaaagtcatcatggaagcgcggcctatgtggaaagctgtggaaaccggcgatgtcgagtatgaggaggaccggctggcgatggaggcaatcttgcgctccgtctcagaggagatggtgctcacccttggtgccaaggagacggccaaggaagcatgggacaccatcaagactctgcgcatcagcgtggagcgcgtacgggagtcgaaggcccagaccttgcgcctccagtacgaggagatccggtttaaggccggtgaacaagtcgacgacttcgccttgcggctgcaaggtctcgtcaacgagctcgcaacgctcggatgtcaggaccccgactcgatgccacataggtctagcatgtaacacctcatatcactttg

SEQ ID NO: 60136 - DNA, 153 bp, Zea mays
  Clone ID: MRT4577_154845C.1
tttggttgtgttttacctataaatggagatgaaaactgaaagcttgagccaactagctaattggactgagtgtcaatttcacatggtcgcacacagacacagggtggaggtttggacattgttggtcacatttggactagagccgtattacgt

SEQ ID NO: 60137 - DNA, 973 bp, Zea mays
  Clone ID: MRT4577_154846C.1
atataacattggaccctctcctccacgcaaccggtagtgtcgtcgtcctttggagctgcacacacatctgtgaggagaaaccttgtgcttggcgatttggcaccctccagttaattatccttggtttgaggaagaacaacacttcagccagacatgctttaagcagggaggccatttttttttcctcgagcgcgctacgatggagctctactccggataccttgacgaccatttcaacccccacaagctaagcatcgccggcagcgccgtctcgccgccggagtacatggcgtcggcgtcgccggcgcagttcgcggcggcgcccctcaggatggggtacgggaggccggcgcccgcgccgcccccgcccgtgatgggcatgtggagcagcgagccgttcagggtcgacagcggcagcgcccacgccaccagcgcgtccaccgtcaacaccaagctggaggagacaaggctagaagacgacgtggtagcacttgagccggcaagaagtacggagcaggaaacgagcaggccgccagagagggcccagagaaggctcgcgcagaacagagaggctgcccggaagagtcgcctgcggaagaaggcctacatccagcagctagagacaagccgcatgaagctgtcgcagctagagctggagcttcaacgggcgcggcagcagcagggtgcatatgcgaatagggaagcatgggagactcggctctcggctacacatgcccgatagatccaggcgtcgcctgggttcgagatcgactactggcactgggtggacgagcagaagcggcacacgacggagctgatgtcggcgctccaggggcagcagacgtcgtcgacgtcggagctggagctccgcttgctggtggagacggggctcagcaactacgagcacctcttcaggatcaaggcggtggccagcaacgcggacgtgttccacgttatgtcaggcgtgtggaag

SEQ ID NO: 60138 - DNA, 176 bp, Zea mays
  Clone ID: MRT4577_154847C.1
gcccgcctgcaagcaccgtaccggaatatttccctggtcagtagcgtactagtcacggccgcccaaaaccagaggcgccagcccgggcctgagcggacgacgtgagcaatatcatgctgccaggggcaagtgtcccaatgaaacctttgaacgccgaagaggagagaggggccatg

SEQ ID NO: 60139 - DNA, 617 bp, Zea mays
  unsure (1)..(617): unsure at all n locations
  Clone ID: MRT4577_154848C.1
ggggagcgccgatgttgttcagtgatataccaaacccacggcagggagtaaaatacaatttcagtccttaaacttatcggactatattattccggttcaaaaaaaaaaaaaaaaaaaaaaaaaaaaaatttgtgtgtcagtgtgtgtggcatagccgtcggttcagacgttggcaccggccagggaaggggagcgccgatgttgttcagtgatataccaaacccacggcagggagtaaaatacaatttcagtccttaaacttatcggactatattattccggttcataaaaaaaaaaaaaaaaaaaaaaaaaaatttggggggcagggggggggggataaccggcggttcaaaagttggcaccggccagggaaggggagcgcccatgttgtttaatgatataccaaacccacggcagggaggaaaaaacaatttcagtccttaaacttattggactatattatttcgggtccttaaaaaaaaaagaaaacaaaaaanaaaaaaatttgggcaaaagggggggtgtaaaacccggataaaaagatgtttccccccttgggaggagggggccccttttgtttatcggtgttacaaaaaaaccgcgggggggaggaaaaa

SEQ ID NO: 60140 - DNA, 451 bp, Zea mays
  Clone ID: MRT4577_154849C.1
gggttgacccacgcgttcgtccacgcgtccgagcacctgcgcgctcgggatctttttcagcaccctgctcgtaaccatcgagcacaaggtcacggcccacgccggtcgtgacggatggctcgtcgacaacctcgacgacgggaggcctcggctacttctactgggctgctggccgtcgtcagcgccattaacctggttcctctttacgttcgacgtcaggggctacgtttataaggagaagcgcctggccgacgccggcatcgagctcgcagacgaggagtctattgccgtcggccactgatgctgttgccagtgccacaaccctgcatgcatgcgtctttccttctctttttttttttatatatgggtatgaacttctgatggacctggttttggcctgtaaatcggtgggggtcgccaagggggggccatgcctgaagtattttggcac

SEQ ID NO: 60141 - DNA, 448 bp, Zea mays
  Clone ID: MRT4577_15484C.1
tctgctacgagtcacttcacatccacagctacaatcaggacaacgccaagggcgcgctaggacacaccaggagacatgcttcacgagcttctcgtcaccctctcgggatacccgggcgacatctttcgcccattcccacaggagccagaggttgcaaccacatttgctgtgacagactttcccatgctgcatcctgccgagaaggagggtctcgatcgactggcacagctcggcttctacttcaaagagttcaacgccttcatagcctcttgcaggtcttgctcctaccgctcttcgccgacacacggcactccggctcactcaccacctggactttacctgacggccctcgcacactcgttggaaaagaaacttcagacctatcggcgagttattgtcgacaccgagtctgccattctctctggagaggataacttaggacgcatag

SEQ ID NO: 60142 - DNA, 311 bp, Zea mays
  Clone ID: MRT4577_154850C.1
cacacccaaaacccagccgggaggtcacccgggggggcacacgtccgggcttccctcccatgggcaaaatacaatctgattgcccttatccgtgggggttctttggggggaggaacgagggggaccgtattaaaccaatagcaagggttggaaattactttagggaacttccttgccaacacgatggtgggcagggtctccctattatcgggctctggaacggaggaatgggtcatccaaatgatccgggggtggtcaactggggcatatgagaatgcgtggcatcttttatttgggaaggggggataaac

SEQ ID NO: 60143 - DNA, 238 bp, Zea mays
  Clone ID: MRT4577_154851C.1
gggccccaaagatttcctgcgaacaaaacaaagtagcttgggcaatgacccaatcacaagtttttttatgaatagggggggttgggtttaaacctttggggaccacaagtttgacaaaaacaatttgatgacttccccaaagcccttttatcccgggaaaactccctccaaagaaaaaaaaggggaaccttttctttgggccttgggttttaaaaaaacatacattccgggatttttg

SEQ ID NO: 60144 - DNA, 306 bp, Zea mays
  Clone ID: MRT4577_154852C.1
caagaggaaaagcagcaccggatacgacagtagcctgttggtaagaaggaggtggagcattaccggaaacgctggcgggaaatcaatgcacgtcccatcaagaaggtggctgaggctaaggctagaaagaaaaggaggatgctgaagaggctggagcagaccaggaagaaggcagaagccgtggtgaacacagtggacatctcagaacgagagaaagtggcacagctgcgaagtctctacaagaaggctgggcttggcaaggagaaacgccatgtcacctacgttgtagcacaaaaaggtgtgggc

SEQ ID NO: 60145 - DNA, 162 bp, Zea mays
  unsure (1)..(162): unsure at all n locations
  Clone ID: MRT4577_154854C.1
ccaccaacaccaaccaacaggnggcgagagcgagagcgagagcaaagagcngagcgggacggagcaacnagcgcaagggagaacgcacacccaccaccagggcgacgcccggagagcagccggcggaggacgcggccgaagagacgcccgcacccgaccgcc

SEQ ID NO: 60146 - DNA, 225 bp, Zea mays
  Clone ID: MRT4577_154855C.1
gaaacatccagggaaacgttgcagtatctgaaaatatcggctgtatctgaaaagactaacgcaatgcagcaggaggctacctactggtcatttgaggaaaaacctgttatgtaacatggactaacccttaagcctacaatgcattggagtaccggcaggtccaccctaccattccagcaacaacctctgaggatgaacttctgattggatgctggctgctgctcc

SEQ ID NO: 60147 - DNA, 274 bp, Zea mays
  unsure (1)..(274): unsure at all n locations
  Clone ID: MRT4577_154856C.1
gtgtctcatctgctgctgcttttcgtgcttcctgtgctcagccttgtagctctggcacacctttctcccttctctcggccccntctttttcttcctttctcctctctgtggggggggggggctgctgcttttttgcngccccttcgnctccttcctttcggccggctggcttctgccttctctttgccgcggcggtttcttgcgtttcgccggttggcctggctggtcccctgtgttgttttccggggggggtggttctgccgtttggtcgttt

SEQ ID NO: 60148 - DNA, 368 bp, Zea mays
  Clone ID: MRT4577_154857C.1
gtgttttttttttttttttcacataaatgggcagaggaaaatgtaccatcaacggcagagttttttgatcaagcgccaagtaatagcggtactggaacataggttataaagcttggaaatagataaatctaatgaacatagcagactgtggtacaagacataggtgatacacaaatactatgcaacacataatatatctgcatcccaaagatataggacgactggcacaaggggcaaaagctaactttgctattgcactcctggcatagacaaatataccgacaaggtactgatagctggaagacctgaatctatatggagattggtaaaaggctgaacccaacccataataggtggcattgcaaaac

SEQ ID NO: 60149 - DNA, 1154 bp, Zea mays
  Clone ID: MRT4577_154858C.1
gaggttccacggccctctctttctggaatttaaaatctgtgcaaaacctccctattacaaactctttataaaaaaaagttggggggggtaaacatagggccctttttttttttttttttttttgaggttcaaccgccttttctttgggtattttctattctggccaaatcccccctattacagactttttatacaaaaacgttggggcggctaaacctaggcccatttttttttttttttttttgaggttcacccgccttttctttctgtattttctattctgttcaaaacctccctattacagactctttatacgaaaacgttgggccggctaaacctaggcccattttttttttttttttttttgaggttcaactgccttttctttctgtatttcctattctgttcaaatcctccctattacagactctttatacgaaaacgttgggccggctaaacctaggcccatttttttttttttttttttttgaggttcaactgccttttctttctgtattttctattctgttcaaatcctccctattacagactctatatacgaaaacgttgggccggctaaacctaggcccattttttttttttttttgaggttcaactgccttttctttctgtattttctattctgttcaaatcctccctattacagactctttatacgaaaacgttgggccggctaaacctaggcccaaatacacgagattactggtaatgacttagctaaccaaagcccaacacagatgaagaatacaatacaaactctctatatctccgtggtcgtcacaaggtacctcactgccctcgtacatacatactgttcatttaagccggactgatgccagaatatcaatgctactattcgggctgctgtggcctgctactgcttcttgaggggagctctcattaatcttagaacctggtaaaaatatattaagggctatataatgttctatcattccagatactccttcagatccagcattaattcactattccagtatatctgagaggtgctgcactcaggaagtgtcggaacacctagctcagatgaaacatcctcgaggacctcagctaaatctgaatcccaaagtcctaacctgcagacctttttgtacacttcaaaacctgcagctttc

SEQ ID NO: 60150 - DNA, 220 bp, Zea mays
  Clone ID: MRT4577_154859C.1
ggtcgggggagatccacgaaagtgggccaacgctcggtggaggtggcgagatacagaatattggagtctggcagtgttgggagggtttcgaactggccgccttcgggggggaactgaacctgcctgcctttaattttccttgttgggggggtcaacctgttgttgttgttttaacttcaaatccggttttggggggtttataaccccttcgtaactgttt

SEQ ID NO: 60151 - DNA, 1205 bp, Zea mays
  Clone ID: MRT4577_15485C.1
gagcgagagcggcagccccgcatcttgacgttggagctcgtggcgtcaagtgggggcgcgggcgcgctcgctgtcgtctgcaacaaggcactattccccgtgagggtccccatcaccatcgcgctcacgccgcccgtcgccagggccctaagccgctggaggctcgtcaagagctgatctgtgagtccgtttgccgcttcagattgccctctgctattttagtttcagagtcaaaccggccgggctccgaaagagtgcgccttcgccagccgtgagctcgcggccggcccgcgggaaaagaccaaaaccctagccgtcacagcgccgcccccgaaccataaacctccacctcgccggcggccatggcgttctccggcaggatccaggagctcgtgaggaagtatggcaaggtggccatttgcgtccacctatccgtctcctgcgcctccatcgccggcctttacgtcgccatcaacaacaacgtcgacgtcgaagccgttttccggaggttcggtatctcccccggcgttaccgtaggcggcgaggcctcacccgcccccgtttcccgcgatgaacacctgcgcgacgtccccctgccgcccatggccaacgaggtactgcaagaagagacggagcgagagcggcagccccgcaacaggacgatggagctcgtggcgtcaagtggcggcgcgttcgcgctcgctgtcgtctgcaacaaggcactattccccgtgagggtccccatcaccatcgcgctcacgccgcccgtcgccagggccctaagccgctggaggctcgtcaagagctgatctgtgtttttttcgtcacaactgctctgggatatagggtgcatccacatccaggaaatccagagagaaaattcgccgcggtttgttttttgtggtcatggatgaaagctgaaatccctggagcgaagtctcatgttgaactcccctttgttcatcagtgaggtgtgaatccctggcagaacgccctgctgattttgtaacatgaacacaatggcttggggacaaaataagaactgcgatcgaatgattgatacaagaagctacgtctacactcgctttatgtgactttgcctgtttctctgatcgagtgtgtggaatctatgtactgttctcacttctgagtgaatttataaatgatcaaagagctgaatataaaaaaaaaaaaaaaaactcgag

SEQ ID NO: 60152 - DNA, 545 bp, Zea mays
  Clone ID: MRT4577_154860C.1
gccggacttgaaaagctggttcttcccttgaccccggggcccaacgaaagcgatgggttctaatggtcggggaaacccgtgaccttttcaccaaacggatacccggagggattctcttccaactggatactgattccgggaaattcaaagggagattcaatattgagcacaatgagcccaaatggtgaaagacacgcgctattataacatggtgggggtggacccctccgccaccgagtccgagataaaaaaagcgtactatgtcaaggcgaggctggtgtaccccgatatgaacacgaatgatccgtaggtcgcggagaagttccaggaaataggagaagcataccaaattctgattgagcctacacagggctaagcttatgactggcatgtgaaagactgcatcttaatggaggggatgattgatattgcagcaacttttgcaattctgttagttaatgagctttttgaggaatatattggtcaactggaaatggcattaatggctttacttgataattatgttgaaaatgagcagattgatg

SEQ ID NO: 60153 - DNA, 494 bp, Zea mays
  Clone ID: MRT4577_154861C.1
ataaaccagccatggggacattctatgggtcgcgtcaatttcccactggagcaaccagccagtggggcaactggagcaacgggtgaatttcaacaagagaataatatccgtcttatcggacaaacgggcgggtttattaaaattaacctaacacgagggaggggctttaaaagtgcaacaacacactggtttttatctggagccccactaagttcttgaaggaagcctagtaaatatatacatgctgcctggttattatgaacctcatgccccaggggaacaactgatatccaacccttatgattttctgacctacggtatacagatatactttgccatatgctaatcaactaagtatgctgcagctatatttagatcgacccaatcccacatagacatattgatgcacgtcagaactgctacggggatttagggggttatgcaaagagataaattgcgcttttgaacaaaaaaaactaggcttatgttttggg

SEQ ID NO: 60154 - DNA, 656 bp, Zea mays
  unsure (1)..(656): unsure at all n locations
  Clone ID: MRT4577_154862C.1
cccacgcgtccggagagggtcaagttggtggacttgcaccccacggaggcatggatgtcgagcttgtactcgaggagtgcctgcatctgggattatcacacacagtcaatttgtaggagagaggacgccatacatcaaagatgactaaagaagaggaagatgaagaatacctcgaagaggaagaagatgcccttgctggtgcaggagggaacacatttagtttcacaaccttcatgctcttaacccctctgatcccggtgcgtggcggattagactccgatggggaagtctcttgtgaggtggatcaagttcgtgctctttaggaagaagtcgtcgtcctgatccagctccaccaaggccaagaatttatcgataagaatgatgttacgatttcaagtgtggctctagatatgcatctctagctatggagtagggatttgttctagccacggttgcccttattttttcaatatgtagaaagggtgtgagtaacaaaggggaagctgctgccaggaagggagctcgcgttctctaagagctatcntagtgatcnntcggagtttgtgcttttgttagcgcctataacaancgagatcatgcggggaggtggcaaagggtgaaaatnctagcgtccaagaagtgctagtgactgatgt

SEQ ID NO: 60155 - DNA, 215 bp, Zea mays
  Clone ID: MRT4577_154863C.1
aattaatattgtgttattacctgccacgggtcacaacatgccttgctcaagcaacccctgacagataccaatcacgagggcggacattacaattggcaaggggctctaagttcaatagaatgggggggggttgaaaatttacaagcatcattgtttaatggtaagccgggagcgtggcacattccagttgggaatagcgacgcccttagattttt

SEQ ID NO: 60156 - DNA, 877 bp, Zea mays
  Clone ID: MRT4577_154864C.1
gaggttctgccgggacaaccctctcgacggcagactaggtttcatccccatctcaaccggcggcagcctagggcttcatcccccacccccaaatccatgccgcttaggttggagatcaatgtgtgcctgctcgacctcactggatctcagtctccatgtcgtccttctacttctcgcgtcactttgattttgcgctctagtttgattttgtttccattgtggtgattagtggaaattttctcaatggtcagagagggtcaagttggtggacttgcaccccacagaggcatgtcaatttgtaggagagaggaccccatacatcaaagatgactaaagaagaggaagatgaagaatacctcgaagaggaagaatatgcccttgctggtgcaggggggaacacatttagtttcacaaccttcatgtgagccctttgctgactatttgttactaccttgatatatgttatttccttgctttaataactacctcaagtcgacggaagaattacttgttaaatagatgtttttctttgttgccataaaattatttcaacgctatttataaagcaaactgaacctaggtaaattgagtcttgcactggctttgaaagtgaataagtgattcgggtgaggtgcaaactgaaacaatattattaagtatactgatttgggtgaggtgcaaattgaaccaacactatcccataaggccataactgatttttatatttaagttctataactaagatgaccaagaaccctgaaatgaatgctgacctattttgcgcaataactactactcagtaaatggcatggtgtgtttgcctttgttgggagtggctatagtaacaatctgcctgatgtttcctgtggatgaattt

SEQ ID NO: 60157 - DNA, 268 bp, Zea mays
  Clone ID: MRT4577_154865C.1
cgaacaaacgcaaccattggcacaaataattattggggaaaagggggaatcgatacataggggcagcgacacatgcatctagtggcccaatcgaaacgaggcgcagttaacttgttgtatgagacccagacgagctcctttccgatgttgccatcgctggaaaagtcctatgatcaccttgggcgcgctctcaagtccttacggcacgtccttaaagaaggcgaacgtgccatccctgatgtacggcaggaccaatgcctctttatgc

SEQ ID NO: 60158 - DNA, 308 bp, Zea mays
  Clone ID: MRT4577_154866C.1
gcgggaaaacaggagccgtttatattacacggtttaaccgggtttatattaaactacatcagggattgtctagagtatttaaaaatgagcgctactacggaccaaatatattacgccatacaacctcctgacaattacatgggcatctaatcatctacatgggtagaactagagcgttaagaactagaagtcactgtttcgagtgaaaatgtactttgtgaagatgtaacttttttcaggaattgcaccattgccgtcatcaatcccaagagtgcttcattcttttgtacaaatgcttcaatcatata

SEQ ID NO: 60159 - DNA, 1476 bp, Zea mays
  Clone ID: MRT4577_154867C.1
tccaccgcggtggcggccgcccttttttttttttttgaaggtagagccgtagaggcaggccctttatgcatatatatatatggcggttaaaaacatgtacgtgcagggtggttggttaagctctagtacgtcagatgcttagatctagcaagacagcccgaatgggcgtgtcctagcgccaagcaaagtatttgacgtacgcacgacaaccacaatggccgcaacaagctggtacagggcaaaagtaaataaagcaggataagacacgacacaaaagaagcgttaagcactcacatccatatcggccatgtatgaataataactttagtcgccacaaaatcttgaccgagtaggatggccttgaggcatgtgcttctgctccactccatacagcaacggtggttgtcaaactcaaacagagaaatcacatgtcgtcttgggatttttctagagctgccaatcgatggcagacagccccagcttctctaagatctggtttgttttggagaagtgcctgcatccaaagaaacccctgtttgcagacagacctgatggatgagcagatttcaatatgtgatgttttgtttcgtcaatcaatcttgtcttagattgagcagaatttccccaaagaaggaatactaatcctgatttcttttgtgatacagtcttaatgacctcatccgtaaactgctcccatcctttcttggcatgtgagttggcttgatgctccctcacagttaggacggtattgagcataagaacaccctgcacagcccatctttccaaatttccatgtgatggcacagtgcagcctaggtcttttttgagctctttaaaaatgttacctaagctagaaggtatttttatcccctccggtactgagaaagacaaccccatggcctgaccagggccatggtatggatcctgaccgatgatgactgccttgacacggtcgaacggggtggcgttgagcgcgtggaacacgaggtgcggcggcgggtacacgggcagcgggccgtggagcctctcgtgggccacgaagcggcagagctcgagcgcgtatgacttgcgcagctcaccacgaagcgcctccgcccacgtgtcctccaccaggagctcctccagcttcggtgcgccccccgatgcttgcgctttggactcggcgaggcggaggttgcgccgcgcgcgggcgagcgccaggttggtgtcggcgcgacggcgctgctccggcgacagcgaggagggagaggagttggaggagagggaggcggccggggcaagcgcacaggcgcttggcggggcgcgcgaagaagtcggcgatagttttgggtgccgccggggtgggaggggacggcggcattggctccggatttgggggatttcgggaagcggcggcgagggacttcgttttggtcagcagccaccagcccacggctctcgcgttccgaagggcccggccgggggcccgggtaccca

SEQ ID NO: 60160 - DNA, 367 bp, Zea mays
  unsure (1)..(367): unsure at all n locations
  Clone ID: MRT4577_154869C.1
ggggggggggtgtttttttttttttttttttttttttttttttttttttttttttttttttttagccnaaccgccacagctagctagggttgtcttcacctaatagcaatataatgtttcttatgtggaacaggctcaacatgatccctgggagggggcgcttttattttaacctttggaacccnnggccnttgactcagggggggggttttcaagcccccccccccgcgccagattggcctgcccggggtgggagaatgttcccccccatgagaccgtccagaacaagagcttttgcgangtttngggtccgaatcttgccccccaacaactttggctgctgggccttcccccctgggcccccctt

SEQ ID NO: 60161 - DNA, 267 bp, Zea mays
  Clone ID: MRT4577_15486C.1
ggcactgatgttagagctcctgcgccgccatcaagaatctaacgaagcctcctcctcagtatccgggggggagagggacccccccaacaacattgatgtgcccaacggctcggactacctgctctagctccggcacgacataaagagactcctccagcccaacgactccttgttcatggatgaggactgccactggcgctgcttctgatccacggtcttcaacactaacacactggggacgggtgggctggctgcccctctgttctc

SEQ ID NO: 60162 - DNA, 102 bp, Zea mays
  Clone ID: MRT4577_154870C.1
cctcgaggccgtccgggaacgtcccctgctacgccgacgtctcggccgctaccgccgtacgctcgccgcgaacgcacaacgggctggcgaccttcggtccta

SEQ ID NO: 60163 - DNA, 420 bp, Zea mays
  Clone ID: MRT4577_154871C.1
gccatgggcgcgggatactttaaccatggcaggctggtgatgaacttgaccccagtgtgttttatagaagctctgcgaccttgtcatgtgacatgtggaagcagtctgaactgttgcagtccatcagcttagctcatttcaggtgagccagcagccataccttggtccccctgagaaggtcagtcagagactttgggtcaaagttcctacccttctgaacattctttttctcccaaggacattcacaaatagctacttgaatgtatgatcatgttcacccagtccaggcagaaatggggacgccgttggcagggagtattctgactccctttccgtggctgcaagtggtctccagaaataaagggcatggcctggacagcgttcaatcaactcctgggggcaaaggacaaactgccccaa

SEQ ID NO: 60164 - DNA, 440 bp, Zea mays
  Clone ID: MRT4577_154872C.1
cttggtcggttccctccttgaagccatcgcttggtcggtcaacttggaacagcgggtggacgatcagcgtgtggattcctatctcaaggacggatggcaaggtcgaatgctgcatgtaagctgaataaggtggtgtggtcattggcgatcgatgataatcatgctccacagggtgagggtgtgaatcatgcgggaaaaaaagagaggtcattggcgatagatgatgatcttgctccagagggtgtgtctgtaaattgggaggggggacaaggacagaggagactcaagacaaggaggacgatgagacgacagagctgcccgtcgggggaataatggcctccaaaaccaatggagtcgtctactacgactacgatgacgtcgtcttcgtcaaggagatcgcccgccgccgcgctggcgctgttggaggagatgactcggag

SEQ ID NO: 60165 - DNA, 413 bp, Zea mays
  Clone ID: MRT4577_154873C.1
gaagagcattaattaattgatcgcattgataactcagaagccggcgagcaggcacatgatcgccggctcatacaatgcgaacgtccactcacagtaccatcacgcgcacacgctactgctgctccacccactacatacatacagaacacgcgacccaacgaatcacctcacacacactcatgcacaacacaagactgcacttcatgaccatgactaatacaaattaggcaaaatccattcaagcagctcacatgtaccaaacaaggcaagattacgcggcaactatctatgagcaggcctaggataggatgctccgagggcgccctgcagaattgctctcaacaagagcaccttaaaccacatcctataccggcctgttatgttaaaaacttgcccaacttgtgaagaataca

SEQ ID NO: 60166 - DNA, 210 bp, Zea mays
  Clone ID: MRT4577_154874C.1
ggagatgaacgaaaccaaacccatgttttatcaacaacaattataataatgttgttaaaccagcatacactggattagtccgtaacagctgtagctgtctaaccagcctttactgtacaagggtcacatacttagactatatcctcaaagatttttattaaaacacaatacaaaaaaacatttttggtaggcaagacgagcacagtattt

SEQ ID NO: 60167 - DNA, 426 bp, Zea mays
  Clone ID: MRT4577_154875C.1
ggggccaatgccccccatggccgaaaaaaccgggttttttcatttttaggggaccaaccccggggcttttttgatcaaacgggcccctggactttattttaaattcgggccccccacagattttggccccccgaaccccccgaattaaaagagggaaagctggttcctaactttgcttaaactggcagccccggaacctggggcaattttaaacgccttggttttggttccggctggtctatgaaaagaaaccccctgggggggttacctcccctaaaaacgctggttttccagttcctcaatgaatttgacaaaggtgaggatgatttttttgccttcaggggggaagatgccctccggggggaattggaccccccggatgggtttggactttttggggggagcacccctgataaggccattttt

SEQ ID NO: 60168 - DNA, 213 bp, Zea mays
  Clone ID: MRT4577_154876C.1
cccacgcgtccgcttgctgcatgcgaaggagctctctagaaggctgaaggaagaacgagcaagtacgccagcttagactgtccataagctggcgaacttgctgcatgcgaaggagctctctagaaggctgaaggaagaaggagcaaacatcacagttaacagtgtccatcctggattgatcatgaccaatttgatgaggcactcctttgttct

SEQ ID NO: 60169 - DNA, 1280 bp, Zea mays
  Clone ID: MRT4577_154877C.1
ggggaccctcgaggccggccgggatccgtcgtccgtctcgtctcggctttctcgcctcctcggcggcagcggtgttccactcccatcgcgtcgggacatagaaagggggagcgcgggcgacacgcgagcgttagttgccatggacgcgcccttcttccacgagctcaggcggcaggcctcctcctacctcaccggcaagatccgctccgcgcggctggcgctcaccgacgtcaccccgacgcagctcatgacggaggaggcgacgaacggggacgcgtcgccgccgaacgtcaagacgatgggcctcatagcccggcaggcgttcgaggtcgacgagtacgtcaggatcacggacatcctgcacaggcgcttcgcgagcttcgaccccaggcaggggcaggggcaggggcagtggcgggaggcgtacaaggcgctgctcctcctggaccacctcctcacgcacgggccccgcagcgtcgcggtcgagttccagaaggacagggaggccatcgagcggatggccaccttccaacacatcgacgagagaggcttcaactggggacggacggtgacgagcaagtcggagcgcgtgctcaagctgctggagcgcggcccgttcctggaggaggagcgcgagcgggcacgcaagatcgcgcgcgagatcaagggcttcggcagcttcaacctcagcagcgcctcccacgccgcgccacagccaccaccaggtgacgagggaagccgcggctacggccggagcaactcgcagttcgagcagcggtggaggcacaaggacggcgacgacagcgacaaggagaatctgatccagagcccggagccagcacgggtcgcgcgggaagtcgaggccgagccggaggagccgcaccaccacccgttccacgggctcgggcaaaaacagcggccggaggcgatgctgctcctgagccagtgacgggatcagtcggttcgtgtcatggtgatatgaaaaagaaccgtgtgctctgctcgactcaactagcttttctccattcctcaaggctgcaggggtcggaggcagtgatgggatcagtcagtactttactgacactgcttggtgcaccatgcatgagaactttgatgtctcatgtagtagtcatgtctgcttcgccttgtaaataattctatgcttcagttcggatgccaggatgtaatacgagtctacgactctacgagacaacataaggctgtctccaacaatagcccgtaaattgttctgcccgctaaaaacccccacaccaccacgc

SEQ ID NO: 60170 - DNA, 599 bp, Zea mays
  Clone ID: MRT4577_154878C.1
cttgattttactgctagcttcgcccctattgggcttaactctgctctaattacaaatgattagctgctggagctctataagtagatgcagctctaacttcctgaccgacaaatctgctgctttctcttcaatccttcaaagctaggaactaactgaaacaaactctgaagaagacgaaaacaaactactgaactcgaaccaacttgaaacaaactcagtcacttgtggatgatagttgtttcttgcatcacagatcacacttggtctatgtcggtgaaaggatccacatcagtggtattattttttgtatagactatagagtatatttgagattcttaacttgagaaattaactgatgatgactgatccttcatcggcaaggtcattagtaggaggtcagcatgtttaactccaatacctaatttgagaagggagcaagcaactcaactctgggctaatggggttggatctcttggcacatttatgttgacaagagattgtgtaggaactaggaacatgaggagcacacgagggtagagatggcaggtaagaggagggggtacagtagtgcaatgaccaacaatgcaactgtgatggag

SEQ ID NO: 60171 - DNA, 1351 bp, Zea mays
  unsure (1)..(1351): unsure at all n locations
  Clone ID: MRT4577_154879C.1
ttcattcggcacgcgtctcgtctcggctttctcgcctcctcggcggcagcggtgttccactcccatcgcgtcgggacatagaaagggggagcgcgggcgacacgcgagcgttagttgccatggacgcgcccttcttccacgagctcaggcggcaggcctcctcctacctcaccggcaagatccgctccgcgcggctggcgctcaccgacgtcaccccgacgcagctgtaagtattcggtttctctgattacctgtggcgcgccgcgcccaggcgttctctctgattacctgtggcgtgcgtgtagcatgacggaggaggcgacgaacggggacgcgtcgccgccgaacgtcaagacgatgggcctcatagcccggcaggcgttcgaggtcgacgagtacgtcaggatcacggacatcctgcacaggcgcttcgcgagcttcgaccccaggcaggggcaggggcagtggcagtggcgggaggcgtacaaggcgctgctcctcctggaccacctcctcacgcacgggccccgcagcgtcgcggtcgagttccagaaggacagggaggccatcgagcgcatggccaccttccaacacatcgacgagagagggttcccgtgctctctcagtctgacgcacacacgctagcgacttctcaggctgctggagcgccccccgttcctggnagaggagcgcgagcgggcacgcaagatcgcgcgcgtgatcaagggcttcggcagcttcaacctcagcagcgcctcccacgccgcgccacagccaccaccaggtgacgagggaagccgcggttacggccggagcaactcgcagttcgagcagcggtggaggcacaaggacggcgacgacagcgacaaggagaatctgatccagagcccggagccagcacgggtcgcgcgggaagtcgaggccgagccggaggagccgcaccaccacccgttccacgggctcgggcaaaaacagcggccggaggcgatgctgctcctgagccagtgacgggatcggtcggttcgtgtcgtggtgatatgaaaaagaaccgtgtgcgctgctcgactcaactagcttttctccattcctcaaggctgcaggggtcggaggcagtgatgggatcagtcagtactttactgacactgcttggtgcaccatgcatgagaactttgatgtctcatgtagtagtcatgtctgcttcgccttgtaaataattctatgcttcagttcggatgacaggatgtaaggctgtctccagcagcgtcccctaaattccatcctctaaaggaatattctctgtcctttacagcacactctaaaagattctgtcctctatatattctcagtctcc

SEQ ID NO: 60172 - DNA, 288 bp, Zea mays
  Clone ID: MRT4577_15487C.1
gacattcattaatcttaatcatcagatatattaccaggtgggtgttttctatgatcagtctgaggttattattgagccggaaagatcccgaacacccaaagtattcctttggtgcctaaagcactgaatatggaaaagaccatcatatttgggcatttatgaaggttgtggcccctgacaacaaattactactattgtgaaaatttcttctcttcctcaaggaatataaggtgcttacagggacacaggaaattgcttccgtttgtcaagcctattgacaaatattga

SEQ ID NO: 60173 - DNA, 754 bp, Zea mays
  unsure (1)..(754): unsure at all n locations
  Clone ID: MRT4577_154880C.1
cctaaaagatatatgaactagctgtgttttatttttgctttggaagcccttattgcgtaacaaatcctctcatgtcagatagtggtgcatcttattggcttgatctgtctttattgagttctgtctaaattgacaaaattctaggcctaatgatgtgttcttaatttatccatcgtagaaccattaatataacacacaaaaacaagaacctgctgttaattttatgcctatctgtactagttgtacagttgtattgtattcagctaataaaattctctgcagtgcttttttgacaccccagggctcatgttagggcacatggatttccttatagggatgtcacagttcgtgtggagagtgcctggagctcaattaacctatatgatttactaatagtcatgttcgatgtcaataggcatcttaatttgcctgattcacgtgttataaagttaatcaaacgttttggtacagaggtgaacccaaaccagcggcgaatattgtgcatgaataaggttgacctggtggaagacaagaaggacctccttaaagttgcaaaagaatttgaagatcttcctggatatgaaaggtacttcatggtatctgggctaaaaggcaagggggtgaaagaccttatacagtacttgatggaccaggcagtaagaagaccttgggatgaagaaccaactgtaatgactgaagaggtaatgaaaaccatatcattgnaggttgtgcggnagaagatgctgcatcacat

SEQ ID NO: 60174 - DNA, 614 bp, Zea mays
  unsure (1)..(614): unsure at all n locations
  Clone ID: MRT4577_154881C.1
ttttttttttttttttttcagagcttcgcgacaaaaccatgcaagtactgaagtacatatcaatatcatccatatcacacttctctacatcgctaaactaccatccatgctcaccaatgacatgtagtccatgtccatgaccatgaccatgaccatgaccatgtagtacacaatgtgatcccgcaagcctctgtcttctgctcctagcggcgttgcatccgtacggtggcgtctccgggaacgcagccttggccagcgcctgcctgacgccctcctcgagagccttcagcgtgcggcagccggcgccgtcctctctgcacagtacgaagtcacactgagccctgcctcccagggcggccatgtccgccctcagcggcctcagcctcatggcgcgtaacgctccggcgaggtcagcgtggagccccggccggtcgtcacagctgacggaggccctgatgtacgtcgccgccgctctctcgtaggcagtggaggccgtgccggtgcagcagacgacggcgatctcgttggtctctccggggatggtggccantggtggctgcgtggtttcggccgatttcttcttgaggtccttgagttggcaaaccacccgggct

SEQ ID NO: 60175 - DNA, 516 bp, Zea mays
  Clone ID: MRT4577_154882C.1
aaccaccacttttttattatgaatcatattattggtgatcccacacaacataatggggggcccccccctgctgtattacatctttaaatggagggggggggtgggtggagaatacccaccaattatgaataatcagtcggggggcgggacggcggagacccccccacagggggtggggcggcggcagagcaggtacctcccgccggggccgctgtacagggggggtcaccccacccgggggccgtctctagtagaccggccctcgttaccaccaagggcggactcatgaccatcattgctgcctgcgggaaaaaattattctcccacaacaacacacaacatccgaccagccggcatcaaaagaaaagccggcggcgcctactgaggagccagccaccccacattagtggggcgccccccacccgctgcttagcaggaaaaaaacctgtcccacctgctaaaataaataacccaccaccccgcgagaagcggccagcttcgtgggggacgctcctc

SEQ ID NO: 60176 - DNA, 441 bp, Zea mays
  Clone ID: MRT4577_154883C.1
ctgcaggtcgactctagactatctcgcaggtgatatcttgtgaatccgcaacacgtaccccgcgtgcttaaattcgttggaacgatacatctcgttttactctcgagtcttggaccttctgggctcgtccctttttcaccatggcgtcacatgcagcgatgctgctggacccgaaagggtataaaaagcgcctccaaagaaatggtatcttctctcacttacactctctcactttcacttattcctacctaacacccattcgcctgttgcacatgtatttctcaagttaaaaatggatcattcatcttaacatttaaacttatcttcgctttctacaggcgctaccaaaaatccgtcatctcaggacttctgcccctccattgctcccccgggaaccgccatggctcgtactttcgatcccgaagctcgcaagtctttctc

SEQ ID NO: 60177 - DNA, 1893 bp, Zea mays
  unsure (1)..(1893): unsure at all n locations
  Clone ID: MRT4577_154884C.1
attgggacctcgagccggccnnnnnnnnnnnnaaaaaaaaaaaaaaaaaaaaaaaaaaaaccaccaggtggaagaataaacttcagagtaaagaatatgagatatccaagtctattttcaggctttcaactggtcttgcctctccagcctggccagagcctgatgtggtcaggaaaagtatttttggcgaaacagggtccgactttgaaacttttgtcctagcctactgggaaaagttgcctaatttgtacaggaggaaacaagccactaaaatggatagtcttgtgttcgtcacactgcataatgattttaatcttgggacaacacctgattctatcattgaatcattattacagggtcttgtttcttgccccgctatcgcttctgatgagcttgacatagattcatttctccatgaggttcatgattcattgggcgactctgtaaagtacaggcaagacattagagtcatgagaacacgagatccagatgaccaaacctcaaggggatgtgtgacagaggagcattttttcgatgatggaacgatcttcacggatgaagatgcattcatcgaaaaatgtaagcacgccttcaagaacggtaattcgatcgccttgcgtggcatggagtttcggtctgagaaggttgctgctatagcttctgcactggctggtttatttgggcagccttctgtaggagccaacatatacttctcgcccgccagatctcaaggcctggcccgacactacgacgatcactgtgtacttgtttggcagctactcggtagcaagaaatggacggtttggcctaatccgaagccactgttgcctagactgtatgaacctttcgaccctttagatggcactttagatgagagcagtgggagagtggaggtcttacatgaaggggacatgatgtacgtccccagaggttatgttcatgaggctcgcactgatgtcagtggatcagaggtgaacgattgctcactccatttgacccttgctattgaggttgagccaccctttgagtgggaaggttttgctcatatcgcccttcattgctgggcagagaagcagcagcttagaggttcccaatctgtcgagttcgaggggaaagcaggagcttccttatccgctattgtgctgcatgtagccatcaggttgctctccgacagtgagcctgttttcaggaaggcgtgcatggtcgcagcaaaggcatcgacgtcgtccagttcctgtacatccacaacgactcacctggaggctcttcgaagcagccagaggtcaactttcgacgagatactgaggaagatcgatcagagctgcagcatcaaggaagcgctggagcgcatcgtgtcggcggtgagagagagagacgacggagccttccagtggatgagctggctccggcacctgccgcagcaaggaaccgctgcaggctacagcatcgacttctgcaatgtcttgggcgccctcgaggctctcgtggaggcgttcgactctgaccctggccaggccctggatggcctcacggccttcaagtcagggttttgccggcgcgtcgcgtacgaggacgcgtgcgaggccttcgggactttgctcgagatgtacagggtggctaggacccagtacatgagggggatgctggcgttgcacggtgcaggtgcacacgtgagctgaggctgagccgtggagaatttgccgtgacagagaaaggttttgcttttctggtggtggttgggtggctaggctagtcttttctcctagcgaggaaaacctgacctgtgagtgctggacacttgtacgatcgtgccatgtatcgttcgatggctgcttttgactgctggtaagattatccaatggcatcgatctgtgacttgttccgttgttcgac

SEQ ID NO: 60178 - DNA, 365 bp, Zea mays
  Clone ID: MRT4577_154885C.1
tccttatactccttgttgtactttcacgtgtagctaccgtaaccataggcacacactgctaacaagctcctatagcaacactttcttgctcgataatctaagcagcgggaatggtcaatgatgtgaaaccccaattgtacgaaccctacaggtatccatcaggcagcaggtacaaccataacaaccattattaccctaggaactccaacaacctcaaatcatattacaggatgaacctttggaccatttggtggtgcaaataatcagggcacaacaactccaacaacttgtgctatcaaaccatggtgcatactctcaacaacattagcttgctgcattgaaccaactggctgcaataaaactct

SEQ ID NO: 60179 - DNA, 325 bp, Zea mays
  Clone ID: MRT4577_154886C.1
tgaaacggtgcgtagactggccgtcgttttacattgttgccttggaacacgctatcaaacatactttaatggactggagtacatcctactaaatcatgatcaacgcgactggaagacggccacaccgtaggtgcgcatgaagatatgcgccgagctaatactgattaagcaactaatattttagtactttctagggaacggggccggtctttcaaccggagattggaacttatgtgtgcgcacacatgagtcacaacatggggaatgggggacattctcatcacttcactgcgtgtgagccaatcaaagggtcgcgtgaagctgg

SEQ ID NO: 60180 - DNA, 458 bp, Zea mays
  Clone ID: MRT4577_154887C.1
tcgtctcgcgaccactcactcgggacgctcagctgcaccacacaacctccaagacacttgaggcaaaagaggagtggccaatggcttcgtaggtggccgccgcggggagcacattcctgggcacccgcctggcggacccggtgccttacaacgggcgcttcgagggccggttcaggttctagagcggcaagatcaagaatggccttctataacaaggtggcgacaaccacatatattttctaaccgggccttcacattcacatgagttgggatcgtcgacttcatggactgctggcttcgtagggacttatgcgtacactcgtgcctgcatggtaaggctcgccatcatcttcctgcacaaatgaggcttttttaacatctatttggccctgctcgtagtccttccactccaaagtgcccaatcctcatatcttcgtattaacatataacgtctacta

SEQ ID NO: 60181 - DNA, 152 bp, Zea mays
  Clone ID: MRT4577_154888C.1
ttttggggcatgagcataggctccttcattattgttagggaacgggtacacatacaacagggtgttaatcttttttaaacacagggtgaaaatttgacatagctacatattcacagaataaatatttgttctttaccctagcctataaattt

SEQ ID NO: 60182 - DNA, 214 bp, Zea mays
  Clone ID: MRT4577_154889C.1
gccgctcgaccgccgacacatcagcgcacacgtgggccaacccctccgcaggcgaggaggcgagcatcgcggataccgagcgggacgtgaaggcggaggatacggagaccgacgacgccgtgacggccggcgtcgataccgccgtcgaggccgacgttacgccggcggacgcggttacggccatcatgcaatcggatgccaaggtctcaaccga

SEQ ID NO: 60183 - DNA, 891 bp, Zea mays
  Clone ID: MRT4577_15488C.1
ataatcatgaatttccctcgaggccggccgggaaaacaattccacaagctttccaatcgccgctgccggcgcgcatggcaaacgcagccacctcgccgccggcgccggcgccgtcaaggcccaccctcctaggcggcgtccggggcttcgacgcggctgtgtccctccgcctccacgcccttttcctcccggtgccgcgcctcctcctcaaggcgctcgaggtcgccggcgacggccgcatctggctccccgtccccatctccctgctcctcctctccgcgtcccccgccaacgcgtccggggcggcctccccgctgctggcaggccttgttgccggcctcgtgctggacctcatcctcgttggcctcgtcaaggtcttcgtccgccgcccgcgcccggcctacaacgccaaggacatgtacgtggccgtcagcgctgaccactggtctttccccagcggccactcttcccgcgccttcctcgtggcctccttcctcgccgccggcggcttccgtccccgtgaggcgctcttcctctgggccgccgcaacgtcggcgtccagggtgctccttgggcggcactacgtcctcgacgtcgtcgctggggcttgcctcggcgtgttcgaggcctggctcagcatcttgctcttgggattcatgtgcgctcaaagcaccttccttgtatgctaatccttgttattgtagtaccacgaatccgccacattgtgatatacactgtgatacagcattgctgtctgtgaagttacaatttcggttagcatttcagtcatgtgctggtcttacgcaaacttatctgcgccctctgggctctagtaattgttttggtctcaatacaaagttgcgaaaaaaaaaaaaaaaaagcggcctcact

SEQ ID NO: 60184 - DNA, 328 bp, Zea mays
  Clone ID: MRT4577_154890C.1
gccaagataggagtttctcatgttcatttggataaggagaaaattactagagcttctcgggtccattttttgcaaagataggaatttctcatatccattttctgtgatattcgttctgttatatagaaaatagtttgccaccattttctgcggtcacttatgcacagatcagagtgccccttgtgttacttctggttggttcatcaaaaaatttctttatctttgctttgctaagtatcatacttaatatatatctggagattcccaattttgctcaaaatggcactggtactagaatttgcatgtgcatgtatcaatgtatagtaaa

SEQ ID NO: 60185 - DNA, 2082 bp, Zea mays
  unsure (1)..(2082): unsure at all n locations
  Clone ID: MRT4577_154891C.1
aattcggcacgaggcatccgcacgctgccgctacggagtacggacagccagagccgaaaaaccgcagcagcgcttacagtcacgggcgcccacctgggcaggacaggagtacaggacactgccattgcccttccccgccgcgcccccccccccaagaccccagtactccactaacactcatcagcgcgccgcggggcgcgggcggacgtgcggcgctcctcggacggccgcgatggcggaagtggcggcgcggcgcgccgtcggcgtcccagcagggggcggcggcgaccaggcgaaccttgcggcggtggcggcggctatgcgggggcgcggcgaggtggacacgtcgtcgccgttccagtcagtgcgccaggccgtcgacctgttcggcggcggggctgccgccgtctcccagtggcgccacccgcaggctccgccgcgcgtccacctccgcccagaggaagaagaacttatgaaagttgaggaacaaacagtgaagctggagatggaactgttcgttaaggaaaaggaaacatttaaggtcttgaaggaactacaggaaacaaagcaggttatagatggcttgaaaatacaaatagagaaggtaacatgggaggacacaaatgctgcaaaaggccatgctgatacagggatggtacatccacttcctgctgtcgaacaaaataccgagccaccagtccagagcgcaaaaggtacacagtccccactaaccacgttgatcaagctcaatcaggcaaaagcattccttaacacggataccgtcaacatgctaaagagccagatacagaaggagaaaggctcgcttgagaaaacccgcgaaaggttacaattcaacctggggaaggcttcatcgttagaagcagatttgacgaaaactgtcgcacggctgcaagcagcaaaagctccacagcctgtccttgagccttctgaaatctggttgcagatgaagcacctgaatgctgacaaggcgaggcacaagaaggcgtcagaggatttgaggaacgagatctgtgagctgacagctgcaatcgagcacacgaggtctaagacgaagactctgcagttcagaatcctcatggctgagaaactgaaggaagcttcccaacgtggagaatctgttgctcttgcagagatggaaaaactgagcaacgggcgggacccgaacggcagtacttctgatgctgtcacactctccgttgaggagcactccacgctcgtgctcaaagcgcaagaagcggatggtgccgccaggaagaaagtggacgcggcaatgcaagggctcgatcaagcaaaccggtgtaagctcgaactcttggaaagagtagaggaagcaatggcggctgtcgagacgagcaggaaggctctggaggaggcccagaggagggaggagtcagagaccaaggcaaagctagtagccgaagagacgctccgaaagctgcggtcggaccaaataatccagaactggcgcccgaccaacagcagctccgtaaaattcaagaacacggcgctgctggcgccccggagagcagcagcgggcgctgggatatacgacgtgaacggcctgagcctggtggccgccgggccgaacagcgtgaagacggtgtccatcgggcagatcctgagcatgaagctggaccgcgagctcgagatgacgaggacgaccacgacgagcgcgaggaagaagaaggtctctctcgggcagatcctgagccagaagtacgagatgttctccccgctgcggatcgaccacgactgtgcctcgcacaggcagttccagcagccgaggaggaagaggatgggcttcgtcgtgtacgcgctgctgctcgcgcggcagaggcataggaggcggaaggctgcctcctgcactcgtggtggcttgagctagctagctagtttggatggtcggtgggtgctcagccgcgtcgtagtcgtttatatgcttttattaagagataagcgatcggaataatcgttatatttgtaatatagctagttctatgaacaaaaagttggtatttttagcagctcacaaacaaaaaaaaaaaaaaagggttagcgttn

SEQ ID NO: 60186 - DNA, 375 bp, Zea mays
  Clone ID: MRT4577_154892C.1
ggaatacgcggcgcgagccacgcgtgcgcggcattcaccgcgtgcaacatttgtttgcgtcaagaaagcttcgtatatatggcaagcgccttgatctgatacactgatctgcatgcgcatctgctaacccagcttcacggagacactatgggatctcgaatgccttagctttacgctatgatgatatgcctgatgtataggacgacaccctatctgacaaacaaagcttggctaaacgagtggtctccaatgctatagacgagtttgatacttcaagctatggcgataattatgcccaaaaggaggcagatgctgccatcaagaaagcattcccagctagtgcttaaggccaaccgaaagaggtgactgatgcag

SEQ ID NO: 60187 - DNA, 398 bp, Zea mays
  Clone ID: MRT4577_154893C.1
gggggagtggcaaaacagcaaatttctcgattattgagattagtcttccgatgctatgcacccaactggataagatagttcagaactcaatttgatacaccaagctactcccaaaccattaccaccataggattcaattttcatggtttaagactcagacggcttcccagtcactgcagctgcaggagcaggactcatcttgggggccgtccacgcccacgcttgacatgtacagcactggcatcaacaacaacgtctcgagctgcagcaggttcacctctgggatcttccacggcgaccttggccttcttgggcgggcgcccacggccacgtgggctgagcatgccgctggtggcctggtcagtggccacattgatggggtccttgagctttggggg

SEQ ID NO: 60188 - DNA, 839 bp, Zea mays
  unsure (1)..(839): unsure at all n locations
  Clone ID: MRT4577_154894C.1
gccgcgaggccggcctggcagtcatcaccattacaaggtagaggcgtccgaggcctcgccataattccaacccactgtgtgtgccgctgtagcagcgcagcgcagcgcgcgcgccaccaccgtcaacctcctgatctccccgcctcgccgccgtcgattcttcgccgtcttcctggggctcgggggcagccggagcaagcttgggggggtggtgtcctcggaccgacgacagagtcgttgcccgcgaagatgccggccctggtgtacattcctactccgctttgcccggtgccagagcgtttctcccggagtagcggttgcgccgcctcatgatctgccaattggaacccctgggcgtgcgcagaggaggttgctctgcagctggacagtgatcgcgtttggtgggtgtggcggcggtggaggaagacgacacgacgaagacgaggaggtcaggaggccatgaaggaggcgggcgaggagaggtgccttgacccgcagctgtggcacgcgtgcgccggcggcatggtgcagatgccccccgtgcgctcccgtgtctactacttcccgcagggccacgcggaacacgcgcacggcggcggcggcgccacggacctcgccggggcgcgggcgcgaccgctcccgccgctcgtgctctgcaccgtcgccgaggtgcgcttcctggccgatccggagaccgacgaggtcttcgccaagatccgcctcgtgccggccgcgcccggcgaggtggagttcggagagccccgcgagttcggcatcgaccccgaggacgcccgggagaagctgtcctccttcgncagacgctcacgcagtccgacgcc

SEQ ID NO: 60189 - DNA, 351 bp, Zea mays
  unsure (1)..(351): unsure at all n locations
  Clone ID: MRT4577_154895C.1
ggatgttctagttcagcgcagcgacgccnannccgcctgaggttacgaaccgttgctgcatgagcnccancgcgatggcttccttcaccatcaccggtctgaagatcaccatcacgggggtggccaccgtgagcgctatcactgtgccggccatgatcatccctgacagcaccatcatcgacccgccgaaggtctcggccgtcgcggcctttagcgccgtcatcatggcgccctgcttctgctgctgctgcacctttccgtgcatgccgtaggcatgatttatattatcttctttcacttttcctacttttatttctcttcttttttctatttttttactatttttttttt

SEQ ID NO: 60190 - DNA, 747 bp, Zea mays
  Clone ID: MRT4577_154896C.1
gccgggcggttcacttgaagagctcatttattctaggcaaatatataaacagcagctttccaacattgcagtctctggaaaaatagagaggcgttactttgaaggatgacaagaaatttcaaggtgagctctttgggatctgcaatcttttccgtgacttgtccgataagctttttactagtgagattattgagatgcatggagaacatggcaagagtagtgcaacagaagcaacagggataagagaaatagtcgatactgatttatttggttcacaagagaataggaagtcttccacagcaacaacacatacggatgatcagaaattggttgattttgggatagtttatgcccaccgcaacgaggatgtcgtgaacatgaggacagacggaagagagaaaggtggagcagacgagactgtccagagctccttagaggagctgcttagtaagaatgaaacaaagcacactgccatggaaaaatcttattcatcggaggagaaaagggaagtggcaagatcttattcactggagcagaaaaagaaagagtttagctgcatcgcatccttcatgggtatggatgaccttgaatttagcaagtggttgctatcagcctcaccgcaccagcggtctgaagtgctgcaggactacaggaggaagaagaaaaatcagaaatgatgatgcaggtcctcggagctaaccggctaccgcaaagctttgacgtagtgattagcttggggagctaatt

SEQ ID NO: 60191 - DNA, 438 bp, Zea mays
  unsure (1)..(438): unsure at all n locations
  Clone ID: MRT4577_154897C.1
ctctttttttttttttgcagaggaacgggcgcgctagctgcagttcctatatttggtgaatgaacacgtctccgttgttgattatacatgctttggaagagttacgcgncaatttgctggatctttacacagaaagggtgaaaaaagngaagagatcattctcagattacaattgcatggggggaggccgtcgctagtattgtacatgcatgtggacaccagagagaccacgatgctgcccatcatcgtctccggccgtcaccctttacccttccagagtccttcagtgcgcagcatgccgcggtgaacgatgaaccgcgccgagagggagagagagagcgagagagagagagacgcacgcctaggtctcattaactctgggtggccgtgcgtcgccctgcgggggattgcgccgcggatgaggttccctcccgttcc

SEQ ID NO: 60192 - DNA, 2522 bp, Zea mays
  Clone ID: MRT4577_154898C.1
ccagtcgtccgcctgttttctgcaagcaagcgcaagacagatcatttcggtatggacagagacggcatgttacagtatttcgcctactaggagtaaggatgtccgctgtagctgtggaagtcctttacctatggttgaatgttgcaagagaactgacagtctcggtgttatatggtcttatcttcactgagagaaccctgaaggctgttctatatgccccttctgtcttgttcttcctttcctcgtcaagcttcagcagcttagcaaccatctggagctgataaaacctaatccaaaggatgagcttgaaaagcagaagaaagatgctgaacttgcagctgctgtctttggtgcagatattgacttagttggtggtactgctgaaagttagaacttcatgggtctcagtgatgctgaaaaatgtggaaggatgtgagcaagattatgcctaccgtcactatggactcgacagcatgagaacagacttatttgaagaaggtgtatcagaatgcttgacatactactacaaggttgtcataaggaaaagagattacttttaacgcatcgatggagcaaatgcgttgacttcacgccagtcaagtggtgtgctagcagccccgaagccctagcaaacaggttttccttatatctactcgagcaggtaatttaggtgtaaaccttgttagtgctaaccgcgtggtgatatttgatccaagttggaaccctgcccaagacttgcaagcacaagacagatcatttcggtatggacagagacggcatgttacagtatttcgcctacttggtgccggttcacttgaagagctcatttattctaggcaaatatataaacagcagctttccaacattgcagtctctggaaaaatagagaggcgttactttgaaggtgtgcaggaactagatcccaagtgttattttttcatcagcgcatcaaattcagcattgatggcgttcttccaaagttccaattgtcgtcacctagagcttcagacatgtcttgaggttcaccggtggtggtaaaacaaccatatttaatgagtaatttttccatcttgtgatcttgtccgaggacgctggtctatgtaaatagtgagaacgggaggtcggtggggtgatggagttgttggtcctgatgaaaccgtgcactgatgtcgagtcatctgaaggttctgttgcactactttctgctacttaagggaccggtagagctcgatgatgttgctgcattgtgatcaggcgcatcagagacatgatctacacgcagtgctggtctggttgctgtatctacgcaccaccctcctgaacttgggtagagcttgtacaacatcttctagcctatcaccaataacacttcatgattttcattagtagtattgtcatatgaatcattagacaacgagttcccatgttgtcaaagttcgatgaaggtaaaagggtgcaagacaacatattgatttggcccttagtctagcatcaacattagggtgaagcccaacaaatggaaaaacttcttcatcatatcctaccaaaatgatgacaagaaatttcaaggtgagctctttgggatctgcaatcttttccgtgacttgtccgataagctttttactagtgagattattgagatgcatggagaacatggcaagagtagtgcaacagaagcaacagggataagagaaatagtcgatactgatttatttggttcacaagagaataggaagtcttccacagcaacaacacatacggatgatcagaaattggttgattttgggatagtttatgcccaccgcaacgaggatgtcgtgaacatgaggacagacggaagagagaaaggtggagcagacgagactgtccagagctccttagaggagctgcttagtaagaatgaaacaaagcacactgccatggaaaaatcttattcatcggaggagaaaagggaagtggcaagatcttattcactggagcagaaaaagaaagagtttagctgcatcgcatccttcatgggtatggatgaccttgaatttagcaagtggttgctatcagcctcaccgcaccagcggtctgaagtgctgcaggactacaggaggaagaagaaaaatcagaaatgatgatgcaggtcctcggagctaaccggctaccgcaaagctttgacgtagtgattagcttgtgtagctaattgtggtagttatgacaagggaatggtagtaaaattgacccgtggcaccgatcagtatgtatgtctgcagccccgcttattttgaaccttatattggtgcaaactgagctcagcaaggccttggtcactctccctggccgttttttttcggtcaggtgaaatataatctgtattgtgtctgttagttcctgttcaacagtctaagcctttgtgtagcgagtcttatcatgttaggtggcttgcaatgttaccttggtctgtactaatcatttggatatcgtagtcttctccgtactaaaatataattcgttttagattaaaaaaacccaaa

SEQ ID NO: 60193 - DNA, 160 bp, Zea mays
  unsure (1)..(160): unsure at all n locations
  Clone ID: MRT4577_154899C.1
aaattatgctttacattgtaatatattgagagttaactatagatcattgttgggagancacaaaactgaacaatgatctatagttaaatctcaatacataaatcatgctntacattgtaatctatcgaaatctggttccatgattcgccctccctctcca

SEQ ID NO: 60194 - DNA, 786 bp, Zea mays
  unsure (1)..(786): unsure at all n locations
  Clone ID: MRT4577_15489C.1
ccggccgacggagcttgttgagagacccgctgaaaagctcaaaccctcctcacttccacgcctctctcctccctttcacacttagctccccatgtcttctggaggaggagaccaccatggcgtctaccaccagcagcacggccacggccacggccatctcgcccgcgctgacggcgccgagtacgcgttccacggcaacgacgacatggagagcttcttcttcaaccatccggcgtcggcgggcctcgacggaggaggcagcaggacgactggcgccgacgagctcctggcgccgtactccagcatcacggactacctgcaggggctcctggacccctccgggctagctcggcacctcgacgccccgctcaagcacgagctgtctgtcgacgcgagccacgacagccagggcaccagcggcgcgcccggcggtgaagcggcggcgatgcacacgccganactcgtcggtgtctctctcgtcgagcgaccgggacggggagggccagcagcctcgtcggtgcaagaagggcaggaccaacaaggcggaggacgcggagggggatgagaaagatcagcaggatgggggagaattccaccaaagcgaacaaatccaagaagaaggctgagaagaggcagaggcagccgcgcgttgccttcctcaccaagagcgagggtggatcaccttgaggacggctatcggtggcgcanatacggccagaagggcggtcaagaacagtccttacccaaggagctactaccggtgcactacgcccaagtgcggcgtga

SEQ ID NO: 60195 - DNA, 865 bp, Zea mays
  unsure (1)..(865): unsure at all n locations
  Clone ID: MRT4577_1548C.1
aaaaaaaaaaaaaaaaaaaaaaaaaaaattgctgcagtgtggtgtggacagatcgcctccacgaacaaaccacacaccccacctaccccggccggaccggcaggcagcacaacatggacctcgccctcctagagaaggccctgctgggcctgttcgccgcggctgtggtggccatcgccgtggccaagctgaccggcaagcggtaccgcctcccaccggggcccccgggcgcccccgtggtgggaaactggctgcaggtgggcgacgacctgaaccaccgcaacctgatggccatggcgaagcggttcggcgacatcttcctgctgcgcatgggcgtgcgcaacctggtggtggtgtcgaccccggagctggccaaggaggtgctccacacgcagggcgtggagttcggctcccgcacccgcaacgtggtgttcgacatcttcacgggcaaggggcaggacatggtgttcacggtgtacggcgaccactggcgcaagatgcggcgcatcatgaccgtccccttcttcaccaacaaggtggtggcccaaaaccgcgccgggtgggaggaggaggcccggctggtggtggaggacgtgaggaaggaccccgaggccgcggnnccggcggcgtcgtgctccgccgccgcctccagctgatgatgtacaacgacatgttccgcatcatgttcgaccgccggttcgacagcgagcacgacccgctcttcacaagctcaaggcgctcaacgcggagcgcagccgcctgtcgcagagcttcgagtacaactacggcgacttcatccccgtgctccgccccttcctccgcggntacctcaaccgctgccacgacctcaagacgcgccgcatga

SEQ ID NO: 60196 - DNA, 474 bp, Zea mays
  Clone ID: MRT4577_154900C.1
ttttaaccgtacatgactgttgtgagaatgaggggctctaaagagctggtgcgggtactacatggaacgaggactcgcatgaactggtatgcgagagcctggttgtggactctccaaaaggttccccctggacaagaacataacagccaaatatggtagtgattggctagatgccaaggcgacatgttttggcaagccgacaggtgccggccctgacgacaacggaggaggctgtgagtacaaggacgtgaacaaggcccctttcaacagcatgggcgcgtgaggcaacggacccattttcaaggatggcctatgttgaggatcctgattagagatcaattgtgacaagccagaagagtgctttgggcagaccattgtggtgtacattactgacatgaactacgagcccattgcggcgtaccacttcgaactatcggacaccgagttcggtgccatggacaagaatgttgagga

SEQ ID NO: 60197 - DNA, 359 bp, Zea mays
  Clone ID: MRT4577_154901C.1
catcaatcaggccattcggggcgggttgattagcaaactacaggcgttacataaaaataatatgtccaactatgtcattcaaacagcatttcaacagacattgtactccaaatgtgcgtaataccgaatcattccaaacattcaagtccccctttatatcgaaaccttcactctagcaaatcccacaaacagaattttaaaaggtccccacctttgcctgggtagcattttttattgttgctcaaaaaaggatccattccccctttgcgaggtcttatcagcttccttattcccatcttggcgacagcataaccagagattccttccatgctttaagggccccccccctcccaattgcc

SEQ ID NO: 60198 - DNA, 114 bp, Zea mays
  Clone ID: MRT4577_154902C.1
attcggctcgagccccagcactggcccacgtgtttggaaacccgaaccgcgaaaacggctaagtgggatcttgcctacccgtgggcgagcagccggagagcgacgaccaagcgg

SEQ ID NO: 60199 - DNA, 773 bp, Zea mays
  Clone ID: MRT4577_154903C.1
gtacagcctgcaggttccggtccggaattcccgggtcgacccacgcgtccgagcaagttgagactgggtcccactctgtagctccggctgctgtggaatttacagcatagcccagaactcgaggcgtctgcttaacccggcttctcaaatgttggcctataggaagtttggtgagcggcctccacccaaacgactcactagggaagctatgcgaaattatttaaaagaacgaggggatcaaacagtgctcattcttcatgcaaaagttgcacagaagtcttacggaaatgaaaaacgatttttttgccctcctccttgtgtgtatcttatgggcagtggttggaagaaaaaaaaagagcaaatggaacgagatggatgttctgaacaagagtctcaaccctgtgcgtttattggaataggaaacagtgaccaagaaatgcagcagctgaacttggaagggaagaactactgtacagccaaaacattgtacatatctgattcagacaagagaaaacatttcatgttgtctgtaaagatgttctatggcaacagcgatgacattggtgtgttcctcagcaagcggataaaggtcatctccaaaccctccaaaaagaagcagtcactgaagaatgctgacttgtgcattgcttcaggaacgaaggtggcactgttcaatcgccgttcgtcccagacagttagtaccaggtacctgcatgtagaaggagggaatttccacgccagttcacaacagtggggagcattgtacatccatc

SEQ ID NO: 60200 - DNA, 1256 bp, Zea mays
  Clone ID: MRT4577_154904C.1
cttccccaacagtggcatcctcgctgaccaaggtgtcgccggcaaaggcgtccccatcggcggcatcgacggcctcagctcagaggcggcgatgttcgacgtggagtacgggcggtggcaggaggagcactaccggctgatgtacgagcttcgggcggcgctgcagcagcacctgccggagggggagctgcagatgtacgtggagagctgcctggcgcaccacgacgagatggtgggcatcaaggagggcgccatcaagggcgacgtcttccacctcatctccggcgtctggcggagccccgccgagcgctgcttcctctggctcggcggcttccgcccctccgaagtcatcaagatgctgctgagccacgtagagcccctgaccgaacagcagatcgtgggcgtgtacgggctgcagcagtcggcgctggagacggaggaagcgctgagccagggcctggaggcgctctaccagtcgctgtctgacaccgtggtctccgacgcgctcagctgcccctcgaacgtctccaactacatgggtcagatggccgtcgccatgaacaagctctccacgctcgagggcttcgtcagacaagctgagaaccttcggcagcagacgctgcaccggctgcaccaggtcctgacgacgcggcagatggcgcggtcgctgctggccgtgtcggactacttccaccgcctccgcacgctgagctcgctctgggtcacacgccccagggcaccgcaggagcaataatagggccacagctggtgacggcggcgctgatgaatggtgatcgccggccgccgcatacaacggcgccacacgcgcatgtgtccattcatgcatatatgagtcgtgcatgggcgcatgcatggtgtgtcgttcgtcatcaagaacagagcttgcaggtagagccagttagggccggccgggggagagagagctagtgaggacgacaaaccaaccaaaggataatgttaatcttggcgacgattgtcgtgttgcttgctttgtagctatagctaggtgtagttgatcgttcgatcgcgatctatcgatcgatcggctgctgctgtagtcgatgcggtggagtgatgatgttgttctaagttaattatctctcatgatcaccggacgcatatgcttcgtagtcgtttaatttggagacgtgtgtggggttttaggcaaccgtcataaatctttgatagcatgtaacacatgctaatataagcttgctttgatgctagaagtcaag

SEQ ID NO: 60201 - DNA, 476 bp, Zea mays
  Clone ID: MRT4577_154905C.1
ggggactgggctaccaccactggtttactggtaaccaggatacatacaccggtttttaaacaaaggggaatgaagctccacacatttaaaccgggaaaatggcgccccctaattaatggtgaacagcaggggattcatactgatccacttttggactaaaacgggggggggtacaagggtcacgaattactggattcccaacaagctgcagggcctgatcgatcgacgggcggccggctaggtaaaggatgtcggtttcaacctccggggacggggactttgggctccggggccggggccggggcctttcttgcctgatcgggcgcgggcacgggcgccctccaattttccaccttgaacaaggccctcgtcgtcaagcccccttttgccgccgccgaccttggatgctgggtgccactggacccgtcgtccatgtccccgctggaaatggggaacccgacgggggccggggggac

SEQ ID NO: 60202 - DNA, 354 bp, Zea mays
  Clone ID: MRT4577_154906C.1
cattctttcgttgactcttggtttgattttttttttttttgttttttttttttttttcccaaaagggaatttctttttctgattacttccggatttaggcgtttttttagtgagtcctggtaaagctcccaaacggggttttttttttaaacgaggccctcgattacgggacatgaaaactccttttttattttattgaaatttcattttacacaataaatttcgttctattttcattacaaaatcacagcgatattcaaacagatttaaactaagggatgaaccgagtaaatttttctaatgttccccaaaaaatggagtaacacaaaaaatggattttcacccacgcttccg

SEQ ID NO: 60203 - DNA, 447 bp, Zea mays
  Clone ID: MRT4577_154907C.1
gcatgactcccgaccgccatgggcgcgggatacatgttcatggctggtctcgggctgctggttgtcgttggccttcatcagctcctggaatctagaaagcgcaagaggcccattcagaaggtagagatgggaacctcgagtcaaaacgacgtcgacatgagctggattcctcaggaaactctgaaccagatcaataaagcttcaccaagaaggttgcccaggaaacgggcacagaagagatcagtgggatctgatgagtaaatgttcctttgtgcaacaattcggtctttacttaacccgccctaatgtttttcggcctgatgggaattagtgcagagaagccatatcaccatagaaggcggctactacttatgtgtggactgagcaatccgagtctgtggcgatcatattgctgaaaatgcactgcatttatttttctaaagtaac

SEQ ID NO: 60204 - DNA, 269 bp, Zea mays
  Clone ID: MRT4577_154908C.1
gcgtcggcattctcttcaactgctaagcactttctcgtcgatacgatacactccaagagaaggcgagatacaactatggactccaccggcaccgcatcaaggggtaaggtgaagaagggatcggcaggacgcaaggtaagcaggtcaatgaacaagtcaatatcctggttcgcgaaggccagcttacaattccgaataagtcgtataaggcgctacttgaagaagggcagctacacgcagcgtatcagaacggacgcaagggtgtacct

SEQ ID NO: 60205 - DNA, 647 bp, Zea mays
  Clone ID: MRT4577_154909C.1
gtaccactcgggtcctttcctgttgggctacgtgatctatgattgcacacactactacctgcatcatggccagccatcatcagatcctgcaaagtatctcaagaagtaccatctcaaccatcacttcagaattcaaacaaagggctttggaataacttcgaccctgtgggatcatgtatttggcacgctgccttctacgaaaactgtcgacaagagcatttgattttgactggatcttctgctttgcaaagctcttatagtgagattggtcatcatcggtggaggttctgttggacaaatttctatccagtttctgattcttctccatggaccaactgtatgaaggcgatcaccagttgctgggtcacagacgcgactgaagcgatcaccagtttggtttcaagtcaatcccatcagcggtcgtgttcacattatgtctagctagtgccagctgctagatcagcatgtaatgtatgtacagtattttcttctctagtaccgtagcctctgcagggttgtttggtagcctgtgtctgcttaattttgctacaagtaattgcttgacaggttgaactttccccgttatatttctatatataagccagggtttgtcatgtgaatatggatagcctactattgtcctccct

SEQ ID NO: 60206 - DNA, 450 bp, Zea mays
  Clone ID: MRT4577_15490C.1
cttgcctcccttccttccccccatttttttcctttttttcaaccaaagggggtatcgcaacgggggttttgtcccccccccgcagagatttggaacaaaatcgttctcaaacaaagccagactaccatggtgcggccccccctttgtgggggggacagaaaaaaaccccccctccgtggcacctcgcctccctgtatccggggggggggaaaacaacaagccgagcggccccccatgcggggggacctgcttctcgaaaaaccaaaaaaaaaaaacattttgtgccggggcggcgcttttcaccggaaaaccaaagcacaacccgggtgggccaccgctcttggagggcttccccccgcgggccagggaccctgggtatgttttcttgccgttctcatcaggcccccccttttggggcggcgcgttcgcttccccaaagggggggggggg

SEQ ID NO: 60207 - DNA, 370 bp, Zea mays
  Clone ID: MRT4577_154910C.1
tttttctttttttgttgttttttttttttgaagggcaagggtgttgttcaactaacttcacattgcccttagggggccagggtaatcctgcgctgaccgtgaactaacaggttccaatattttagagcaccacatgataagggtgatggcccactatgcaaacttatagaccgctcatttaccctagggggaaagggccctctattatgcatgccttgaacaacaaactttgggtggccctattttcccgccggtcttaaaatcttacatgagtcttcacggttctttggagcgctccctaaaggatgttttaagccctcccatttgattagcgagccaaaaaggaaattctgcatgagcggttcttttt

SEQ ID NO: 60208 - DNA, 1567 bp, Zea mays
  Clone ID: MRT4577_154911C.1
ggtccccggaattcccggcgggtgagcaacagggaggaaatctatacaaagcagtggaactgcgaactcgtcgccgtcgtgttcacaaagccggcgccttttgctccccgatctcagttcccgcccatctctaagctcccaaggcgacgctgcggcggcggggcaagcgggaggacaagaagcggacttgtctccctgcccccaccccctccctcgcttcgcgcgtacccccttcagttcagccgggcggtaccgtcgacggcgccggcattgtacttctgctgcgcagctatcactgctctgagaaaatggttgcatcagcctttactgttgatttggacaagcctctagtattccaggttggccatctagaggagcagtatcaggagtgggttcaccagccgattgtttgcaaggaagggccacgattttttgaaaatgatatattggagttcttaacacgcacgaaatggtgggcagttcctcttatctggttgcctattgtatgttggtgcctgagtacttctatcaagatgggcaatactatcacagatgtagctatgatgattgggtttggaatatttctgtggacactgatcgaatatgtgttacaccgattcttgttccacataaaaaccaaaagttactggggaaacacagcacattatcttcttcatggatgtcatcacaagcatccgatggatggacttcgacttgtctttccaccagctgccgcagctattttgtgctttccgttctggaacatgatcaagctattttcgaccccgtctacaactcctggtctgtttggaggcggcctgttgggctacgtgatctatgattgcacacactactacctgcatcatggccagccatcatcagatcctgcaaagtatctcaagaagtaccatctcaaccatcacttcagaattcaaacaaagggctttggaataacttcgaccctgtgggatcacgtatttggcacgctgccttctacgaaaactgtcgacaagagcatttgattttgactggatcttctgctttgcgaagctcttatagtgatgttaggctttgctcgcattgcctgtgtccactttttgaggccagcttccctgttccatcatgtagatttggctttggcagtgtctctatttttttttatctctagcagaggactttaaaatcatcaattacagattggtcatcatcggtggaggttctgttggacaaatttctatccagtttctgattcttctccatggaccaactgtatgaaggcgatcaccagttgctggctcacagacgcgactgaagcgatcaccagtttggtttcaagtcaatgccatcagcggtcgtgttcacattatgtctagctagtgccagctgttagatcagcatgtaatgtatgtacagtgttttcttctctagtagcgtagcctctctgcaagggctgtttggtagcctgtgtctgcttaattttgctacaagtaattgcttgacaggttgaactttccccgttatatctctactaactattaagagtaaaaaaaaaaaaaaaaaagcggcc

SEQ ID NO: 60209 - DNA, 400 bp, Zea mays
  Clone ID: MRT4577_154912C.1
ccgactcgtacgtcatgcaacaaaaccctttaatgatggaaagtacctcccggttcaggtgggacctataaactggttattttttcgcgactacaggaaggtgtggaagtacttcacgaagttgattgcttagcaactggaagatatgctatcattgatgcactaaggtggaacgttggaattatcgatgccacatacagcacacgaataccgaagaacatgctgatgaaaatggctgaaggaaaatgtcagatcatatttctgtgaacactatgtaatgaccaacatgttcttgagagaactatacaatcgaaagttcaacaaagacctgactatgcatagcatacagaatatgaagctggcgtacaagatttcaaataccgattggcctattatgaaa

SEQ ID NO: 60210 - DNA, 816 bp, Zea mays
  Clone ID: MRT4577_154913C.1
tttcctcatcctcctcctcccccccgcgccgtgcgaactccgcttccaggtttccggcgtcgcctggccgccttccttaccggcgcgcagctttggatccgtaccgtcgtccctccttccgtcggccgccttttattgcacagcacacccacgttgatgcgcgttcctcccactttcgtggctgccttgcttgcctggtgcctgctcgttcgcggctggcgtcgtccgctcctcacgatcgggtaagcggcggcgacgcctctcgctcgtctatgttgatgattgtgaggaagggtcgtctttgttgaatgttgatgattgtgaggagggggcgaaggccaattcctgtttggatttgggcaccggttggttggttacgttttgcgtcgcgtcgtcagggacgacggggtgtgtgtgtgtaactgtgtatagtgggatttgaattccggctccgcgtcatgcttcccgcagattcgcgtttctcgcgtgcccgtaccgccctgccgcgccgctcgcccgcccgcccttttctttttcttgacctttctctatttccacattatgctatggtgatgcttcccgcacgtctctgtttttttccacgccgaagtccggatccggcacggttcgtcgcgcttcgatccgaaactcctctgttcgtagacgtagcttgtggcttttgaccgcttttcttttctggcgacttcaatttcaataaaattcatccacgtttctttctttctcgttgaccagcgaattgatctctgacgtctgctggctctgctttccaaatggcttgttccatcatccaatctg

SEQ ID NO: 60211 - DNA, 504 bp, Zea mays
  Clone ID: MRT4577_154914C.1
ggttgtggggggttttttttttttttttttttttttttttttttgagcggggaaaaaaaaactatgtttcagttaaatcgaaatcttacaagagtgttctatcaattgaatacaacccgcatattttagtaaactatcctttttcaggggcagcggggtgctgtccatgccgatttgtcccatttccttcagaactctttgcaaagctttccttcaacgatcttcacaggagtcccgaatgggctctgtttggttggttgaagctcggcctcccgctcaatagttgcgtttggggggatttcctggacacccttctttccatacgccagttcggggggaactattatcaacctttggcctccggcttttattccctcggccccaagatccaattcttttaaaacattgcccctctcagaattgcctgcggcaaacccatatggcgttccaccccctacaccaagaccctgccttcttgtcgtgggtggggtgcccttctccttg

SEQ ID NO: 60212 - DNA, 176 bp, Zea mays
  unsure (1)..(176): unsure at all n locations
  Clone ID: MRT4577_154915C.1
aacagcgagaagcaaaatggagcagaatatagatgaccanaaaccactttttatcaagctagcatccaccacacggtacggccacggttgatcacatccccataggcagcaaatctcaagcaatgcaagaacagccgccgctgtacagtgtgcggcacagaggaagcagagccgtt

SEQ ID NO: 60213 - DNA, 992 bp, Zea mays
  unsure (1)..(992): unsure at all n locations
  Clone ID: MRT4577_154916C.1
cgcccgtgcgcgcatcgagtgctgattccttcgcatatccccaaagcaagctcgagtgaagaaactcacgaaatctgaagccagctgagagaggcggatggggcagtgcccgtgtttcgggtccgcgaaggcggcggagcaggagcggcgggcggaggcggaccggcgcgagtcgcaggatgctcgcgccaaggccgccgaggccgcgcagaggagacagcaggagtatgagaaatcggcagctggaagggcagccaaagcacagatgaaagcaatgaaggaatcaaagacatcaaaccaaggtggagagccggttcttaagtggcagatgggatcatgagtttcgtttctgttgatttgcatccctccgcttacttttgatggccgacagaaaattgattgcgactaatttctgataggatgcactgtgattgtgtgattatgccagtgaagtgtacatccggtttaccatctgctatgctgtacatgctatcccatagactgcccaacttcccagttaaaagtcacaagtttgtgtttgtaagtgaacaaaatatatattttatgaacacatgtagtctcgtagcatttgcatggaggcttttaccccacttcatagtatttttcaaagccatgtttcatagtgcgactacagtactgaattctgctgcagccttctttttttcccttcacatcatcaagcatccccatggagattctcatatgtaccatgttctgttagctgatagcttatcaagctttggtatatgaaatgctgaacactcgttgcactttacatggattttaatttgagtgtactccatagttcctgacaagttttcaagcacgtaggtatgaacaatcatactcatctgcttcttatgcatgcggtctctggtagactggtatcttatgtgaacctgtctgaggcaaaattgtgtatctaagcatgtgttttcgntcttcttaatttacttgtattgggcatgctg

SEQ ID NO: 60214 - DNA, 315 bp, Zea mays
  Clone ID: MRT4577_154917C.1
aacttcccgggcggccggcccaaagggccaattccaaagcacaggcccaccacactaggggaccccacctggggacccaacctggggacaaaacggggaaaaatcatgcccgtgggaaattgctgtgcgaaaacaattccacgcacacatacccacccaaaacataaaccggaaaccccggggggccaaacgggggggccaaatgagagtaattacgtagagttaactggccgctttccatgccggaaacccaaccggccaacctgcttaaccaaatggccaaaccacagggacaagccgcttggagattgggcc

SEQ ID NO: 60215 - DNA, 179 bp, Zea mays
  Clone ID: MRT4577_154918C.1
gagcttattattcggcggccgcccttgctacttgtgtttgtggggctagaccagccaaactagatgatctgccattacttacatgaagaactagggaaatgagtgagaaaactgatacagacaccgttcatgtacagtgtacagagactgaaactacacagggttggtagccaagatat

SEQ ID NO: 60216 - DNA, 340 bp, Zea mays
  unsure (1)..(340): unsure at all n locations
  Clone ID: MRT4577_154919C.1
gaacggaaggccgagccacgcgtacgcgtacgattaaatgtagatacttacactgcatttccaggagctaggccaacattgaccagggtgatcaattgtagattctgagaaacactcgacatcacggcattatgctctgaatttttaacacaataacgcgactcaaatgacacatccggtaaaaattgcgcacnnagacggaggcggcaacatcacagccgtgtaggtgaaagtaaagcaagcgcctcaagaaaaacccggggggcgcgtctctgggggcaaaggttgcttacccgtgcatgccctgcaatatgtcttttttagggtcccccaaattaaa

SEQ ID NO: 60217 - DNA, 296 bp, Zea mays
  Clone ID: MRT4577_15491C.1
attcggctcgagccgtatcgtccagcacactttattgaggccgcagtgtagtttttattacatccaggggtatttaaccggagcctgcagtagtaccgacatgctccttcaaaatgacgtattgagcgtactgatccaccgggtagtagacgcagcgtgccagtattcaatagccacggcctgctgcaatacactgaagtgaaactaacgtcctagcgtatggattccagaatgaagctacctacccaactaaaataaacagcactgccaccgcatgctaccacatcccagactat

SEQ ID NO: 60218 - DNA, 186 bp, Zea mays
  unsure (1)..(186): unsure at all n locations
  Clone ID: MRT4577_154920C.1
gtcggncggtttccaaatctcgaaaccctagtcccctgctctattctcagccgccgccaatcccttcccgtgctccgcaaccgctcgagtgagaacaatagatggccgtgcaagggcccatggcccgcgctatcggccctccatctcccccacgacacactctctgcgtcaccgccatgccagccc

SEQ ID NO: 60219 - DNA, 290 bp, Zea mays
  Clone ID: MRT4577_154921C.1
ggtggcttcataaaagctttaccggctctactgtcctaacgtacggattgctccatggtccaaaaacgcgacatcagctcaacaacagtttcaaagtgaggacatgcaccatttgttttttacacctgcaacggacgaacaggatacgtcctccacccttgtataccctacttttcgggacgtcatccccccaccggggactaatcaaaccggaatttggtgctgaagtactactgaaaggtatggcagctcctggctacacgatatattcacggcccactgactaaaaa

SEQ ID NO: 60220 - DNA, 488 bp, Zea mays
  Clone ID: MRT4577_154922C.1
cgcaaaagaattgcatgtcccaaaaaggggtgtccaaagggaaccaatggggttactcgacaagtccagttttaaaaggaccctagggcctttattaattcccatcccttttttttggggggggaggttttcacccctggcaacaaattgggcatggaaaggacctggaccaatgtttgccttggggggggccccaaaatttaaaccccaaaatttaaattcaacaccattgcctgttaaaaggcttgcaatcccaaacataggagcttatttgaaaaaccctcagggaataaataaaagggacccgaagggggccccaaagcttaaaagcccttccgaggaacaatcccagggcctgacttggaaaactcagcctttgagacccacatttgtgggaaggggctcaggggggcaaggatggatccccctatccaaaccctggatttcctctaagggggggccaccaccttgattttaaagccgtttgg

SEQ ID NO: 60221 - DNA, 248 bp, Zea mays
  Clone ID: MRT4577_154923C.1
ccacgcgtccgccacgcgttcgccatcgtccgctcatcatgcgtcgtaaacagtttgagcaagagggaatatgacttgatcaacctcttgttacctcttgtggcctgcgtgacatctgtgatgaaccttggcctttattacttggcaaaccgaggtgctattaatgaccgatcgtggaccgaatggggcgcccatcctgacacttcattgcaactgctgtttattcttttataataagacgcccgggc

SEQ ID NO: 60222 - DNA, 958 bp, Zea mays
  unsure (1)..(958): unsure at all n locations
  Clone ID: MRT4577_154924C.1
gaggtgcttgctctactgtgaatgaatgaagtttgtctaaaaaaaaaaaaaaaatggatggtggtggttctgttatttactagtcggtcaaaacactaaacggtggccatcatggctgtgtgatgtatcataactgttcagtaaatttgtgttcttctgcccggagttctgctcgatgctattgcgggcggcccgaggtgcttgctctactgtgaatgaatgaaatttgtcaaaaaaaaaaaaaaaaatggatggtggtggttctgttatttactagtcggtcaaaacactaaacggtggccatcatggctgtgtgatgtatcataactgttcagtaaatttgtgttcttctgcccggagttctgctcgatgctatcgcgggcggcccgaggtgcttgctctactgtgaatgaatgaagtttgtcaaaaaaaaaaaaaaaaaaaaaaaaaaattgacagaagagagagagcattgtgttcttctgcccggagttctgctcgatgctattgcgggcggcccgaggtgcttgctctactgtgaatgaatgaagtttgtcaaaaaaaaaaaaaaaaaaaaaaaaaattgacagaagagagtgagcattgtgttcttctgcccggagttctgctcgatgctattgcgggcggcccgaggtgcttgctctactgtgaatgaatgaagtttgtcaaaaaaaaaaaaaaaaaaaaaaaaaaanttgacagaagagagtgagcattgtgttcttctgcccggagttctgctcgatgctattgcgggcggcccgaggtgcttgctctactgtggatgaatgaagtttgtcaaaaacaaaaaaaaaaacaaaaacnnntaaaattgacagaagagagtgagctttgtgtttttctgcccggagttctgctcgatgctatagcgggcggcccgaggtgcttgctttactgttaatgaatgaagtttgcc

SEQ ID NO: 60223 - DNA, 420 bp, Zea mays
  unsure (1)..(420): unsure at all n locations
  Clone ID: MRT4577_154925C.1
atataaaaaaaaaaaaaaacaaagtgtacaagctttttttttttattaataattttttttttttttttttccttttttttttttttctgttttttgtatttttttcaacttgtgtcccttttcaccattttattaactggtggggggggggggcgactnnccctttttctcaacattctttccggggattttgcccattttatcatctggattacccttacattccacgccatgcctctttaggacgcaggaagtgttttctccactctgactcattgggaactcaccacatgtttcttcattttcttgcctttgcgtagtccatggagttcatcaagaagtttgcatcttccttctaaaagcacattggtggttttttttctgagacttttccatgtttaccttcctttccaactagta

SEQ ID NO: 60224 - DNA, 149 bp, Zea mays
  Clone ID: MRT4577_154926C.1
cgactcccggacgtaggtagtttgttgggccgggttctgaggccttgcttcactttagttttccactctatgcaacgatgaagcagtaccagacctgggaggagttcagccgtgatgcagagaagctttaactcgctgaccctatgaag

SEQ ID NO: 60225 - DNA, 286 bp, Zea mays
  unsure (1)..(286): unsure at all n locations
  Clone ID: MRT4577_154927C.1
cgcncnnagancaacctcgacctcgacctcgccgtcgccatggcgancnagcagacccgccgcctacttacgnaccttgccgccgtacgccgtatngcttacctacctacctacctacctacccagcctacctactgtcgccaccgaacgtcgattnctgacagtnngannggngtncccggtgnaggtgagcnnannggaaaatcgtgcccgataccggtcgagcccggcaagcctgccanttcnaagatcnccgcttctnnngntnaaaancntcgaaagggaa

SEQ ID NO: 60226 - DNA, 251 bp, Zea mays
  Clone ID: MRT4577_154928C.1
cacacccctggttccacccggaaattccaaaccgatccctgaaagcatacaatttttccttaaagggagtttttttaaaccttggcttaataatggtaataacttttccctgtaaaaaatttttttcccttaaaaattccaaaaaaaatacaacccgaaaccataaattgtaaaccccggggtccctaatgagggacctaactcaaattaatgggttaccctaactgccctttttcaaaaggaaaaacctt

SEQ ID NO: 60227 - DNA, 566 bp, Zea mays
  Clone ID: MRT4577_154929C.1
gctcggaattcggctcgaggacacggccatgttctacgggctcaagggcttcaacgaccacctgatgcagggggggccgtacgggaacgtgcagtcggaggtgctcatgcgcaaggacgccagcaccttcaccttcaggcagggctgggccttcccgcgcaaggtctacttcaacggcgacgagtgccagatgccgccgccggacgcctacccctacttgcccaactccgcgccgccgacagccgcggcgtcgctgggcggcgcagcggcagcggccgtcgtggtgctcttgggcatgatcgtggcatgagaaaacacgggacatcgatcgacctagtgctaggaccggcacaggggaatggaaaaaagacgttgctttcttctgtagatagagagaccagagctcggtttgggtttcaggaatggtttggaactttggatgtttttcttttcagtgtagatggataagccatgattttgcaaggaaaattaacatgtgcatctctcgtcagataaaattgtgcaaccccttctagtgacgagggcggttatgaatcactgaaatg

SEQ ID NO: 60228 - DNA, 425 bp, Zea mays
  Clone ID: MRT4577_15492C.1
ctttttggctgttggctagcgaatgcttttagaaaccacctcttctgtttagctattgttggcagtaagtctagcagtgctttgtattatgtaaataggcatttcaaatgtattaattgctgtcattgcattatagtatttgttttgggtgaaaaatttagtcttatctttgtcagtagatttcaagttttgttcgtctttccaatgttgtatagcattgtgaaaccagatggtggcattgtggaagtatttggtaagagttgctattgaacttcacgaatgtaacattgcacattttgtattgaagtacaaacagatgggatgattatccttctttatgttaataaatctgtatagaaacaaaatttgtcattcaataatcaatactattctcagaattacatttctgtactacaacaattatt

SEQ ID NO: 60229 - DNA, 377 bp, Zea mays
  Clone ID: MRT4577_154930C.1
agccttccgagaaagcacactagagagccaactttgttacccaaaatatctggcctacttatgcgccttggtatgcctgcaagtgctgctacagggaccattaccccgaacagctcgcaagctcgtatagatgcccttattgctccgtacctttcaccagacgtgtcaccagtatgggaaaacccaagtgtaaaaccctacatgaaacaacacgcgatcgaacatggcatcttacctggattacccccgttactacaacagtcattagaactattacaacagctacctcagcagcatccattggcacaaaacatgagggcacaacaactgcaacaacttgtgctagcacaccttgctgcctactctgaggaacagca

SEQ ID NO: 60230 - DNA, 2521 bp, Zea mays
  Clone ID: MRT4577_154931C.1
tgcaaatacgcgcacaggcacagccggactcggtttcgactttcgagctacagagaattcgtcccggaaaagaaaaaaaaaatcacccttccatccgcgagagagagagagaggagtgggaggaccggaggaggagttcaggagggagaggtcggcggcggcgcggcagatcgggttgcaccgtgcagctcgggccttaggcgcaccagcggtggggggatccgcgcgcccatgcgccggtgaggtggtggggcccgcttggcgctcgagttggaatggcggcgtcggcgtcggctgggaggtggtgggcggtggtccttgcggtcgcggtgctgctcgggccgggacgggtcgtcgccaacaccgagggtgatgccctgtacagcctgcgtcagagcttgaaagatgctaacaatgtcttgcagagttgggatcccactcttgttaatccatgtacatggttccatgttacgtgtaacaacgataacagtgttatcagagttgaccttggaaatgcacaattatctggcgttctagtgccacaacttggccagctgaaaaatctccaatatttggagctttacagcaacaacataagtgggacaataccccctgaactggggaacctgactaacctggtcagtttggatctgtatatgaacaacttctctggcaatatccctgacagcctggggaatctagtgaagctgcgtttcctacgtcttaacaacaatagcttggttggtccgattcccgtatccttgaccaatatctccactctccaagtactggatctctcgaacaacaacctctcaggacaagtcccatcgactggctccttttcactcttcacccctataagttttgccaacaatccaaatctttgtggccctggtactacgaagccctgccctggggatcctcccttttccccacctcctccattcaatcctccatctcccccaactcaatcaactggtgcttctggccctggagcaatcgctggaggtgttgctgctggtgctgcattggtttttgctgttccagcaattgcatttgcaatgtggcgccgtcgtaaacctgaagagcatttcttcgatgttcctgccgaggaggatccagaagttcatcttggtcagctcaaaaagttttcattgcgggagcttcaagttgctactgatacttttagtaacaagcacattttaggaagaggcggttttggaaaagtgtacaaaggaaggcttgctgatggctcattggtagcagtgaaaagactaaaagaggagcgtacacctggtggtgagcttcagttccaaacagaggttgagatgattagcatggcggtgcacaagaaccttctccgacttcgtggtttctgcatgacacctactgaaaggttgttagtctacccatacatggctaacgggagtgtggcatcacgtttacgagagcggcagccatctgagccacctcttagctgggaaccaagaagacggattgcactgggatctgcaagaggactttcttacttgcatgatcactgcgatcccaaaatcatccatcgggatgtcaaagctgcaaatattcttttggatgaggacttcgaggcagttgtgggtgatttcgggcttgccaagcttatggactacaaggatacccatgtcacaacagctgttcgtggaacaattgggcacattgctcccgagtacctatctaccggcaagtcttctgagaagactgatgtttttggctatgggatcatgcttctggagcttattactggccagagggcatttgatctagctcgtcttgcaaatgatgatgatgttatgcttcttgactgggtgaaaggactgttgaaggagaagaaggtggagatgctggtggacccagatctgcagaaagcctacgaggaggtcgaggtggagagccttattcaggtggcactcctctgcacgcagggctcccccctggaccgtccaaagatgtcggaggtggtgaggatgctcgaaggtgacgggctggcagagcgttgggacgaatggcagaaagtagaggtggtgaggcaggaggctgagtcggcaccgctccgcaatgactggatcgtcgattccacgtacaaccttcgtgccgtggagctgtccggcccaaggtagccactccacgactccgatgaaagaaaacactgaattggccaagattcagtctaattgctgcttgtgtatatgaaaggtagcttttggaattgttagcgacaatttgaaaggatcgtcttttttttttggattcctcgctagctcagatgttggttacgctgaggttgtgttaaggtgaaaattcgtatacctaagggtgaatttctaaagcattgttgtagtggttcggggaatgtagcagcgatcgtccaattgtactacgtgctatgaagaacagtgctaccttttggccatagttttgcgttttgaaaaaaagccattctatttaggttttctttgtgttgaagtacaattgtcattgaatt

SEQ ID NO: 60231 - DNA, 1742 bp, Zea mays
  unsure (1)..(1742): unsure at all n locations
  Clone ID: MRT4577_154933C.1
actacacacgcgcacagccgtactcggttccagctacagagaattcgtccaggaaagtaaaaaaactcccccattcgcgagggacaggagggaggagtcaccgcgtgagctcaggaggaagagggagaaggagaggccgccggcggcggcgcggcagaccgggaaccgccgtgtagcactggggtggtggacccgcgcgcccatgcgtcggtgaggtggtggggcccgcttggcgctcgagttggaatggcggcggcagggaggtggtgggcggtggtccttgcggtcgcggtgctgctcgggccgggccgggtcgtcgccaacaccgagggcgatgctctatacagcctgcggcagagcttgatagatacgaacaatgtcttgcagagttgggattccactcttgttaatccatgtacatggtttcacgttacgtgtaacagcgataacagtgttatcagagttgaccttggaaatgcacaattatctggcgtcctagtgccacagcttggtcagctgaaaaatctccaatatttggagctttacagcaacaaaataagtggggcaataccccctgaactggggaacctgactaaccttgtcagtttggatctgtatatgaacaacttctctggcaatatccctgacagcctagggaatctattgaagctgcgtttcctacgtcttaacaacaacagcttggttggtcccattcctgtagccttgaccaatatctccactctccaagtactgtaagtagcatgtgcactactactcttctcttgatgtttgttgtgtgttgaatgaatatataatataccagttaccatgaaaaatgcagggatctctcgagtaacaacctctcaggaccagtctcatccaatggctccttttcactcttcacccctataagttttaacaataatccaaatctttgtggccctgttactacgaagccctgccctggggatcctcccttttccccaccgcctccattcaatcctccgtctcccccaacccaatcaactggtgcttctggccctggagcaatcgctggaggtgttgctgctggtgctgcattggtttttgctgttccagcaattgcatttgcaatgtggcgccgtcgtaaacctgaagagcatttcttcgatgttcctgccgaggaggatccagaagttcatcttggtcagctcaaaaagttttcgttgcgggagcttcaagttgctactgatacttttagtaacaagcacattttaggaagaggtggttttggaaaagtgtacaagggaaggcttgctgatggctcattggtagcagtgaaaagacttaaagaggagcgcacacctggtggtgagcttcagtttcaaacagaggttgagatgattagcatggcagtgcacaggaaccttctccgacttcgtggtttctgcatgacacctactgaacggttgctggtctacccatacatggctaatggcagtgtggcatcacgtttacgaggttctttattctttatataatttataaaaaacctgattccatagtcccaactaaacaagcagaacgttagcttcctgttctcattaaactttctgattccatagagcgccaggcatctgaaccacctcttaaatgggaaacaaggaagacggattgcactggaattctggcaagaggtctttcttacttgcagggatcactgncgatcctaagatcattcccatcggggatgtcaaagctgc

SEQ ID NO: 60232 - DNA, 1453 bp, Zea mays
  Clone ID: MRT4577_154934C.1
ggaccctcgagttcgccgggttaggtggactataatggcggccgggacggagcgcaggccagaaaaaggcttcgccttggtccttggatccccccacacaacgcagcacccgcactctccaggcgtctgccaatccgaaacgaaacccacccgtaggcaaaccaggactgagattgagcggagagcagcacagtcatggcggggcaggaggtggcgaacaagcgggtggtactgaagcgctacgtgacggggttccccggcgcggacgacatggaggtggtcaccggcaccgcgcgcgtggccgtgccgccggggtcgacggccatggtgctcaagaacctctacgtgtcgtgcgacccttacatgcgcggccgtatgaccaagcacgagaggcccagctacgtcccggacttcgtcgtgggggaggttttggaaaactttggcgtctgcaaggtgatagcatctgggcaccaggatttcaaggttggggatcttgtgtgggggatgaccggatgggaggagtacactctcatccataacccggagtcatttttcaagatcaatcatcctgaattgcctctgtcctactacacaggcgttcttggcatgccgggccttactgcttgggctggatttttcgatgtgggcaagcccaagaaaggcgactgtgtcttcgtctcagcagcatcaggagccgttggtcagcttgttgggcagtttgctaagctcacaggatgttatgttgtcggcagtgctggttctgacgagaaggttaatcttctgaaaacaaagtttggattcgatgaagcattcaactacaagaaagagcaggacctcgatgccgccttgagaaggtacttcccagagggcattgacatctacttcgagaacgtgggtggcagcacactggaagccgtgcttcccaacatgcgtatccatggtcggatccctacctgcggaatgatctcgtagtacaatctggaggagccagagggtgtgcacaacctattcgaaatcatcgctaagcgcctgcgcatggagggtttcatggtcttcgactactacagccagtaccacaagttcgagcaagagatggtcgggtacctcaaggcggggaagatagcctacgtcgaggacattgctgaggggctagagaaggcgccggaggcactcatcgggctcttcaccgggcgcaacgtcggcaagcaactggtcgccattgcgcgggaatgaatgctgggcatccatatctacgttgagaataatgtcgtataaactataaagcatgcgtacgttttcagacgtgttaggaattgatggtttgcagtgcttgcagttttatgctgttcgtgtgaaatgtttcaattttctgcggtttgttttttgggcgatatgggtgtgaaaactcagcacacgcgcttcttttgaggagaaatagacaagcagtttgcgg

SEQ ID NO: 60233 - DNA, 419 bp, Zea mays
  Clone ID: MRT4577_154935C.1
acgccacccatttgctttcctcgacttcccggttctccaagctgatcatcagcctcgctccacgacgacgattgatattctaaactatggctaggcatgacaacgattacgtgccccaggggactgaacgacttgaaagagatgactccacgtcgtgcatatgagagaacgggtgtagaactgaagatgcgctggagctcactgatgatgagcgcacccgtcagtctgtaggatacagaatgtgctggggctcgtcgctcttcctgcagactagccccttccatcgcacaagaggacgagtcccacaagagccatcagtctcgagcatcttatcaagggatatcatgtgacgatgccatgctgaactgaccaagatctgcgggtcatctagacactgcgtgactcccacctatctgcct

SEQ ID NO: 60234 - DNA, 260 bp, Zea mays
  Clone ID: MRT4577_154936C.1
ggttgatgcagagatgtcgggaagctactccgaatgatcgccctacatttgaggagatcattcctgaaatatatgatatccagggacaagcagagagaacatcaggggaaaggagccagacagaggaggaccactcatgtaataaagattgattgacaccctctgtgactacatgttgatcaattgctcgcatcgggcggtaaaatgctgagacagtagcatatcatcagttttgatgccatggataaaaagtagtcgaa

SEQ ID NO: 60235 - DNA, 525 bp, Zea mays
  unsure (1)..(525): unsure at all n locations
  Clone ID: MRT4577_154937C.1
gtgcggcgctcgaggcggcggtcgtggtgtatccccgccattcgtaccagncaggtcccggaaccttatcaccaaatcctcacgtcatggcggtcgcgctcttctccacctcgctctcgccccgnttcctcgccctatcctccccgaagccggtcgcgcccgcggactcggncttcctccccttcacgntgncgctgcgatctgtgtcggcgccgaagacagcgaggcgtgncttcgagtccgttgncgttgcggtggcgagggagcacggaaccgagggcgtggagnagnaggacgggtaggtctccgaggaactcaaggtgctcgnngggaaactgccgctcancgtcgacagtgcgcagctggncggcatcttctagaaggcgtcctccgtccagatgccgaaggttgtatacaatagaatgagtgtaccgaagccgtggatttggattggtggaaatgtcttcagttgaagaagacggggctgctggcgaggacttcnacggntattactttcaaggaaga

SEQ ID NO: 60236 - DNA, 302 bp, Zea mays
  Clone ID: MRT4577_154938C.1
ctgcaccccccggccccgtccgttcacaggcagttgcgtctctcattcagggcccgtgctcagtcgccgatgttgcagtgagatcgagcgaggtaagcttacatctgagctgttgctatcgcgcgtcgcagggaaagctgactcgaccttgactttatcatgctttcctgttgttcctggctccgtgttcttgctctagcatgacactgagagacccgacacgttttatattccgggcttcagatctgctgcatcttacacggaaaggatctagatctcacagagtcctagtactaagctgt

SEQ ID NO: 60237 - DNA, 574 bp, Zea mays
  Clone ID: MRT4577_154939C.1
tccaccgcggtggcggccgccctttttttttttttttttttgcatgatcatagggctatagtatattcatgatgtgatgctgttagggttgactgtaatatacttcatgacaagggaatctacacattatagaattccttttgtagaaaacaacttcctacacatcaacaaagttcgctgctagtactaaattgaaagagtctagtctatagcttgtaaccagagcaaaagtatcttcttcaaaatgggaagcaattacctcattcttttgcttctccagcatttcgacctgcatatttgagaagaaatcggttagcaataaatagcagcagttatgaagaatgtgatctaacaacacatagaaaatagtcagacgagaggctgagtagaaaatgcgatcgaacaacacatagaacatagtcagacaagagtcagacataaggttctctagtatcccaaatggtctcaaatccaagtaaaggtattaattaaactatttgaattccacaatcgtgaaccaaaaaaataaaaaaaatgcaaacatcatatgagcatacctgtttttttgcaactc

SEQ ID NO: 60238 - DNA, 458 bp, Zea mays
  Clone ID: MRT4577_15493C.1
ttggtttgtaatctaaccagattgaaaggagactccacttactattgttcaaagccttcaaaacatcaagtatgcctttttaatccatccttaatgtttacgggtattcatcacagattgactgaaagcactgttgacaaaggcctgcaactttgttaagggccactggtgcataaaatgctagtgtcacctggcccttattgccaatgctgctaatcatggaactggcaacttgtattcactgctttgtcaggaaatgctatggcgttgtaaaatgctataatacaatccagcacatgttgaacaaacaagtctttggtccactgcgaacattgagcttatgatgtgcttcctagcaagctcaagcttttgcagcatctgctgcagccattcgttcatcttcagtggtaagtgcctcaatcagggagatatatgtgctgccatctggtgtgataccc

SEQ ID NO: 60239 - DNA, 122 bp, Zea mays
  Clone ID: MRT4577_154940C.1
ccctgaacaaagtaagagaggttctatggtggggcatgcccctcgttatcccccaccgggaagcggcacctgtcatccatgcttgcgtggagcctaccattttgaatcgtactagcaggaac

SEQ ID NO: 60240 - DNA, 410 bp, Zea mays
  Clone ID: MRT4577_154941C.1
cactgagcggcctggtcaggatgacgaaggcgcctgagcccgggtgcacacgctggggagcatgacgccgtgagtatgagggtgacctgcatgtcgttgatgccttcgcccttgggggtgcaacggatgaggtgacctgcatgcaattgacgttgtcgcgcggcgaggtcagcgtcccttctgcggccctgtgctgtggcggcagcaacaatggtgcggcagcacgtgcgtgcggccggcggcggtgtgcgtggagtggtggtgttgtgggttgattgcggtcctgatcaccaccccattggtatatgtctacatggatcatcacatatatgcacaacgcttgtaataccagaccaggatgttatttggtttggattatcaaaagtttaatgtgtatgagtattctaggt

SEQ ID NO: 60241 - DNA, 376 bp, Zea mays
  Clone ID: MRT4577_154942C.1
ccaatttgacctcccacgcgtcctttttattgtgtagatgatgatccttcatgtgtgttcatcactgtcaacgaaacttgtgaattggctaacatcaattcctgcgaacgcagtgacggcaagcacactaacaactcaaaggtggctactgatccagcttgtcttgagattcctcaccacacctttgcgctataccaggaccctgtgcatgaatctcaggggcacgatcatgccatcttggatatttcatggtcaaaaaaatatagaattgctttctgggtctaaagacaaaactgttcgattatggaaagatcggtgcgatagctgtcataaggtttctcttgataataactatgtgacatgtgtacgagctaaa

SEQ ID NO: 60242 - DNA, 154 bp, Zea mays
  Clone ID: MRT4577_154943C.1
atacattactaccacttctatactatactattcttgcttttgtcactcttagtagcctcgctgtcaggagtaggagaccattcgtccaccaacctcatagagggaggaggcctgaacaaatctagttcaccaccgaaggcttctcccgctatcc

SEQ ID NO: 60243 - DNA, 404 bp, Zea mays
  unsure (1)..(404): unsure at all n locations
  Clone ID: MRT4577_154944C.1
tctcaagagcattgatgtccgatgccgcgccgcagctggagtcctctgagcgggcgcgccctttttttttnnttttttttttttttttttttttgggaactattttgaatgttaagcttaacaatgtttcaggggttttaacagggcaaacaggagcctgatcctgtcctgtttcagggcaaacaccaaataatgtgctcaaagccactgggggacggcatctttttgctttttgataggaaattaatgccaaagccaaacaaatggaatatgctattgaaggtggggcacacactacatatgacatgggaagattaaaaactggctcttacttaaaaaacaaaggagctattcagattacaggaaaccacccatccatgagatctgaaacaagaatcctccct

SEQ ID NO: 60244 - DNA, 512 bp, Zea mays
  Clone ID: MRT4577_154945C.1
agcaagtcaaaacgtcggtgtcatttaattagatgtcgcaacagcatccgagagtgctgtgcgaagaaatacatgagtccgcacggcatatgttagaacaaaaactatttacagtcgaaatcaggtgtaccatggtagtcactagaccagtgcacaggagcagcaacgggagcccagaatgcctccatcaatgtgaaatcccaagcgaaaatgattactccctccgggaataaacgagaagagaaagtttatcttgcacttgcgcgcgcgcacgctctctctctctctgtctgtctgtctttcaaagacgtgtcaatcaagtctaattctcggttctcgcaagaccaacagatctgatgtgtttctttttttctcttctttctctttgctcactgagacagtcccaagccttcgcttccaaccttgtgatagggtggctgggcagccgcggcgcggtttgggtcaaagcgccaaacgccaccggtcttgtctgcctcgagctggccagcgag

SEQ ID NO: 60245 - DNA, 1814 bp, Zea mays
  Clone ID: MRT4577_154946C.1
accccataaccggacaccggtcaccgaaacgcagcaactgacaggcacctgacggagagctagtcgctctgcagccgagtcgagtcgaactagcgcgcgagcgagcgaggaagaagaagagctagctatactgctgcttcctcgcgcgcagcagcagcagcaaacgaagaaaccagccccatgggcggcagcgcggatgcgaacggcgcggggtcggtgcgggtgccggtgccgccggcgcggccgttcctggacacgttccgcgggaacctcaaggagaccttcttcccggacgacccgttccgcggggtggtgcgggagcgcggggccgggcggcggaccgtggccgcgctgcgctacttcttcccgttcctcgagtgggcgccggcctacgcgctgtccaccttcaagtccgacctcatcgccggcatcaccatcgccagcctcgccatcccgcagggcatcagctacgccaagctcgccaacctgccgcccgtgctcggactctactcgagcttcgtgccgccgctggtgtacgcgctgatggggagctccaaggacctggcggtggggacgggttcactttttaccggccccgcgggcccagggaaaagtttccgtttccctgctcgagccgctcccccgtcctcttccttcctctcgagtagcctcggttggtcgctgtcctatttcaatttcgaatctccccttcccctcagtctctcacacgcacgctcctcccctacgcagcaaaaccctaaccctagctgcggacgccgtcgccgcctccgcgcccaaccgatgtctgattctgaggcgtccccaccgcccactccggccgccgcaacgcccgcagcgccggtggagacctccccgtcctcggcgaggaaggaagaactgctgcctgtggaggaaaagatctcggaattaagtgaatcacaatcagagcttctagggaggctccgtgggcttaaggaggatttgctgagttggaggagtaatttagactcccaagtgacgaaatacaaagtggaactctctgacatcaagagtgcactcaataatgaaatagagcagcttcgctcagatttccaagagctgaggaccacccttaagaagcagcaggaagatgtgtcacttagcttgaagaatttggggcttcaagatgctaccgaaaatgatgggaacaaaggaaatggagacggcacaaatgaggtcttgtcagctaacttggggaacttgaaactggatggttcttctgaaaactatgatgaaagcagagagtcaaaggaggacaagttggaaaacaccgacactgctggtgatggcatcgtcgacaaagctactaaggagacgagctcaactgatgaacaattctaacacaggaaactgaactacactgttcgtgtctcagctgtagaaattctaggaacatcgatacatgagttcctgtaagagagcgagtccatgctttgctatggctcagtcgggttggttatggaactctattgggacctgtgagtcgtgaggatccaaatctcctctagaattgtgtaccaattgaaagttacgatatggtatcatggacatttgctcacctgaatgcatttcagctggtttgtcgtttgcaaaaaaaaagcctccaaggccatgattttattagacctacttgaaatggcggtaggtgatgtactgatgtggattttgtacgaggaatagtggaataaggtattctggtgggtttgttgttggtcacaagatgccagtccggcctctcctagcataccatactagtagtaattttcttcttggag

SEQ ID NO: 60246 - DNA, 470 bp, Zea mays
  Clone ID: MRT4577_154947C.1
ttgggtacctcgaggccggccgggatattaactggatagagaaaaaatatccctcctagtaattggtgaggcatgaaaaacttttttttacaggaacgaggaccaacggaaaagtttccgtttccctgctcgagccgctcccccgtcctcttccttcctctcgagtagcctcgcaaaaccctaaccctagctgcggacgccgtcgccgcctccgcgcccaaccgatgtctgattctgaggcgtccccaccgcccactccggccgccgcaacgcccgcagcgccggtggagacctccccgtcctcggcgaggaaggaagaactgctgcctgtggaggaaaagatctcggaattaagtgaatcacaatcagagcttctagggaggctccgtgggcttaaggaggatttgctgagttggaggagtaatttagactcccaagtgacgaaatacaaaagtggaactctctgacat

SEQ ID NO: 60247 - DNA, 408 bp, Zea mays
  Clone ID: MRT4577_154948C.1
gataatggcataaaaaaaaaaaataaaaaattaaaaaaacaagacaaccatataaagaaagcgcaaacttacaaacacatacatgcaaccccgtcgctctactatacccacactctaaaacccattcattcgacgtcttaacacaactttggtactgccaaaacccagtcgactccccacttatttacaccgcagcaaatgcgaaaaccttcagcttacccaatttaaaacattccctgccaaaccccctttcccaacatttactcatcctgaatagcccatgacacaccccctttaccaacacattaaccccctcaatgtgcaaatggtacgcgccctgtaaccgctacattagcccgcggcctatcgcgctttccctcagctttaccgctacccttgctagccact

SEQ ID NO: 60248 - DNA, 1363 bp, Zea mays
  Clone ID: MRT4577_154949C.1
tggtaccctccaggcggccgggaaatattacgaagagaacaaatccctcctactaattggtgaggcgtgaaaaaccttttttttcgggccgggccggggggccaccaccggtcaccgaaacgcagcaactgacaggcacctgacggagagctagccgctctgcagccgagtcgagtcgaactagcgcgcgagcgagcgaggaagaagaagagctagctatactgctgcttcctcgcgcgcagcagcagcagcaaacgaagaaagctccatctgcttgcgcacacacacacatacacacacacaccagctagctccatgggcggcagcgcggatgcgaacggcgcggggtcggtgcgggtgccggtgccgccggcgcggccgttcctggacacgttccgcgggaacctcaaggagaccttcttcccggacgacccgttccgcggggtggtgcgggagcgcggggccgggcggcggaccgtggccgcgctgcgctacttcttcccgttcctcgagtgggcgccggcctacgcgctgtccaccttcaagtccgacctcatcgccggcatcaccatcgccagcctcgccatccccggcaccatggtgtaccggaggatggaccagtacgccgccgcgcagacggtgcccggcgtgctcgtgctgcgcgtcgacgcgcccgtctacttcgccaacgccagctacctgcgagagaggatctcgcggtggatcgacgacgaggaggagcgcaccaagagccagggcgagatgggcgtgcggtacgttgtcctcgacatgggtgccatcggtagcatcgacacgagcgggacgagcatgctggacgagctcaacaagtccttggacaggaggggaatgcagatcgtgctggcgaacccgggcagcgagatcatgaagaagctggacagctccaaggtgctggagcagatcggccacgagtgggtgttcccgacggtgggcgaggcggtggcgtcgtgcgactacgtgctgcactcgcacaagccgggaatggccaaggacagcgccgccgcccacgagagcatggtgtgacgagcaccgccacgccaaccgtatgtcatgtgtagtgtggtccggttccggtctgacgtaaccagtcgtcacgcggaccgagatgaattatgtatacacgtgtctccagtattgtacacctgcaccgtcgagggaaaaacgaagaaaggatcccgcccggtttttttggtaacatggtctcttgaacgcgcgcagacatgcggtgcgctcgcaacttctcttgaagggcagatgtgagagggttctatgggagatgagagttttataggaatgaaattctttcatatattgttttctagat

SEQ ID NO: 60249 - DNA, 151 bp, Zea mays
  Clone ID: MRT4577_15494C.1
aattggtcgaccagtcaaccgctgaaaaaaatccaggctgtactagacatggtagtcataccagcgaccccactggcgcggcctaacttgttgaatatgtgctacaacagaagaatggagaaaaacactatgctcgtggtctcccttttta

SEQ ID NO: 60250 - DNA, 1272 bp, Zea mays
  Clone ID: MRT4577_154950C.1
aagaaagccaacccttcaagacggtgtttcctgcaaggcacgaaggtctggcgagtttttaatcatgcttcctggcccttgagtctggtgttacagcatctatcgtctatattcacaaagaggatacatacctgctgacatagacatctacagtgtacttaacaggtcaagcagatggagcaacatacagcaaactatccttgctgtgttgcataagaaaaaataagtgcaacagaccaaaacctcatagacacagcaaaatgtaagcattatatacaaaattgcagaacttctattagcttgccacaatgactacttttattcatcttaaacaggtatgcgcccatctgctccgtcatcagccgcctgtaccttgtcctgtgtgtagagtaatacatggcatccaccatcagtcactgccactgcacctgatttggaatcaacagaaacacaggagactcgtccactgttgaaacactgtgttcccgtcacttttctccccgaagacaattcccacagatacagcagaccaccatgtgtcccagcgtatccgtagttaccgcaggcatctaaagcagtaattcttgtatccaaaacatttccgataaaaactctcttcttcgctaacagagcaaagctccatcgtgcactgttttccttggcttgaagatcatgttgatactcagccacagaagcacaagaaatcaggacccaaactgctatatcttgtcttggcggcgtcacaaagttcaccctgacttttttctgtacaagtcaccgactgtgatcacttgtagatttttatctatgtcatcaactggagcatcaataatatcctcctgcaaactacataagccaactggcagaatctggaagacagtgtttcctggagctgcaaaagtcgccaatagtgtgcgcttggagatgtcccacaaacaaaaaccgccttcgccatcatggccaataatgagagatgtgttttttggcatccttgtaagctccagtataggacccatgttacccaaactaggaatcatatactgctcagatatctcactccacccatcaaccatttcccagatatgcaggtttctgctgtcttcaatagctacaatgtaatttggttcaaatatcagaatgcacgacactgtcccataaggcatcaaattggttacaagtgaagcatagcccgagttaacagatacaatttttaaagaattatcttcacattgacacaagttgcagactgggcacaagcaatcaatgttttgc

SEQ ID NO: 60251 - DNA, 1700 bp, Zea mays
  Clone ID: MRT4577_154951C.1
gaaaaaaatatccctcctaggaattggtgaggcatgaaaaacttttttcacaggaacgaggaccaacggaaaagtttccgtttccctgctcgagccgctcccccgtcctcttccttcctctcgagtagcctcgcaaaaccctaaccctagctgcggacgccgtcgccgcctccgcgcccaaccgatgtctgattctgaggcgtccccaccgcccactccggccgccgcaacgcccgcagcgccggtggagacctccccgtcctcggcgaggaagctagaactgctgatctttgtttagcgaattctttgtggaagtaaccttagatctctagagttataaaactatttccttgttctgtttcttttgagcaggaattaagtgaatcacaatcagagcttctagggaggctccgtgggcttaaggaggatttgctgagttggaggagtaatttagactcccaagtgacgaaatacaaagtggaactctctgacatcaagagtgcactcaataatgaaatagagcagcttcgctcagatttccaagagctgaggaccacccttaagaagcagcaggaagatgtgtcacttagcttgaagaatttggggcttcaagatgctaccgaaaatgatgggaacaaaggaaatggagacggcacaaatgaggtcttgtcagctaacttggggaacttgaaagtaagtagtagctccatagtggaatacttcaattacctacttgcagaatgtctggcctgcgtagtatgatagaggacttctgctcatgcttttcactgccctttttcataaaattttccttaagttgtttatttttcttctccagctggatggttcttctgaaaactatgatgaaagcagagagtcaaaggaggacaagttggtaagaaattagtacccagttacatggatgactagaaaataagtaggaacacacactcgtatttttcttttccagctggatggttcaaagcagtctcttcgttgcgagggaccaaacatgctctggcatatagaacatctgcaatgctaggatcccatccttttcttatatgataaaaaaaacttataaacaccaataaaagaaatcaaatgttatttgagaaattcaggtcttttcatcctttttcaagatgatatactgtaactggttatggggtggagtttacaatgaaaggtttcacactatcttttccctgatcgttgagtgtgctgaatcatgcaccaagagttatgacagagcttaacatgcgctgatgatggtttaatttgctgcagggtcaccacagtttcttagtggagagttctccctgaccttttcctttctgatggctacaggaaaacaccgacactgctggtgatggcatcgtcgacaaagctactaaggagacgagctcaactgatgaacaattctaacacaggaaactgaactacactgttcgtgtctcagctgtagaaattctaggaacatcgatacatgagttcctgtaagagagcgagtccatgctttgctatggctcagtcgggttggttatggaactctattgggacctgtgagtcgtgaggatccaaatctcctctagaattgtgtaccaattgaaagttacgaaatggtatcatggacatttgctcacctgaatgcatttcagctggtttgtcgtttgctttcagctggtttgtcgtttgcc

SEQ ID NO: 60252 - DNA, 480 bp, Zea mays
  Clone ID: MRT4577_154952C.1
aatataaccaacctctggtcttagtttcactgatactgctattgatcaacgcttaatattaactaattgacaatcagacatactacaaatcaactgtgggagaggaagcacccaattgctattgagtcagggcaaaaacatatcggtcacgaactttcaaaaaacaaagactaacggcccttttaaacatgatacgatccttgagccacctcaactctgactagcacgtgctcccgacaaaagctagcgatgtcatccaacatcaataagccctatgattaagggccacagtttacctaaatttggggcactgatacaagacataccaggttttgtaccaaccaactggcgggtctaatgcacagaccgccataattgttccacatccatgtggcaggattgcatcggccctgtcaactccaaacataccaagatgctcaagagttaaaggaccacaacacgcactcacggggctgcaaa

SEQ ID NO: 60253 - DNA, 305 bp, Zea mays
  unsure (1)..(305): unsure at all n locations
  Clone ID: MRT4577_154953C.1
gtccgacatcccggtcgaccccgcgtccgttggatccgaccaanacaccaagggtggtggtggtggcggcggcggtgcagttttgtcgattcagggaacaaggtatacgtggggaacacttgcatggggcgttgacaactcgactatggnaaacctattgagtgagcaaggacaggtgctggatgttaaggtcatctatgacaggggtagctgnaggttcgggggctttgtgtctgtctcctagactatcgtgtgtatgcgctcatgaagttgggttactactctgaggttgtgggggttgctta

SEQ ID NO: 60254 - DNA, 187 bp, Zea mays
  Clone ID: MRT4577_154954C.1
ccgcgccttctccccaatctggggggatatcagatccggcggggcgcgtatataactactttaagtctatcttgctgacatttagagtccaaagttccaaaataacatcacaaagaggggttctgttccagttaccactgttaaaatgagcaataactaccctttttttacctattattccttgtat

SEQ ID NO: 60255 - DNA, 578 bp, Zea mays
  Clone ID: MRT4577_154955C.1
attgggtacctcgaggccggccgggaaaaaaaaaccccaactcgttactttctccaattatccacctctcccttctatcccaccacgcacacccgcaacactcctaaacacttgcgtccctagccactcactctccttgcgtcctcccaacctcgctacatcctcgattcgcatactccgaataccagcgtaaaactcgcaatcatgcccgcctcagcctcctcctccatcgcctccaccgccggctccatcgtcaaaccccagggcggcaagtgcagctgtatcagcaccgacgattgcagttgctgctgcattccttgcaccgttatgtagaaaacttttcacttgtggaaagaaaaaggagagtgggaagtttggtgagagaaggatcgattgaaaggggtgtttggaatttgaaagcgcgcatttatacataccatgggttgccttttttggagtttggaaagattgggggagtgtaactgtggactcccttcccttttgattgaggggtgttggtagtagcaataatcacattgcgggctttttttctcgaaaaaaaaaaaaaaaaagcggcc

SEQ ID NO: 60256 - DNA, 264 bp, Zea mays
  Clone ID: MRT4577_154956C.1
ctttccaccatgggtggtaagagaaacctgccttcaccaaaatcactgaaggggaaagaagtggagagaaaggtttgcttcacttcggggactgcagtttgagaaataaaagggatacagagatatctgcactttgtagaagggcaagattatttgcttatatctgaagggaggtgggtggttttgctggatgtttggtctgaaagagttacttttgataaagttaatctaattgtagttatattttctgtgtgctttttttta

SEQ ID NO: 60257 - DNA, 473 bp, Zea mays
  Clone ID: MRT4577_154957C.1
tgcgccgtcgctgttttcgcgtcgttcttcgcccgtcgcctctccgtgtcgttcttagcccgccgccgtttgtagtggctgcttcatggtggagtaccgatccccagcgcccccactgccactagaggtggctacatgtctgagaacaacccctcccagcttctcccctgagagctgctcgaccggagcatcaggcccacgatctgggtggtcatgaagggggacatggagcttgttgtcaccctctgcagctttgatgtctacgtcaatatggtgctgggcgacgtcaccgattatgaattcactgttgcagggcgccgcattacaatacttgaccagatcctgctgaacggaaacagcataggcattctggtcccctgggggtctaccacccgtaggggaatgaacttttgcttcccagagcctcattggtggtgaaggcagccccgtgaaccttgcgccttatatttttt

SEQ ID NO: 60258 - DNA, 697 bp, Zea mays
  unsure (1)..(697): unsure at all n locations
  Clone ID: MRT4577_154958C.1
gccggccgggccgcgattgccgaaaaactggagggaagatcaggtcgatcagatcggcaagagctgccggctcaggtggttcaaccagctggaccctcggatcaacaaacggcccttcacagaggtggaggaagagcggctgctcaacgcccaccgcgcccacggcaacaagtgggcgctcatcgcccgccacttaccaggccgcacggacaacgccgtcaagaaccactggcatgtcgtcatggcgcgtcgctgccgcgaccgctccaggcaccatgccagggccgcgagctccagctcccctctctccatgaacttgtctccaagagaaacgctacacgtggatatcggcgaccgtgtccgtcataaacatcgccgaaaggattatcacgccggtgacagcgccgacgagccattgaagaaggacgtgcccttcattgatttcctcggcgtcggcatgtcctcgtaattattcatagtattgcattaattcttgaaataccaatcgatgtagatcaacaagtgtatcgatcggcgtttgttggttattagggcattagtagactgcatgcaggagtagtcgtctagaggtatcagatatgcatgcagggttagagagttcatcgtcgttgatggntagggcgttctgatgtgctgattcatcaatccatcaaataaggctccagacacttgagng

SEQ ID NO: 60259 - DNA, 264 bp, Zea mays
  Clone ID: MRT4577_154959C.1
cccacattcttttttttgctactaaaacacaaaccggcgtgttgaaaaacccacaacaccatggcccaatgcaggggaaaaaaggagtaaaaaagggcccaagggccccaaaaaagccattaaaacttcccaattggcgggtttttcaggggaaaaccatttggggcccccccccaacccccgtggggccaaaatttttgccttgtcttcaccccccggcaaacttttggagccaagaacctgggggggaaaaaaacttggccc

SEQ ID NO: 60260 - DNA, 379 bp, Zea mays
  unsure (1)..(379): unsure at all n locations
  Clone ID: MRT4577_15495C.1
ccgggagtggaagcactggggcaccgacaagctcgagttcgccatttacggggtcaccgacacgaccggggccntggcgatattttctcaaggacagccactaagaggacatctgccaggtggtgctggtggccaggccgcgcaaggtctgaaaccaggtgcaggtgctcagggacctggccggcgtcctgattaccaggaacgttggtatatcccacagcctgcggctcgccaacccgctaggcttcttaaaggacgtgccgctccccgtctgcgcaccgcttctcaagcagctggactagggcgacgacgacgaccactatactataccactgcagcgtcgcggacatccttgacaatgatgcaccgattcataacg

SEQ ID NO: 60261 - DNA, 214 bp, Zea mays
  Clone ID: MRT4577_154960C.1
ccggccggggatttgtgcttgctgcactctagtatcacacacgtgaacatgttagaacggccgacacgactcccatattgatgcctgctgaacttgatgaaattgcttacactcttgtagtatatcctttatccttagctggccatcgatgtcgagaatgaaggatgttctagttgctgataatagaccgtgctgtacctccacctagcgtcct

SEQ ID NO: 60262 - DNA, 1173 bp, Zea mays
  Clone ID: MRT4577_154961C.1
ccggccgggagaagaagcgcggtttgctgacgtctccatcccatcatgtattatcctcagcctaccgtctccttggcggcggcggttgccctcctccgcccctcactccgccgccactctcaaagggcgtcatcccttctccgctcctccacgccgcctccatgggttagtgcgaggaggaggacggccgtctccgacgacttcttcaccgtcgagttggacgctactggagtggaaccggaaccggattccatcgacgacgggctcccctctccatgggagggagctgtcgtctaccgccgcgacgctgccgtccagcacctcgagtacgccagcacgctggagcgcctcggcctaggggacctctcctcccccgactcccgcgcgcgcgccgctgacctgggcctggctggagggaccctggacagcactggcgcgcagcctcggacccccgtgctcgtctccgtcgacgtgaccaggcgccgcggccgcctgcgcctggacggcatcgtgcgcaccgtcatcaccctcggctgcttcaggtgtgctgagccagctcctcaaggtatatttgccaatttctccctgctgttgacagaagacccagtagaggaggaaccagacctcggcacgatttttcaagaggacgacgacaaaggtggtgcttcgctagcctgcgccatggatggagatcaagatatcgactgggatgaccggctgcatttcccagcagctgacaaggaaatcgatatatccaagcacatccgggacatgattcatctggagatcaccttggatgcagtgtgcaaccccaactgcaagggtctatgccttacctgcggcgcaaacctcaacaccaccagcagctgcacatgcaagcccagaaacgtccaaggactttctcctctcaaaggggttttcaagtgatgatgcggataccaaagtttgtacaaccagcccaacttcatgtcatgctgtgagcctgtgacttctagattcatataatcgcaaatatgcattgaaacttcacatttatagattcacatccgcagagggcaaaataccaaatcgacttcatatatcttatgttcttcattgtaacaaaccaccaaagatgaaaaatcttaacaaccattttttaaaaaaaaaaaaaaaaagggcggcagctcgcga

SEQ ID NO: 60263 - DNA, 287 bp, Zea mays
  Clone ID: MRT4577_154962C.1
cgaaattcggctcgaggagacttgcaaggaattttttgatggctcatagggttctcgtggtcctttatatagagttgcccaccttggcggacaccctcgctgacgcggaggacccggtgacacgtcaggagcatgccgtgggaaatgacatcgagatgtagctggacgctgagctccacttcctgagctacaatcagcgtttattgaagtgctacatggacaccgaccagcaccactgctggtgtgtcgtgttcaaagacaacgtgcatcaagcgcgtcggtaccag

SEQ ID NO: 60264 - DNA, 277 bp, Zea mays
  unsure (1)..(277): unsure at all n locations
  Clone ID: MRT4577_154963C.1
tctcnttactcatacgggcgtgcaaaaccttgggggaatttatcgagctttggtggggcacccccccataacaaataaaacacgaggaggggcacagactactggaggacagcccgccttgacactggtgactagacattccaagcacgaaacagatcacgaaaggcaccacatcagtttgctgggccccaccaaagtgcatgagaaacgtgcatgcgacaacctataataccgcgaggtaaccgggccaacatggggacatcgcatcatgacccca

SEQ ID NO: 60265 - DNA, 438 bp, Zea mays
  unsure (1)..(438): unsure at all n locations
  Clone ID: MRT4577_154964C.1
gatactggggtcatcdccccccccaccavatctgaatccacagtctamdatgcrmcgccgatcdgacatgrtckgsdagatatgraactaaaggacaagcttyttggtaacagargaccaacttgcttcrttcatgcgctacctcycmagascgcaactgtcttcygckyycttctcttcttacacgcaactgcgcccsatcacattgaaggccacggaaaayyggagascttgcctcttggttaggtgyactacgaantdgvyctgcaagaggcaacbgacgtacatacmamttccaygagcavtgagccgagtcggttgcmcgttcgtgtaactgaaagsaggtgggaaactatagcagaccgmagtgtgcaccatgcgtgccaaaagacagttccctgcgksttstsggtanaagcctncagcgaattgtgtact

SEQ ID NO: 60266 - DNA, 380 bp, Zea mays
  Clone ID: MRT4577_154965C.1
gaccgcgctcgtcgtcccccgccggcccgcccctttcttgctcgagctgccgccacgccgggtgtgccccctccctccgatccatccacgactgcgctcgctgcccccgctcgagacgctgacacgccctcgtacgagatctgcgccccctccgctccatccacgaccgcgccccccaagcgagtcgccgccatttcgccgattcccggccgctgcctagggttttggtgccagcgcggtcggagggttgtgcctgtgggtcgcgttcccagtgtcgcgcgcggcggcagaagggggagggagtggcggttctccggagaggaggtggaggaggttgaggtggtgggtctccacggagcgagattatcagatgccgcggc

SEQ ID NO: 60267 - DNA, 408 bp, Zea mays
  Clone ID: MRT4577_154966C.1
aggggctccggagcggtgcacgggaaaccaaggggaacacaagaccacaacgggggctcggggccatgacgcagaagacgctcgaagaagagcacagagcatgcatccatggcgaacgaaggccatgcccgagaacaaacgctccgctgggggaaaaagggtcccgtggcgaaaaggggggctggaggttgggcactgtactggattaagtaacccgcatgcctaaatagaaggcgtggcccgcgcccgggcgcgtcggcagcaggggggcccaaatggcggcaaactccgccagggccttggaaagcaccccggccctgcccttggccacaagcattctgacgagcgcggccacccccgcgtacagctgataccccagaaccgaaacgggaattcctaaaccggggg

SEQ ID NO: 60268 - DNA, 460 bp, Zea mays
  Clone ID: MRT4577_154967C.1
cacccagcctagctgcgccacgctggcacgctccatgccaaggacagcagctaggctgggtggtcggcccgtcgtgctctgcttcgcgctcgtcatcacccacgtctccgcggccctgttcgcctagccaacggctaccggcgcggaaaccccaagaggggcaacggacccgcgatttaatccaggggtcgggatatccttcctactaattagagcatttattaaattaaagtgaccaatcagttaatctctggcctggaccttagagctaagacactatattttggtcaggatccatgcctggatttttttacacatttaatccttagacactttaaaacataacttaagacactcattatacatgccctaaatggacgccataaatggacgccatctacgtgtacctcggtatactataccgctacgccatataaacgtatacctgccgtctcactac

SEQ ID NO: 60269 - DNA, 292 bp, Zea mays
  Clone ID: MRT4577_154968C.1
aggtactagcctacgcactttgggcaaccggcaagcggggggccaaaagggctaggccttcccgggggaatttggggcctaagaaaaccccaaacccctttgttgtttgaaaaataaaccccccctggggggggggggaagaaaaaaagggggcggggggttaaaccccagggagggcgggatcggcaccacaaaaaggaatcgggggggggaaaacaaactttgaagagggtccacaaaaaagggccccggaaaaaaaggacttgcaggggcttttggagccccaaaaagg

SEQ ID NO: 60270 - DNA, 1035 bp, Zea mays
  Clone ID: MRT4577_154969C.1
tattcggcacgaggctttgccctaacagcgaaggcacactgcccgacagccgccgccgtttcttcctcttcatcttcctcgcagcgccggcgctccagcttccgctccctccccgactcgcccttggcacgcaggcgacagcggcggcgctcaggttcgggctctcagcgacggcggggcaaccccagactcgctggcgtcgtcagcggctcttcctcccgcctctcgccaatcgcctcgcaccctcgcctccggtcctcgtcccccccgcacaccggccggcgaccctgcgtgcgcgcctcccgctccccttccgcctccggtggaccgtcgacagcgcccggccacggcggctgcactgcgcgccgcgtgcggccggcgggcagtgggagccagcagccgctgctccaccaaggcggctgtgccgctttggtagcgcttatgcccgaaacgaagcgttacctgtccgcttacgtttcagcgcgagcttagtgcctccttttggaaccctggtcttgcatgatactaatattttcgaggataacagcaagaagcattcataaagccatacacatttctcattcatattcttcaagctttcgaaataaagaattctctagttataagccaacgtttcagcatcttagcactaacaacccgatgaggccaaatgattcgttggaggctcaagacatggttcctgctgagggaaaccacagttgcttctcaagtgttcagtccactccagaaattgagaagaagtatgtgcatcgtgtctatgatgccatagctccccatttcagtgcaacaagatttgctaaatggcccaaggttgcaggattcttgaattccttgaggccagggtcggttgtactggatgctggctgtggtaatggcaagtatttgcgtttcaaccctgattgtttattcataggatgtgatataagcccaccgcttattgagatatgtgctgggagagggcatgaggtgttggttgctgatgctgtcaccctcccatacaggaatgatttggcg

SEQ ID NO: 60271 - DNA, 148 bp, Zea mays
  unsure (1)..(148): unsure at all n locations
  Clone ID: MRT4577_15496C.1
tcgcgctatcgcgggtgttaactgttgattcaagggatattcagatctgggccattcncttttcgaggaggaggtactttatctttaggggtttatcaagatttctctaattgccttctaaaagaatgggggttaactgatttcacta

SEQ ID NO: 60272 - DNA, 666 bp, Zea mays
  Clone ID: MRT4577_154970C.1
ggctggtgaagccatgccagatgactaggcacctcattaatatctgactcctggcatgtggcaactatccatcatgaccacccgacaggccaaagttaaaaccttatccagttttgaaccaaaggcaaattttcgttttgtagacatgcttacagtaccaagatcgtagcactatggagccaattattgcaatgctccaggctgtaattggaatcatgatgagcagcagatgggtgaacacacctgagctgcatcagctactccttatcttcatgcaactgtggtgttgcaggtccatggccagcactgtgagacatggcatggtggatgatggtgcattggtgcttcttccaccggcgcctggtgtcttttgttcactgttgcttgggccctgtgatgtgagcatctcgcgcaggttgctgacctttgactccccccgtgttcacacgtacagcctgagctgatgccgcacttgcactcgcatttgttttgctctgctctcatctcagtgccaggggccgttcctatcttgagccacacatattttttttctctctcgtttctggtcaactggattttatgcggcttgttgctctctgtcaagagttcctggccatgcatagcatagctcacatctacatttgatgactgagaaatgcctctttt

SEQ ID NO: 60273 - DNA, 747 bp, Zea mays
  unsure (1)..(747): unsure at all n locations
  Clone ID: MRT4577_154971C.1
cattgggtacctcgaggccggccgggcaccaataaatcaagaaaatgtgcgtcaagtagagaagctggctgcctatagagaagcagacagctagctagatacctgctgctagtgcccattatcctgcacatcactattaccctggactggagcatgcatgcatatgcaatagcaggctagctgctggttactgccctcctcctcgaccgtgtctccttaagtccttataacctcacctcacctggcctcgtctcagctcagctctgtccgaagcagcagcagcagcttttcttgcactcatccagcatatggcggccacggtgatgacgacaacgacgagcaaggcagggagaaagagcctgatctcaagaaccctgcagcggtgcaagtccgggctgagcgccggtggcggcggctcatgcggccggtcgtcaacatcgtcgccgccggggtgcttctcggtgtacgtgggcgccgagcgagagcggttcgtggtgcgcgccgagtgcgccaaccaccctctgttccggcgcctcctggacgacacggagcgcgagtacgggtacgcggcgcagggcccgctcgcgctgcccggctgcgacgtcgactccttcctcgacgtgctgtggcagatggagcgcgctgacggcgccttttttcacgaggaggtcgccgcggcctcctcgccgatgtgcggnctgcacagcggcagcaagggccgcgctgccgggtacgggatgctgtcgt

SEQ ID NO: 60274 - DNA, 831 bp, Zea mays
  Clone ID: MRT4577_154972C.1
cattgggaccctcgaggccggccgggtcttttcttttcgaaagacaaggttgacaaggcggtcatccgtaaggtgagggtcagcagcattctcccttccaatgccgtcctccccgtggcctcccgctgccggagcgccgccgccgcagcagcgagcggcgcagggcacggtctccaccgtggcgccggagcgtctacccgtcgagggttcccgatctgggccagcgaaggaggaggacacggctcggcttccgtctgtcgactactactcagagctaaagaccctggagcatgcagagaaaaccaaaaaatatcagggtaagcttgcagcacggttgaaggccaaatatttttccaacaagacttttgaagaaggatatgtgtttgaagaaattgttatagaatcaaagaccgtccggctaagcaggtggccgtttacaaggttgtttgcagatccagcaagattttgccgagaaaagagctctactgagaagggcatttctccacctctggctggtgttgccatgtcagatgactaagcacctcattaatatctgactcctggcatgtggcaactatccatcatgaccacccgacagataagaaccatagtttgcgtcactaacctgtatctgttatccttaaaatcagtgacctggagcttgtatattttcaacaggccaaagttaaaaccttatccagttttgaaccaaaggcaaattttcgttttgtagacatgcttacaggtatactgagacccatgcattgcctatatctatatcgatattattcctccagacgtttcaaaaaaaaaaaaaaaaagcggccccta

SEQ ID NO: 60275 - DNA, 473 bp, Zea mays
  Clone ID: MRT4577_154973C.1
gtttggggttttttaaaaaaattttttttttttttttttttttttttttttcaaacattaaaatttttttttctttattttttaacaccctaaaaccattaaaaccgctattttttcacaattacacaaattcaaaaaccactaatggggcgcgggggggatttattaatttctaactcttattttttcaatccaaaaaaaaaaacaaattttttttctcctttcaataaaacccccccactttaaaaaactcctttacatccacaaaactcacaaaataaaaaaccccactcctcctttactattaattaaaccattttacaaatttctttatccccaccccccaatccacccctaaattccttacctttaccaaaaacccccccacctttccctatattcattcaccccacacctctacataatcattttcataacccccccccctttaaaaatttaaacccctcacaatt

SEQ ID NO: 60276 - DNA, 1065 bp, Zea mays
  Clone ID: MRT4577_154974C.1
atggtgaagactgaagagcattattccttaccttcagcaaggaaaatttatggctaccagagtaattacctatggaagatctttcatcacgtcagcaaagtgtcatttccccataatttacatttacataatcaagttcttcaaaacaacgagcaacccactcatctaccaggccaacaacatcgatggacacctaacaccaacaacatcgatggacacctaacagtgttcgacaatgtttcagttcaaaataacaaagctcgggcgacggatctggatgctaggtcctccggacgacaaggtggcgagggggatgcaggatgcggcgacagctttattgagcagcggccacgcgaggacagaagagagaaggcggcggtggtgggcgagggcgagggggatgcaggatgcggcgacaactttattgagcagcggcctcgcgaggacaagagagagaaggcggcggtggtgggcgacagcctcgcgaggatgggagagcgaagctccggacgacgaggtgggcgagggcgagacgatgtaggacgcagcggtagcgttggtgggcggtggcctcacgaggacgggagagagaagacgctggtggttcgtgctcctgtcctgctcacgcctgcctcccagtggttcatggacctcaccgcctcctcgatcccgcatggcgcgtcgccgcacgccgtggcggcgttccacaacatgctcatccgagcggacgcgaacgcgaaggcagcatgtcgcgcgtccgaggcgctcgatgccatcgtgtcctgcctcgtcgacctcgacctgtgctcactcacgtcctcgctccgccacatcgagcgcctcgtggacgtcgtgggcctcctaacgcgggcgctcggctcatgcctagactccgtcttgccactcgtcgtgtccgtcgtcgtcaatgggttatgcaagtcggggcttgtggacgacgcatgccggctgctcaacgatatgcctcgcaatggcgtgaaactgaatgtgttgtggtacaacttgatgcttgactgttatgacattgttgcattagcgacatcttga

SEQ ID NO: 60277 - DNA, 304 bp, Zea mays
  Clone ID: MRT4577_154975C.1
tcactcacacttgagccccacccgtgccgcgccgtgcccgcatccctgagcctgactctggcgccgccgccgcccatgtccgccgccccgccccgccgcgtggtcatctgcggcgagttcgttgacgccattgacatcgttattgtctcgtgccaggacaaggaaggcatgcccccagaccagcagcggctcatctttgcttggcaagcagcttgtggactgacgcacgctggctgactacatcattcagaaggagagcaccctccacttcgtgctggggggggggggaggcatgcatatcttt

SEQ ID NO: 60278 - DNA, 256 bp, Zea mays
  Clone ID: MRT4577_154976C.1
tctttgggaaaatagagttcccaaactagccctaagatggaaagggaaatgaaatctcgtggacttgatgtactgtactacgctaatgcatcctctatgcaaaatgttgtactttgttttggcttgtcttgtgttttgttgcatcaatttcactggcggtggaacttgtttgtcattacatggtgctgcagactcagcatttcttattgatcgtctagccttggtgcttacatattattatttgtagtccctggat

SEQ ID NO: 60279 - DNA, 181 bp, Zea mays
  Clone ID: MRT4577_154977C.1
ccaaatgctgaatttgcggattccaaaagagaccaaaggggtggcctcaggcctgatccatccgacacgagtttctcgcactgaactggatgatgacctggctcacaccccaggatgcgcatctctcacacaaccatttacacttcacacctgcgtggcaaagctcctctatgcgccaagg

SEQ ID NO: 60280 - DNA, 782 bp, Zea mays
  Clone ID: MRT4577_154978C.1
aattcggcacgaggcgcgactgcaccgtgccacccgaggctcgcccccgctgagccagcggagcgaatctccatggcctccacatcctcctccaggtacgcgaaacatcgtcggatcggagaggacgatgagttggaggaggttgaggaggaggccgaagaggagcttgagcggttcgatgatttcaccattgcttcgtcatgggaaaagtttatatctgagatagaggctatttgccgtcaatggcttgcagatggcgcaaagatcttaatgcaaaaaggtgcagagggtgttcctccttttgaaaacttatatatgatcaagcgtgaattgaagcatgggaaaagagtctattctatggagtaccatttcatgaaatctgtaaaaggtcaaaactcatattgggacgatgatacacatagcatgcagctctcatttggagttgatgagtttttgataattgctccgctgagtgccagtggtgtgatcctcgatgatccagaatcaactaagcttttgagttctgtagcaattgctctttctaattgtggcagcaattggccagcgtttgtaccagttcacgacccttcacggaaagcctatatagggattcaaaatttgggaactgtatttactcgaagatttgaagctgaccgaattgtagtcaagtgccaataagactcatgcatcttgaggggttacatgagctatttctatcacaattttgtctatcctcgtcagattctccagctagggtaaaggttcacttctcaatgaagctt

SEQ ID NO: 60281 - DNA, 150 bp, Zea mays
  Clone ID: MRT4577_154979C.1
tcgatgcccgatccctataaacacaccggacaacagaccaaaccatagcgagcgtgtctaagaccagcgtgcccttgcccattccaacacatagcaacggacagcccaagtcttaaccaaagccacaccatcctctcctcagctaggtag

SEQ ID NO: 60282 - DNA, 1415 bp, Zea mays
  Clone ID: MRT4577_15497C.1
cggagcctgcacgcgtgtttctccacatgccctctccttctcggatcctctaccgtaatctcccggcgacgccgccgccatgtcttcccagtcttctgcaggaggtccggcgatccatcatccccactccaactaccacccgtacatctttcagcatgaccctccgctccactctaattcccgccgtcgccgccgtaaccatgatgacccatatcaaccctatctgcctctaccccacgctcactcccacggagccactgccgtcgttaccggcaccgttcgttgccatgtcccccgggatccacttgtgctctcacacctccaggagcgcctctttccgactctccctcaacatcacccgatcgcgggtccacccccgacgaagcgggcccgccgcgcgccagatactccgtgggatccgccgccgccaacgctgcagccggcacttgtcccggtggcgctagagaggcctccggatgtaggacattctgccggggcgttgctttcgcgtgacgagatcgagaggcggtctccatcaagaagggacgggatcgattccgcgcttgaggccaggctgcgtgcgtcctactgcgcctacctgcattgcctcggcaaccggctcgggttgccgcagacaacaattgcgacggctgtggtgttctgccatcggttcttcttccacagatctcatgcctgccatgatagatttttggttgcgactgcagccttgttcctggcagcaaaggcagaagaaacagcatgccttttgaatactgttcttagggcttcatgtgaggtttctcaaaatcaggaattcaatcttcttccttacatgctatgtggtcaggactggtttgaacagtacagagagagtgtaatacaagcggagcaaatgatacttacaacacttgattttgaactcgaagtagcccacccatatgcttccctatcctctgctttgggcaaactaggactcacacatactgttctgtttaatgtggcttggaatctgatcaatgaagggctacgaagttcactttggcttcagttcaagccccatcatattgctgctggagctgcattccttgctgcaaagttcctccactatgacatcacattccatccaaatttctggcatgaattcaagacaagtccatatattgttcaagatgttgtccagcagttgaaggagctactttaggatacaacattcaatgtatttacataatactcagagatcctcttggtttatacgctgtagtgagtagtgatcactgccaaaagtacgtacacattagcatgtggtcactttcatcaattactgaacatctttcatgtaggtttttacaaccacagtgctatgtacaaaaggggaagatgttattcaaaagttgcccttttagttttggggaggt

SEQ ID NO: 60283 - DNA, 358 bp, Zea mays
  Clone ID: MRT4577_154980C.1
ttcttttatagaacactcccacataatcgccagttcataacacgcgtgtgtcgctaccacatatataataaagttctggccatcaagccatcaaacctatgaacttcagtcttcaaattttaacaaaccacataccacacaacaactaaatttcattaataatcttccaccaaatccaaggccccaagatcttcaaacaatctttcttcaacttctgactcatcaagcgacacatcaccttactcaataaaatcatcatcaccctcaaaatcagcttcgaaagtttcacctccaacatcccacattgaaccacagtgttattcatcatattttctagaaagaagattcaatttttggt

SEQ ID NO: 60284 - DNA, 255 bp, Zea mays
  Clone ID: MRT4577_154981C.1
aaagactatgggagaaacttttctttttggggtgggtttgtataaaacgcctgaagaactcaacactatttgtgcgggggaggctttgatttctggttttcaacaaaaactctcggattcacccgcgataaaaaagtgcacttggcgaataaaaatatgcggacgaaagcttgtttttcttgttcttaccctagggggggggctaaggttcaaatttttgggaaggttaagggctttttttttttttttttttag

SEQ ID NO: 60285 - DNA, 432 bp, Zea mays
  unsure (1)..(432): unsure at all n locations
  Clone ID: MRT4577_154982C.1
aaaaaaaaaaaaaaaagcttgtacaagcttttttttttttttttttttttttttttttatttttcttttttttttttttttttttttttttttttctggcgggtgctggtgcctgctttttgagggcccaattcgccctatgggggggggggttaaaaacacccacatggctggcagggtccggggcggggtattgcggccttgcctggcgttcgtgctggtgatgattggcttcaagctggccctgtaacgcgccgacccatgggcggtgtgcctacaaacggcgcgctcggggcccttgatcacgggggggggggacanntcccgccttggggatcaccgggttgtgggacgacaccgggcgtgcattgcgccagngccgatcgagggctttgccctggcgcacatccggcgcccccagcgcgtngaaca

SEQ ID NO: 60286 - DNA, 803 bp, Zea mays
  Clone ID: MRT4577_154983C.1
gcacgagtgtgtttgaagattggggtgatgtgaagaatcagaaaatagtagaagaggggggagtggcgtctgctgggatagaacaaactgttgtttcaaatgacagcgaaagcagaaagggtactgttttagaagctgagctccaagtagatgataatctggtccaagaagatgaattcgttgttgccaaggaggacaagaagccagcagttgccacagatgctgttcaagtagattgggtgaagacagacgaagctaaccctcaaaagtccaagttgcatgaggaaatggaagttctagacgaacttcttggaaaagaaaacatggagaacagcggtatttcgagcactgatgagaattatgctgaaaaaactggagatgatatcttgtttgaggatggcgttctgattgagaatgggttagccactgcttatgaacatgatttgctttggggttggaaggccctgcagcagctgctgatgagcctgggtttcaaaatggatacaacatgaaaaaggcataatctattgccatatatctaatgttcgtatgtcgcaattcggatgcaatggtgttgctttccaggataatttgttttgacccctgaggagactgccttgtggatgttcacggaaaaggctttgcactctagaaagctgctggcattgtggtattgtatgtatataatatgttcgttttccaggcgtgctgtatcttagcaggaatgagaacctgttattataaataatcaaccatcagttttactatcaaaaaaaaaaaaaaaaaaaaaagtcgacgcggcc

SEQ ID NO: 60287 - DNA, 366 bp, Zea mays
  Clone ID: MRT4577_154984C.1
cggctcgagatcagttggtgttgaatgtacattccacaccatatcacccaagggacaggactatgtggagggtgaaaatgcttccaaagcatccacatctgaatcgaaacaaaaggaaattctcgaggttgtcgtcacggaagttcttggttatgggaagttttatgttagactgtgggtgcgacggtcgagtgattttaagggatgatgctttacagattggttcaaaaaaaagcatatgctctttcaggttcttcagtccagtgtggatgactgcaggggttgtgctattcagatttggccttttcaaaagggttttccctatggctgggttttccctatggtaccgtcggcttgcaggagggg

SEQ ID NO: 60288 - DNA, 237 bp, Zea mays
  Clone ID: MRT4577_154985C.1
agcagtggtaacaacgcagagtacttttttttttttttttttttttttttttttttgatcgaattaactttttttaagtcgtttttacaattctggacgcattcaagccaagcagggcacacatgtacagctcactggcctttatcccgcgcaaatggatgaaattactttggggagaggaagtgaatatatgtaataatacatgcccaacttaattcattgcccgcacactagggg

SEQ ID NO: 60289 - DNA, 623 bp, Zea mays
  unsure (1)..(623): unsure at all n locations
  Clone ID: MRT4577_154986C.1
gaatgtacaaaaaatnncctgagccctccgnacagnnaggcaaaacnntgccgaagggtgccaaaagnaacttctnngccgcaaccctcccaagnaggnaggnaggnnnatggccaacnngtgctagnnatgttgtgcctggtataactatcgaagnngccttgagctccgtgcgtggtgagcgaaagnaatagttgtnctgaagcnnncacaaaaacccgcaaannncgaagccannaaactggnngcaagtagaaaaagccgaaagctgcgcccaagctcaaaactgnannagccgaagctgggctttttagtgcccaatcgagatggagccctgccgcgccctgaggaaaaaaatgacagagcagattgcancctgaaaagatcaaagctcctgctcccgaagcttcgaacaaaaatgctgactacatcatttgtcacgcttcgggaaaagaactaacccaagaagaagtactagaagcacgacactatgcccaaagattgaaatatccaaagggggccttagtgttcaatggtagtaacgaagaaagatttctgtactgtctcccggataacaaagaaatatccgtttgctgggagataggtaagagcataggattccc

SEQ ID NO: 60290 - DNA, 255 bp, Zea mays
  unsure (1)..(255): unsure at all n locations
  Clone ID: MRT4577_154987C.1
atgcgcccgacgcgcagacagacgacggctgctccttcggccgactcgccttccggcgccatcagctcggcaccttctgcctacgcggcattcacagcgctgggaccaggaccggcgcccgagctcgctggcacggtggcgacatcatcactcgccggcagaanacgtcgcagacgcaccggatcgagcctgagcccgccactcatcacaatactggcggccacgggcgcagcgctgctggtggagctgtacaca

SEQ ID NO: 60291 - DNA, 221 bp, Zea mays
  Clone ID: MRT4577_154988C.1
cttagagagtagggaatcgcctaccacaccgtaggagaaaacagagaaagatatttcgtagaaacctgaacatatgatgtaagggagctaccttgttgtgacctccatgaatgtgaacagaaggaatatatagattattttttgcatcttatccaagctttttttttagagggtgagcagggccaatcctgatatttacattttatggttcgaaagggatg

SEQ ID NO: 60292 - DNA, 183 bp, Zea mays
  Clone ID: MRT4577_154989C.1
ggtgttatcgtatcggaggacgtctgaagatgtcacaattactcacgcccctggagtggggctttaggaagtgttcgttgtaccctaaacctaatatactcggctgattcttcaattgtattcctaaaagatactactcccaaaaccaaaataaaaaaactttaaaaaaaaacccctttttac

SEQ ID NO: 60293 - DNA, 368 bp, Zea mays
  Clone ID: MRT4577_15498C.1
gacgacccggcgactgctgcgccgggggatcctcataccatacgccgcggcggcctcaataacagcgacagctctccatggcgacactaccggcaaccggccgaggggagagacgattggctagagcgggcggcctatctgcgtgcgacagcggcaccccggtgtggtcgcgtgcgccagtcggcgccgtgcccaggcgtcaagctctgcccactccggattccgttatgcactgactctagcgctgttctgactgactgtcctagactctgacttccacctggtgagcgatcttgactcctccgattcttgacctggcactgtttcgattgaatccgacgccgacgatgtagatgagaacaccccag

SEQ ID NO: 60294 - DNA, 286 bp, Zea mays
  Clone ID: MRT4577_154990C.1
ccggtggctgggttcgggggtgagcggatctagaagaagcacaggggtgtgcgagtaccgctgctcggtgggcctaacggtgtggccctctgacgaccgctacattcgcagccatttaagcaactagggtgaggaactctagtccaggattatccacaaccgggagacgcggaggccctgcggttgatgctttatgagcttctccacagaggaggcgatgcggaacggcattgaggggatgaacggaaaggagctggacggtcgcaacatcaccgttaacgaggcc

SEQ ID NO: 60295 - DNA, 182 bp, Zea mays
  Clone ID: MRT4577_154991C.1
acaacaaaggacactcaaccgaggggccctcaacagcgagggaagggtcagttggggaagaatcacacgctgatcagtcaaaagcgcaccagtttaaaggaatccaacaattgagatggcaagatttgggaggaagtgtggggaaatgaaacccggggaaatcttcattcccggacccgggg

SEQ ID NO: 60296 - DNA, 3288 bp, Zea mays
  Clone ID: MRT4577_154992C.1
atgccgcaagctggaggcgcaggtgtcgagggacagccgagaggtgaaactttggcgcctcacgaactcaaacggagaagcgactcgtttctcgtctctgcgctgcgagcgaggctcctgctcctcgcggtctcgcttccctccaagttccaatccagcaccgggcgccaccgctaatcagtgctgatatatgaaccccgcatttggacatttggtggtggcaaggcaacgccaaccttccctgttgctgctttgaatgttctggtggttgtcggatggatcgccgcagttggctctggaagcgcaagtcattggataagagccctggggagagcgatagctctggctctgcttcatcacactctgagccttccttcgatgatcaggaacctaaacctgtgtctagtaattcttctccaaatcatagtcattcgcctgatgtttcttctagaataatttataatgagaatcaagaagctgaaagagcagaatcattgaatgagaagctggtgttagcaactagctcgaatgattcttctccacaacatgatcaatcgatgaagccagatatataccaatcacctctgctattcccaaatatcaggaatgatgatgttccagattctgtaaagaatttgaatgagaaggtgtccccaaagtttaaggtcgatgatgtccaggattctgtaaagagtttgaatgagaaactttctgctgcccttttgactatcaatgataaagatgacttggtaaagcagcacactagagttgcagaagaggctgttgcaggttgggaacaagctgaagctgaagttgcttctctgaagcaactacttgaaactgcatcaaagaagaatacctctctggaggatcaggtcagccacctagatgacgcccttaaagaatgtgtaaggcagcttcgccaagcacgtgaagaacaagagaataaaatccatgagacagttgctaagaagtctaaagaattggagtctgagaagtttgagctccagcaccatattgctgaactcagtaagcagttgcaagccacgaaactagaagctactacggtgcgtgtccagcgtgatctgcaggaaaagcttcagatagtggagaaagaaaacaaagacctcaaggtagaattactcgcactgtccaaggacctgaagatacttgcacgggaaagagacctgagcaaccaagcagcagaaacagcaagcaaacttcacctggaaagtgtgaaaaagataacaagagttgaggcagaatgccttaagttgcgtcatttaacgcggcgtacgtccttgaccaatgattcaaggctgataactaacagtgcttgcatggaatctcagactgacagtcagtctgacagtggggagcacatgctagttgatgagatgaaaaattctgattcatgggcaacagctctgatagctgaacttgatcagttcaagaatgccaacaacgacacaagaaatcttgtgaataattcggttgaaattgacctgatggatgatttcctcgagatggaaaagctggctgcactgcctgaagtagactgtgtaagctctagctttggagctgaaactgattctgaccaaggtgtgagtagagataaatcatcaaaagttaaaactgaaccattgcagtgtcaggtgacagatttgcacgcaaagatcgagaagattgaaggtgagaaaagggagcttgaaatggcccttgcagatgccagagttcagcttggcacatcatgtgatgctctaatggtggccaacaacaggttgattgatttgcagatgcagttggacttggcaaatgagtccaaacatgctgctttcggagaagctgagcgactgaatggtgagaggaaagatttggcattgcaactggagtccaggtcttcacaagttgatgagcttcagctgatggtggcatcgctggaaaagaatgtagacaggaaggtgttggaattgcagttagagttagtttctgtggaggctgcagatctgcgcaagacagtggcttccctggaagagaagattgatgcagagataactctctctatgcagcacaaaacaaatgcagacctggcagaggcgtccaaagaatcattagaggcgcagctgcagtctgcaaacacagagatagggaaactgaacgggattgtgcaaactttagagaatgaggtgaggaaagagacagattctcgtgaagaactactgaaacagatagaggctatgaaaattgagtcagagagatcactatctgtggtgtctaccaaagagtcattagaggtgcagctccaggtggcgaattcagaagttgcaaagttgcgtgggatggtgaatgctctggagtgtgatgcggcgaacgagaaggcatattcttcagatctccagatgcaacttgaggcagtggaaggtatcaggaaggtgttggaatctgagcttgagtcttcacaccaggaggtgatgaggctgaaggagaaagtttcgtccttggaagcaaggatcaaggaccagacctcgttgcttgtagaatatacagctaaatcagaggatgcagtgtcccggaaaaaggcaatggagggtcaactagaagcagcaaatctggaagttacaaaactgagaaacaaggtgagcctgatacaaggcaaggtggagcaggagaagcttctgtcagaagagtacgaagcaaaatgccgcaagctggaggcgcaggtgttgagggacagccgagaggcgaaactttggcgcctcacgaactcaaacggagacctgaaggtgaagcaggagaaagaactagtcagtgctgccgggaagcttgcggagtgccagaagactattgctaaccttggccgccagctgaaatcgctaacagatcttgatggcgtggtggccgatcctgaaaagctggaatcgagggacacgcacctggacttcagagatggcggagacgtggctgatggactgtatgaactgggtcttcctaagaggaacggtagctgcctctcaccccttcggtcggatccgtcgccgaggggtttgccgtcccttagtagctacctgagcaaaacaaaaaggtgaaaagtctgatgggatcattcaccattgtgcttgtgcataaattatttgacagtctatggatgatgccagttgtgacctggtggtagatcggtgtacatttacagaacttgatggttgctcacatgtgtactttctccttttgttgtgctctcattttgcgagactgcaaaaaaaaaaaaaaaaaaaggggaatttttttttt

SEQ ID NO: 60297 - DNA, 230 bp, Zea mays
  Clone ID: MRT4577_154993C.1
tccttcccctcagctatcatcctaccttaaacccactaaataccgctacaaacccaagcgcttttgcatattatattgtcgatcaccacattccaaccttcctccccttttctctctctttcactctttttctctctccaacaaacaattgactccaaaaccaaccgccacaagcacaaccccttgcttgctagatatcactctttctctctctgctagctctaacgcca

SEQ ID NO: 60298 - DNA, 267 bp, Zea mays
  Clone ID: MRT4577_154994C.1
gctgctcgcctgtcgattccgcctcatcgcgtcccgtaactccatgtccactgggaccgggaccctgggcggcgggcgatccccggctggcgcgcttcttaacctgcgcccgcgcgcaacccggggtggccccaatccgttgcccgggctgcgcgtcggctctgggtgccgtcacataactattggttccgcggaagcaagcccgcgccccaacggccccgtttcccaagggtgctgatttatttttcccggcagtaatctcgaaca

SEQ ID NO: 60299 - DNA, 396 bp, Zea mays
  Clone ID: MRT4577_154995C.1
cccacgcggcgtccgcgaccgtgggtcaactctgtccttcagcagagagatcgaattctattatcatctttggcttcccaaaatataacaacttggtcactttctcccgttacagtgcatgcatcagactaggacatgcagaagagttgtgtcattttattgatggttcatgcccagaaattcttagaaaatttattccatcattccataaattcagccagttgcaagattttaaatagactgccaaactgtggagcaattggggcacataaatactattgacatccaatctaggcttttagcaggcctaaccacagctagaagaatttatagagcagttgttcgcatatttgttgttatgaccaggcacaaccttatttgtgtcaaattgcattc

SEQ ID NO: 60300 - DNA, 351 bp, Zea mays
  Clone ID: MRT4577_154996C.1
aattcggcacgaggggaggcaccatctccctcccttcttcatacccacaagtcctctcctctgcggtctcctctcctctcctgtctattttgtgcaagaaacttccttggacaaagatgggagtgcagagttactacaggttattctgctgcgggtgcggcgccaatgcggcggccggcgaccgggaaggcgacgaggacgggggtttcgaggcgttcgacgacaagggggccgccgaagccgggccgcgggggctgtcgtgggcgcaggtggaggcgatgacgggcaggttcacctcggccgtcgtcggcgagggcggattcagcaccgtgtacctcgcgcgcctctccg

SEQ ID NO: 60301 - DNA, 210 bp, Zea mays
  Clone ID: MRT4577_154997C.1
cggaaacaatcctgaaaccaagccatgggtctgcaggaggaatttgaggagcatgctgagaaggcaagaccttgcctgagacacgacatgagacactgtctatcgggtcacagcagcaggtgagtgtaatcgtcgcggatatcacaaggacagcatggatgctgagtgtagcatagtaggtatatatcagtacgcagagagtcgctaacc

SEQ ID NO: 60302 - DNA, 202 bp, Zea mays
  Clone ID: MRT4577_154998C.1
acttataaatgggggaaggggggcaaaataagtactacattattaccattactaataaaaacgacaaaatgttaaaaagggttaacataacaaataaaccaaacttatagtctgggcagcaagacaacctattacgtgcaaaaaacctcgaacaattttgaaaactaaactatcacacggtttttaactagggataaaataa

SEQ ID NO: 60303 - DNA, 269 bp, Zea mays
  Clone ID: MRT4577_154999C.1
ttgggtcctgtatagcgggcgccctcgccctttttttttttttttaggttaaatgcactaaggcaacatgcttatactgaaatcattcatataattgactacacccatgtaagaacgcaatatccatttcggacggttcacatcatcaccaatctaaacttcgttctacactcatctaaaccaaacacataaactggtaagggctagtcgctcgcatttaaagaatttttgtttacttccatgctagtatacaaagcattatttttcgc

SEQ ID NO: 60304 - DNA, 654 bp, Zea mays
  Clone ID: MRT4577_15499C.1
attgggtacctcgaggccggccgggatccttatatatccccctcttcgcctcctttctgggagcaactacgcttccgccttccatccgtatccgccgatgtcgtcacctcctttccccactccgatcgaatccatggccgccgagggcgacaacaacatgatacaccctctaagatccgatggagaagatttgccagtggcaatacgctgccgattatgcagccacagaacatccgccacatggtcgatgatgactgcgcctactgcgtgatccctcttcctgaagaaccctccaagatcctatccaaggaactggagaagtgctccctgaacctatatgtctacatcgccgacgccgccgtctctgagggcgtgtccgacctggtgaatgccgcctccatcaacgagatcgccgcctgcgatgaggatgtcaccaactgtcatgctgacttgcgctgggactatcaaatgacgtatttcaacctcatcctgggtgtgaaatatctgaacgtcatgagtgctgttccacctgacctgtgacaatgacgctgacatgttcaaggggaatacaccataagagattcgccagacctacaacagcatgaatgacttcacacccgaggcggttatcccagatccgcaggggagaaccag

SEQ ID NO: 60305 - DNA, 291 bp, Zea mays
  Clone ID: MRT4577_1549C.1
gccgtcatcactgttcttttgttcaccaatgcagcgggggcgggtaatacaaacatacacggtgatggacatatgcacatataaacaatcatccccataggtcatgagtacaccagatgtacggacacacactgataaacgtcagccaaaatgatatgcagagctgactgagttatggtaaactcaccctcccgatcgccgggggcaagacatggtttcagttatacgtcatgaggcgagaatgccttcacgctatgcgtacgtatccctgcaagggtcacgcctgtcgac

SEQ ID NO: 60306 - DNA, 495 bp, Zea mays
  unsure (1)..(495): unsure at all n locations
  Clone ID: MRT4577_154C.1
aaaacacactctcacatgcatcngaagagacacactgacactaaaaagatcgaaatggcgccgggatcgtggctgccatagaaggccaaggtccttaaggcatcggaccggatagtggccgacaactacctggccgtactcgcacatgggttctgtcgccgccaggctcttagctgcactggccgatcaacatcgaagaccatggctgccggatggacgcggcgcggcacactccacggcctcacggaggcgatgctgacggcggccctcgccaagctgatgcgcatgagccgcacgagcgacgggtatatcgaggagtacagatgattatagcccaagacgagcatccgggcgccgatcgcgacagtgcctggagcacgggcggatcttgccgtacatgggcaacaaggactacatgaactggagctagtggctcctccagaggtacgtgatcggcaaggagacctgcagtgcggaacagctaccactacctgt

SEQ ID NO: 60307 - DNA, 220 bp, Zea mays
  Clone ID: MRT4577_155000C.1
actttactttcccttgactttgattgactttcctttccaaagctatgatcaaggaagcaggccaggaatgctcttatgagaaatggagaagcaggaatggtattcccaagcaaagatagaaagaagccttgccttcccttagacctggagacatatccaccaagaaaccagagaaagctatgaatgaaacttcacttaacttatagtgcttcgtccccgt

SEQ ID NO: 60308 - DNA, 281 bp, Zea mays
  Clone ID: MRT4577_155001C.1
gtttttcatgtggttggtcgctcacaagaaggtgtggacagctgataggttgcaaagaagaggtatggatcatccggagaggtgtccattatgtgatcaggatcaggaaaccttaaatgatatgctgctgggctgcgtttttgctagagaattttggttcaagctgcttcttcttgtaaatctacaacacttggcccatcagtcctataaaagggtttttatggattggtggcaagacttgagcaccaagattcctgggattgcaagaaatggtcttaact

SEQ ID NO: 60309 - DNA, 303 bp, Zea mays
  Clone ID: MRT4577_155002C.1
tttgggctgagctttttacactgtccacaattttttctggcggacgtgaagctgaccagttttacaatacatgcactgagctcgggacccctgatggctctatatgggcagagggaatgcacctggctcgttcatgccgctttaagttttttcagaatcctacaagaaacttaccaccaccggctgaagggagtgcgattctttccactctccccatttcgacaactgtgctactgggatccttgaaggaggccaactgctgagcaagcattacaacatgctttgtttaatgtgtgccattgg

SEQ ID NO: 60310 - DNA, 357 bp, Zea mays
  unsure (1)..(357): unsure at all n locations
  Clone ID: MRT4577_155003C.1
ggtccggccctcccgggntacagtgcacctgcttctggttattgatgatttgcgaattcacctcaggattttttttttcaaaagcagcatgactgcatcatacagatttgattctttttttctgcctagtctgtaatctatcaactttgctcttgttttttgagtaaaatttattcgtatcactgatgtcttgaatttaatcacctagattttttcttcctccaggccattccagggatgcttctagctctggtactcttttttgataatcggaagttcaaggatgtgaattttgcaccagatgtgttttcgccaaaacggcggaattatgtgtggcatgctgtaacaggttatgga

SEQ ID NO: 60311 - DNA, 389 bp, Zea mays
  Clone ID: MRT4577_155004C.1
caggagggcgccgacgtcaccaacgcatcgtgctccgtcgcagatctccgacaccgagggggccgtcataagaggacgagcgcattgagaaaccgttccccgtacaacatggcggcgggttctggcccaaacggctgtgctcgatgctgctggcgctctacaacccacttactgcgcaggacggcgccaccgaagaggacgaggacagcggcggctgttgcggccgatactacagcgccctgccgaaagcccacggaatatacgatgccggcaactgaggtggcggtggaagcgccacctgcgatgaatacaacgacgtggacgtggtgagcaccacctcagacttttggtcctacctggagacaaggggtgggcaccggccccgggac

SEQ ID NO: 60312 - DNA, 884 bp, Zea mays
  Clone ID: MRT4577_155005C.1
ggccgcttttttttttttttttttggtaaaatctcatctcattattatttattattcaatagatacgcaattatattccatatatatacggcaggtactattcttggtttgtcaaatcacacagtttgcatcgattcaagtgactcacactgccgcccgttttgcttcgaccttatcgggaacgcgataagagctcctgtacaccgctgccgcgccgccgtcggccagtccagcgcggtacccggagttgtaagccgccgcgtcagacatcatcacgtcgctggcgaccagcatcccgccgatcgcgccgctgaccagccccgcggcactactgggtagccgacgaaggcggcagcggcctcgtcggctctcgccagaggcgccgcctgctggccgacgatggggcccaggcggtacgacacgttgagcacgccgcgaggctcgcaacggtgcaccttgcggacctggtacgatgcgagctgcggaggccgggggccagggtcggacgcgccgccagcggtggcgaggatgtcagccaggggcacgatgacctcgccgacgtcgcggtcgcccagggcgcgctcggtgcgcaggagcacgtggaggcagccggtggccgtcgcggcggtgggcgggacgttgaaccggaacgaggtgttccaggacgggtggcgcccgccgtaggggtccggctgggtgcactgccgcgtcagagggtcgccggagatgctcaccacggcgtatacctccatgcgcgagatcaggttcaccctcttcaggtccttggccgacaggagagtcacctccaacgccctgtacgccatggcgcgcgctctgtgtatgattgatgggtgcaccatcccggccggcctcgagggtcccaa

SEQ ID NO: 60313 - DNA, 345 bp, Zea mays
  Clone ID: MRT4577_155006C.1
cccacgcgtccgcttcggtggtaacgtatatgtacgttatttcggtccctccctcaggcaggatcggggccgcgattgactagtaggcaggcgtcagtttattcttgttccgatctgaccctgcgcaaatgtcaaagggcaggcagagacattgttgctgcgtgggggccaggcggtcaggccaatcgacgcggcggtgagtggtaaaagcgtgaggcgcttttggacacgacaacgacgcgcgcgccagacgcgcgagagcattgttgctgtcttgctcttgccgccgtgcgcgtgccgtcgatgccggggccgggacctggagaccgcatgctttatttgtgc

SEQ ID NO: 60314 - DNA, 162 bp, Zea mays
  unsure (1)..(162): unsure at all n locations
  Clone ID: MRT4577_155007C.1
agatgtccagaacgcggccctagcgtgataatgtnctggagccgctgactagctacctattgctagttcactcgtttagcggcgatgagtaacggagtgtcacccatcaccatgggtggcngtgtgagcattgtctctggtgnnccattgaaatggtttggg

SEQ ID NO: 60315 - DNA, 343 bp, Zea mays
  Clone ID: MRT4577_155008C.1
aggagcactttacacgatcgacagaatgacgcttgaggcgaacctcttgcggctgctcctgaggcgtctgagtcactactggcacgacctgcgacgctctttatccgacgcctataccaagctacctgactagttgcctcctggcgcgccagtgccaacgctgaactccaggctcttcgatacagggctgcagtggacggtggacgaacgctccctgacggacgctttatcgtgcttcggaacggtcacctgaagtgaactcatgtatgacataaactctcataggtcaaagggctttggatccgttcgatttctcaaatgatactgtagctaattgtgccaa

SEQ ID NO: 60316 - DNA, 251 bp, Zea mays
  Clone ID: MRT4577_155009C.1
ccacgcgtccgagcatttcccgtgctcctctcgttcctgtttttcggagcacactcatccacaaggggagggtggtgctagccccaagcactagtccctgatggagaagctcgccgtcatgctccacgtcagcagaagtaaggccgactcctactcctactcggactccgacagtgacgagcggtccagccccatcagcaccgactgccgacgagctaaggcataccttcttaatcgacgccgcctccact

SEQ ID NO: 60317 - DNA, 280 bp, Zea mays
  Clone ID: MRT4577_15500C.1
aatcaaaatcaaacttattttttacccttaccttccacacaaaatggctgtgctttttaaactgatcttaccacacctcatctaacttttaacacatattccatcccatccaaactacccaacttacaatctcttcctccctgatctgcccttctaagcctaaccttcaatccaaaataaagatcttatcccctatttctacccacaaaaataatcaaccatccttataaatatttaatttttactatctcaccactaactcccatttattctacaccct

SEQ ID NO: 60318 - DNA, 244 bp, Zea mays
  unsure (1)..(244): unsure at all n locations
  Clone ID: MRT4577_155010C.1
cccacgcgtncgnggacgcgtgggcggacgcgtgggcggacgcgtgggagagcagctagcgtgatgtttatgtatcttcgtcagtgttgcaaaagttaattgatatgcagctgatgtgtctggctttgctggtttgcaaaagatgcatgcatgtgttggaactcctaacacaaatatatatatggggtgtttttgtctactgcccaaaataaaaaataaaataatatttaaataataataattg

SEQ ID NO: 60319 - DNA, 522 bp, Zea mays
  Clone ID: MRT4577_155011C.1
catcaataaatactttattatgaatcatcgtgtgggaaatgagcacaaaattaggaattctttttacatttaatgtcatttctgactctggtgtcttcacaaccagaatgaagcttttcatttgttcgttcgtaggctcctcccgtgcttcgttcaaagcactttgaaaacataagggaactcaagagggggaacgcaggttggtaagtggataaagtcattagtcacatagcttggcaactctcgtgccctgactggttttgctaaagtttggacaggctgtaattatttggtaataatgtataagaactgtttattggtaaaactttctgttaagactttcaatatccctggcccctttgacatgaaattaagagaagcaaaatgctcaggtccattgctgcaacataatagatttacccgtttttaaaaatgtgttgtcagcccccgatggagcaggcagggaggcaggtgggccttccctccagggaagaaaggacccggcctgctttatccaactgc

SEQ ID NO: 60320 - DNA, 216 bp, Zea mays
  Clone ID: MRT4577_155012C.1
attcggctcgaggtggcacacactgctatccatgggcggcccactgagcgtgggcgaacgactctgacatgaagacgggctagccgtcactgcatctaggcactcgtactgggaacttaccatattccgtcgagggacaacctctgtgcctatcctcctttgacatggaggtggacaggcagcactacatggacgtgcttcagtctgccacaccga

SEQ ID NO: 60321 - DNA, 310 bp, Zea mays
  Clone ID: MRT4577_155013C.1
ccaagctcgatggcggctttcacattgcctatgacggacaggctggtaagtaggacctcatgtgctttgctgtagagctcgtggttcttattgcgaggagattgcccattgggctgtgacggtgattaatgttctgcctgctcagccattaacacactgtctgcgatccaaagggtatggatggccttcaagagtcatcaccctggtaactggggaaaaaccatacccgttgtaagcatggtggcgagtttttggattggggcttcgctttgatagaacatatcatctgtggcgtcaatgattactgtat

SEQ ID NO: 60322 - DNA, 625 bp, Zea mays
  unsure (1)..(625): unsure at all n locations
  Clone ID: MRT4577_155014C.1
ccggccgggatcaacgcagtctacctctagtcaatcgctacctcgttgtgcctcttacctaccttaattaataactcagtcattctttcaatcccacaaacccaaccaaccttcaaaatcaagtacactatcgctaccatcgctgccttcgccaccatggccctggccaagcctgctttcctcaacactgacttcgctctcactgagggcaagccttacaccatccgctactctggatgtgactctggctgcaccatcatcctccagaacggagagtctaccgacctcaaggactacaagaccttgaccagcggcgccaagggtgactctttcaccttcactccttctcagctcccctcggacacctacaacttcaagatcaccgactctgctggtgacatcaactacagcgctcagttcacctacgagggttcttacgacgctccctccgtcacctccgctaccaagtccgctgtcgagaccaccgctgcccagaccaccgagcaggctaccactctcgccagtgtcaccaagccctgtcgaggaggccaccactgctaagcccatcattcccactcacgtccccgttccccccaagaacgncaccactcctattgctaccccc

SEQ ID NO: 60323 - DNA, 584 bp, Zea mays
  Clone ID: MRT4577_155015C.1
ctactgcgaacttcccgtagtctcatctctctgcgccgctcgccatgtactttacagccgtcgctgcgctggccgacaaaagcatgttcgcggtcacgtaaagcacatcttgtgttcccagtgcgccaagcgctgccccaaggaccaggctatcaagagggttcaagtgaggaacatcgtgaaacaggtgcccatcaggaacttccatgaactgtgcgtctatgatgcctacgtcctccctaatctgtacgccaaggtgcacacagtgcgtctcgtgcgagatccacgctcacatcgaccgcgttcgatcccgtgagaatcgaactcaccgcaagccaccggaatgcttaacgtgcacgtatgataggcctgctgtggcagaatgacgacccctgcctgggactggagctgctgctgcaactccactacctgtagctgctctaccataagctttatcttttctaccgtgttaagtcttctgaccactctgtctcggaattgccgcctatgcgagtgtgcatctgctatattagagtaacgttttgactataggctggacattttcatatgatgtgaacatctga

SEQ ID NO: 60324 - DNA, 350 bp, Zea mays
  Clone ID: MRT4577_155016C.1
ggggaaaaggaactttttatttttgggtggccccataccttattcaaaaaactttttttttggattaccacttataagccctctaaaagttttccccccccatgattttttttttgaaagaggccccttggtttttcaaaaccagttgggcaaagggccacaattttttttattttaaaaagggtgggggggtaaccccaaacctctgggaaaaaaggcacaaccttttgtttgtgaaaaaagaaacaccggtttctgccacttacctgctaaaagggaggaaaattttgcttgtgcaaaaaaccacgggggttattgccgcccattttttaaaagaaaaaaattttttt

SEQ ID NO: 60325 - DNA, 1506 bp, Zea mays
  Clone ID: MRT4577_155017C.1
ctggagctcacgtttccgggcgcctcccgcaacggccgctagaatgctgtgctaccccgcagtgccacttccacagtccccgcccagccaggtgcaccacgccgccaccacagcctccgccccggctgcgttcacccccgttgacctccgcccgcccggccgccatggacccgcgcttcccgccgccggcgccgtcgtcctgcttcggcgggggcggggagctcccagcacgggggcaccaccggcgggcgcactcggagacgttcatccggctgcccgacgcagacctgctgctggacccggacgccgacttcggcttctccgacatcgacttcccctctctctccgacgactcgcccgcggcgtccgacccgacgccgcagccccaggccccgccgctccagccgccgctgcagcaggcggcttccccggcgtccgcggcgccgccgaggccgccgagcggggcgcacatgcggagcctctccctcgacgccgccttcttcgacggcctctcgctgcagggaggcggcggcggcgggggggtaagagggggcgtggcggggcacaagaggagcggctccatggacggggacacctcgccgttcgagggcgagtcggcgccgccgtccgtgctgccggactacgccaagaaggccgtgcccgacgacaagctcgccgagctcgcgctcctcgatcccaagcgcgccaagaggatcctggcgaaccggcagtccgcggcgaggtccaaggagaggaagatcaagtacaccagtgagctggagaggaaggtgcagacgctgcagacagaggccaccacgctttcggcacagctcacgcttcttcagagggacacctctggtttaaccactgagaacagggagctgaaactccggttgcaggccatggaagaacaagctaaacttcgagatgctctaaatgatgccttgagggaagaagtccagcggcttaagatagccgcagggcaggtccccaacatgaacgggaatcccttcaatggaggactatcacagcagcagcagatgccaagctatttctcacaaccacagcagatgcaatacttcagcggccaccagggccagcatcaccatccgaagcatgacccccagaattcttcaaacggcggtggccagcccttgagtgactccatggatttcatgtgaggactcaggggagacagctcaggagtgttgcctgagatcacataccaacttcaactaaagtaatgtaaatgtagctgatgtataccatattcagtgttatgatatgaaccattgtagtttagctagctgttccttgtaccattaatcaaaagttcattcatggtgacaaacctatcatcgcttttgttctggcgttaaagtaaattggcttgactggttgacgagctgtcgttgtaaagttgttcctgtaacagtgaaggaatggtttgcggttggaacgtggttttccccctgctgaaagccgttgcatttcgtgattggcgtt

SEQ ID NO: 60326 - DNA, 214 bp, Zea mays
  Clone ID: MRT4577_155018C.1
ggacgcacgcgtgcgctcagcacgttctgcaacctgaagagctcatgtgatgtctggagatcgtgttcaacgtagcaccatcacgggcgggctcgtcctcatcaccatgctcatcgtcaacatcaaggtgttcctgaacgcgaccacgttcaagaagcatgccatgcacacgcttctgcacggcttgtagtgttggaagaagcgcatgaaactg

SEQ ID NO: 60327 - DNA, 242 bp, Zea mays
  Clone ID: MRT4577_155019C.1
aaagcagacagctaacttcaccatggactgcaacggtctcaacgaaggggacgttatggggaaacagggccagtacatcgactaatactattgcagcaatggctacattaatggtgtcggctgaaccagagatggtggcattagcgcttagaggcttgttgatcgcatgagccggctcatccactttcactcgcatattgacaacgcctacataacccacatcgtcttagactaaccaatca

SEQ ID NO: 60328 - DNA, 448 bp, Zea mays
  Clone ID: MRT4577_15501C.1
ccagagttatgatttttggcctcgttggtggactctagggggggtgggagctcggcccgcgcacatgtattgcgtgcatgccatgaatataaacagctaccttggggcgtgcggtacatgtatgggacattgcttgagttacctcacatcattactactatttatcatgttcactcttataaggaagcctaatggaagagaataattcgatgcgtaaaccaagcctactctactatatatatgtgtgcactctaaaattgctgcagtgtgttaattctctatccccaaacacactactaataacatgacttgcgagtaagatgtactatatcaattatgttcttcactacattgttggtgccagttaacagtttgcacgaaaccctggctgtcgttctatacgatacaatctcacgtacgcgtgcatcaacgataaactatactgttc

SEQ ID NO: 60329 - DNA, 837 bp, Zea mays
  Clone ID: MRT4577_155020C.1
cggacggagacctctccttctccgacctcgacttcccctccctctccgacgactccccggccgcctccgacccaaccccgcccccgccgctgccgcagccggccccggccccccgcccggccggcggggcccacacgcggagcctctccctcgacgccgccttcttcgagggcctcgcgtttcagggacccagcgggagcgccgggggtgggcccgggcacaagaggagcggctccatggatggggccacctcaccgtttgagggcgagtcggcgctctccagcggcctgccggactacgccaagaaggccatgcccgcagagaggatcgccgagctcgcgctcatcgaccccaagcgcgcaaagaggattctggcgaacaggcagtctgcggcgaggtccaaggagaggaagatcaagtacaccagtgagctggagaggaaggtgcagacgctgcagacagaggccaccacgctttcggcacagctcacgcttcttcagagggacacctctggtttaaccactgagaacagggagctgaaactccggttgcaggccatggaagaacaagctaaacttcgagatggtatgtccttgtctttctttggaaggtctaaagccactgtcatataaggcccagaaagagactccacttttcctgtttcaagaacattacgaggcaaatgctctaaatgatgccttgagggaagaagtccagcggcttaagatagccgcagggcaggtccccaacatgaacgggaatcccttcaatggaggactatcacagcagcagcaggtgccaagctattttttacatacacagcagatgcaatacttt

SEQ ID NO: 60330 - DNA, 730 bp, Zea mays
  Clone ID: MRT4577_155021C.1
ctgccttgtttattgagaacaaacaaaggaaggatggttcatggtatggcacatggggtatatgtttcatttgtggaaccttttttgcaataaaaggattaatagctgctggaagaacgtatgatactagttcttccataaggcaagcatgcaactttttgttgtcaaaacaacaagctacaggtggatggggggaaagctacctttctagtgaaatagggaattatattaatggaaatacccatgtagtgaacactgcttgggcgatgctgtcgttgatatatgctggacaggttgagcgagatcccataccactgtaccaagcggcaagagaattaattaacatgcaactagacacaggagactttccccaacaggaacatgttggatgctttaactctaacttttacctcaattatcctaactaccgcaacttataccccatttgggctcttggagaatttcgccagcggcttggtgcaaacaaaaaatgataccagacaatgttcataattattgtattgctaatgacattgagggtatagatataagtatggttccttgcaagaacatatatattgttttccatgatagtatcaaaccgcttcattctattgtgagcatggatgtttgttatttgaggaatcaatgacttatacattgcatagatgccataactggcactttgtatcaacagatacgcatatgagaataagtcagctcttcattt

SEQ ID NO: 60331 - DNA, 1768 bp, Zea mays
  Clone ID: MRT4577_155022C.1
gggtacctcgaggccggccgggaaaaaaattcaaaaaaaaaaaaaaaaaaaaaaaaaaaaaaaaacccacgcgtccgcggacgcgtgggtccggcagcggcaggcatctcctctcccgccccgccccgagcaacgcccgctaggctcaggctgctgctacccgcagtccccatccaccctacccgcagtccccaccgcaaccgccgcctcggcccgggctgtgttgacccccgttgacctccgccagcccggccgtcatggacctgcgcttcccgccgccggcgccgtcgtcctgcttcggcgggggcggtgtgctcccggcacgggggcaccaccggcgggcgcaatcggagacgttcatccggctgcccgacgcggacctcctgctggacccggatgccgacttcggcttctccgacatcgacttcccctcgctgtccgacgactcgcccgcggcgtccgacccgacgccgcagccgcaggccccgccaccccagcagccgcttccgcaggcggcttcgccggcgtctgcggcgccgccgaggccgccgagcggagcgcacatgcggagcctctccctcgacgccgccttcttcgacggcctctcgctacagggaggcgggggcgtggcggggcacaagaggagcggctctatggacggggccacctcgccgttcgagggcgagtccgcgccgacgtccgtgctgccggactacgccaagaaggccgtgcccgacgacaggctcgccgagctcgcgctcctcgaccccaagcgcgccaagaggatcctggcgaaccggcagtctgcggcgaggtccaaggagaggaagatcaagtacaccagtgagctggagaggaaggtgcagacgctgcagacagaggccaccacactttcggcacagctcacgcttcttcagagggacacctctggtttaaccactgagaacagggagctgaagctccggctgcaggccatggaagaacaagctaaactccgagatgctctaaatgacgccctgagagaagaagtccagcggcttaagatagccacagggcaggtccctaacataaacgggaatcccttcaacggaggactaccccagcagcagcagcagcaggtgccgagctatttctcacaaccacaggggatgcaatacttcagcagccaccagggccagcatcagcatccgaaccatcaccctcagagttcttcaaacggtggtggccagtccttgagtgactccatggatttcatgtgaggaccgaaggagagacagctcaggagttgcctgagatcacataccaactaaagtactgtaaaaaggttgctgatgtataccatattcagtattattatgatacgcgtcattgtaggttagctagctgttccttgtaccattaatcagaagttcattcatgcatgaattgacaacctgtcattgctttcgtttctggggttcaagtaaaatcgtttgactgcttgacgagttcagtgtcggtgttgccatgtaaagtcgttcttgtaatagtgaatgaatagttcccggttggaactagtggttttttacactgctgaaagccatcgtggttggcaataatgtctcatggtcaatgaaacgtgaaataattctgcctgtaaaaaaaaaacgtggtaacaaatctcaacaagctggtggagctaccaaaatgatccatctgaagttactcagaacaagatgcaatcacagattgattatctttcgctgaaataaaaaaggggcttccgttt

SEQ ID NO: 60332 - DNA, 405 bp, Zea mays
  Clone ID: MRT4577_155023C.1
atgccaattaaaactttcagcatacgttatttatttttttacactctcataattgtcttttgattcttttaaacaaaacatcaagcaaattattttctttttaaaagggaccggaaaaaacccctccattttgggaaaaaaagaaagcacgattctttttagggttaatgtttttgtatcatgccggacacccaatgataaagcccccctgttaacacctaaggctaccactaaaatctgaaaaaagtctgacaatacgccaacggaggcaaaaacctaaaacggagttctttacccgaacgtttttatttgccagcggcatatatcctgaatccaaaaataaccgagcttgttcctgggcccagctaatttctaccccaaaaaattttccgatgacagtttaag

SEQ ID NO: 60333 - DNA, 317 bp, Zea mays
  Clone ID: MRT4577_155024C.1
attttatatttttttcccacttaatgacaccaatttattattaggggatagcctccaaaagaagcccacaacgcacagcaagcaagcaacggaacaacaatacgcaacctccgatgccgagaacatcaaccacgagacctaatagattggtaatgacgataaggttcaacaacacagcaaaccaacaatacttctaagaaatggcggttctcactccgccacggtcaccagctcaaactcatttaaggacaggttgctgccccccttgactgacccactaattgaacttttcaatagctttcacaaatcccccactt

SEQ ID NO: 60334 - DNA, 296 bp, Zea mays
  Clone ID: MRT4577_155025C.1
gacaatgctattccgttattgataatgtgtggaaatcaagttctaataagtttgggagggaggttaattcatttaatgtgctgtatgaattaatgccaactgtatgcctttgagagtgaaatcagaataatgtctctccactatagcaggacttagagcactagttttccaaatgttgtctacagatggaaacactagcatcacctgggtactcgttagaaagtgcagattctctggcggtaccttagacctcctgaattagaaactctgggggtagggttagacatttgtgtttt

SEQ ID NO: 60335 - DNA, 872 bp, Zea mays
  Clone ID: MRT4577_155026C.1
ccggccgggagttccgtgccgtgctcgcgcgcacccaccccgcacgccgcatgccgcatgccgccttttactccgcgctgctgctgctgctgggacgaagaaaatcttttccttcacctttctctcctctttcccagttcatgcacgggctctgattgacgccatgggggatgccgccgccgccaccgcaacggcctccacgtccgctcccgccacgcccacctccatcctcatctgcctggaggacggcagcgaccttctctccgacgcctacgatggcgccggcgccgccgacttcgaggtcgcccgcgacaagcatctgcttgaggaggaccagggcgaggagtacgtcgcgctgctcctgtccaaggggagcgcgttagtatgcagcccggggcaggaggaaacggagaagtgggtgaaagaggcacgctgcgtatcccggccgatgaagcactgcccatgacccctggacagcgtctcatggtcggaaggcccatggctcgcggatccgtagagcaacgcctgtgactgaatgcatccatacatgggaagcctcgcctagatacgcacgcatgtagtctccatgccctggcattgtgcgtggccgctccgtgataaaccacccatccttcgttcggcattttttcccccttgtttatataattttattgtatcgttttggcaaataattttgtgattcgaccccaaagtttggttgtcttacgagatttgtaaacctggaacaatatataatgtgattgaactgctatgtctattctttttgtaatacgataatatgtatatgtattccatgcgatctcttctaggtcgacgactaatgtgcaagtgtgagtttgcatgcgctgagc

SEQ ID NO: 60336 - DNA, 677 bp, Zea mays
  Clone ID: MRT4577_155027C.1
gcgcgttcctggacgcgaggagcccgcggtggggcgggctcggcaagttcctgcgcgccaagtacctgtcgctggtgcacgcgcggatggagacggccttcttcgggcggctggagcagcgcggcatcgtgagcgccgggcccgggttcccggagagctcgtggttcgcggacttcgcggagatggcgcgccgcgtgtggctgctgcactgcctcttcttcgcgttcgacggcggcgccgaggaggacggcgcgtccatcttccaggtgcgcacgggggcgcgattctcggaggtgtacatggagagcgccagcgacgggcgcgccggcgacgacgccgaggaccgcgtggtcggcttcaccgttctgccggggttcagagtcgggcggacactgatccagtgccgcgtctacctgtccaagccggggcggcggccgtgatcgatgatggctcgtggctgtgagagaccgaagagagaagaagatgatgggagggggaatagtgcccattttgggtcggccgtcgaggtctcccgccggcagccggccggggcagtggccattatgatgatgatgacgggggtggctatgtatgtaaatctatccagacatgtagggatgttctaatccgtaatataaatggtattttcagttccaaaaaacatggaaagcacaaag

SEQ ID NO: 60337 - DNA, 315 bp, Zea mays
  Clone ID: MRT4577_155028C.1
gggttcctttaaggcggccgccttttttttttttttttggacccaattccggccaggcccttgttccagccgataaaagccccggcctggtaaaatttccggaacctggggggccaagggaatttggccaccccattctggaaggcaaaccagggttttccttaaggccctaatttattaaaccccccaaaaccaaggttggccgaaattaatttattatggccttaaattaccacccggctcaaagaccaaggtccgaaccatggcgtccttgtaacaacccctctttaattgattatggaaaccttaatcctt

SEQ ID NO: 60338 - DNA, 232 bp, Zea mays
  Clone ID: MRT4577_155029C.1
aaaacggggaggattttattaaatccaaaactttcaggaaacggtccagcagcacaagcatttgccggggaaacatatttggggcaaaaaaaagctcggctaacttagaactccctttttaagtgcccatttttaatgaaaatttgacaaaccggttcctttaaacgatcggatttgccgcgttagcaatcctgggccagaaaataaggcccttttttccaaaggggcccag

SEQ ID NO: 60339 - DNA, 647 bp, Zea mays
  Clone ID: MRT4577_15502C.1
ggccgtgcctcttcctccgcttctccttgccccgcgtgcgcgaccgacgccgccgccgcctccgccctaagagtcttcgtaggacactccgtcaggaattcttcgggacccttcgccggcgacgatctgacgtgacgatgtctggtcatacccaacctgaaggaccacaccaacttgattcaaaacatgctgcaaattcatgccgaaagaatgtacccggtacatcgttcgtctcagatttgagggatcacatccacgagttcatcaatgcctctgcagatgaacaccggacatgcttcacaaagactctcaaaaggatgttcgatatgtcaaagactgtcactgatagatcctctgaagcagaggaagctggacccgaaagtgtcttgccacttcagaccacagtgtcgcggtagaagtttcgccacttcatattgcctccgtagaaataggataaagctagaaagcctcgccctccgcggaaggagaaatttgttattttgtcactctcaattttgactctattaggtctataaccggtcggatcatctgtgtctatgatttgtgggtctgattacatattgacaaagcccacagataataatagcaaaattatcaaaaaaaaaaaaaaaaaagcggccttgcat

SEQ ID NO: 60340 - DNA, 724 bp, Zea mays
  Clone ID: MRT4577_155030C.1
tacctcgaggccggccgggaggctgcttgttgggacttgggtatgggcttgcagtgctgtgcccgccctctctccttccttgttccttctttataaggagacgagcgagctcggcagagaggtacaacgcccaggacacgacagggcgctgcttgttgccgattgctagctggtaaagggtaggccggtgcgtctagctaccttggttggttgggtgccggaatttccatggaggtcgcggtcgtggaaagtcctcgtcctcctccgccgccgccgcaggccaaggaggagaagaggtccgacgccaccaagccagagatcgccgcatcgatggtaggaagcgctctcccaatagtcttcgaaagctttccgtcgacgcaaagagaagcggcggcggcgggcgtcaaacaggaggagcgcaggctggaggcggccagggcggagatgggcgaggtgagggaggagaacgagcgcctcaagtcgatgctgtcccgcatcgtcggccagtaccagtccctgcagacgcacttcctcgacgtcgtcaaggtgcgcgagctgccaatggcggaagtacgggcagaagatctccaaggggaacccgtgcccgcgcgcctactaccgctgcacggtggcgccgcactgcccggtgaggaagcaggtgcagcggtgcgcggaggacacgtcggtcctgatccccagtacgattgcgcgcacaaccacccgc

SEQ ID NO: 60341 - DNA, 582 bp, Zea mays
  Clone ID: MRT4577_155031C.1
gaaaaaggttttttaacccctttgccccttttttttttttatcatcacttttccatacaatttttaaacacccggggggggaggggaacccgccttccctttcctaaatcggggggggggaaaaatttggccaaaaccaaaaaaaaggtgtcccaacaacccccaaccctaaaaagggggggttcatttccccccgattgatcataaaaaactcaaacctcatcccaccccggttttaattttttcctgccaacccaattttttaaccttaacaaccccaataaaaatttgccccccaaaaaatccccaaagggattttccaatggttgctgccccccgaattaaattaaaaaccaactttgttgcaaggttaataaaactacctgaaaaaactccttatccaattttttttttaacagcggcaactttttaaaatgctttttttaattccagcgttttaacccaaactttgagttcccctttctccaaacgttaaaaaatttgggcaaccttttcaactttatcgggttggcgaaccaaattgtaaaaggcccgggactgcctttcccattttttttttgc

SEQ ID NO: 60342 - DNA, 288 bp, Zea mays
  Clone ID: MRT4577_155032C.1
ctcgaaccgagatttgtatatgattagcgcctatgaacaactcgaaaacgattcatggtagagggatcttcaagtaggcggcttgggggtgtaaatagccaaccataaccccttcaaataattggcgagggtcttcagatataattaggcctcgcttcttaaaaccgctctttagttaagaaccaataaaaccacctcaggggaggtccttcaattgggcaggggggcgggggttcctcccgtacaagatagtttttggaggggtttctccagatagagcccttaacc

SEQ ID NO: 60343 - DNA, 305 bp, Zea mays
  Clone ID: MRT4577_155033C.1
taatttttttttttttttttttttttttttttttttttggtggctgccaatttttccatgttttttttcccccccaaatggccacccgccagtaaatgacctttccctcatttaccccctttcttcttgtaccccctttagaaaccggggggcatttttttagctgactggcaattccaataatcaacccttgggagaaccggcccggtcatttttttgaggaccggattttcaacgctttaaccagcagttatggggttttggcccacccccgcttcaaaaactttacccgtgggcggcccccc

SEQ ID NO: 60344 - DNA, 249 bp, Zea mays
  Clone ID: MRT4577_155034C.1
tgctcgcctcgtctcgtctcgtctcgcttcgtctccgtttcctccgcacaccaccacagccgcgtcaagccgtcaaccaaccaaaccctagaaaggctctcggcccccgttctcaatcctttgtcgttccccgatccttgccgtccgcaggccaaaaccccacgcctctccctcgacgtcgggtatattcagagtattcactctgtcagaaatgtcttttgcattcatgtccaagttacattgatttga

SEQ ID NO: 60345 - DNA, 190 bp, Zea mays
  unsure (1)..(190): unsure at all n locations
  Clone ID: MRT4577_155035C.1
ngccatcctttctctatttttttattcgcggcattactcagctggtgtggaattgactggcgcgcatgggctattttatgtacctattgagcctcatatgtcttgagggctaaaaattaaatgttacaagcctcttcctattcctgaggctgcttggttgtttgcttcccagagagcccgtgtttaacta

SEQ ID NO: 60346 - DNA, 314 bp, Zea mays
  Clone ID: MRT4577_155036C.1
cggctcgaggccccaccggggtgctggggcagtagtcatggcagactcccggcctgggccaccaggattctaggacccccaggcagccccttggactggtcccgggtgccttccaagcacagtctccatgctcccagattctcgaccttcccccggcccgggaggtgcagcctgcgtctgcctctgtcgtgtgtgctgatttgagtggcttagcttgccacagcgcacctcttctgtccctttcagtcatttgctgtacttccctgtggcacgttaccatggaagccgctccagggtgggtcagggtgcaagct

SEQ ID NO: 60347 - DNA, 605 bp, Zea mays
  Clone ID: MRT4577_155038C.1
gccaaccaacaccccaaccaacatgccagccaacatgccagccaacaccccaaccaacacaccagccagcaccccaactaacaccccaaacaacactccaaccaacaccccagccaacacctcaagcaacatggcagccaacaccccaatcaacatgccagccaacatcccaaccaacacatgccaaccaacatgccagccaacgccccaaccaacacaccaaccaacaccccaaccaacaccccagccaacaccccaaccaacatgccagccagcaccccaaccaacaccccaacatgtcagccaacatctcaaccaacactccagccaacaccccggtcaacaccccagccaacatcccagccaacactccaaccaacactccaaccaacaccccaaccaacaccccaaacaacataccagccaacactccaacaccccaacatgccagccaacaccccaaccaacatgccagccagcaccccaaccaacaccccagctaacactctgggcaacaccccaaccaatatgccaaccaacaccccaaccaacacaccaaccaacaccccaggccacactttaacccacaccccaaccaacccccc

SEQ ID NO: 60348 - DNA, 171 bp, Zea mays
  unsure (1)..(171): unsure at all n locations
  Clone ID: MRT4577_155039C.1
cggtagccattttaggggctacagtccgcccctatccccttcaccagcacctttccaaccttaggataaatgatgaagcatatccagtggtccctgtacgaatcaaacttgtgatacatgtgtattgaaattattaattttatttatgcccnncacacaagcccacctatt

SEQ ID NO: 60349 - DNA, 170 bp, Zea mays
  Clone ID: MRT4577_15503C.1
ggctgggggctacagcacacctgaatctggactagattactcgacaattacacgctccaactcagcttacggtcgtagactgatgacacataaccatcacacggcatccatccgaactaaccaccctgttaacctgatccctgcgctacctagataacctaagacgcgac

SEQ ID NO: 60350 - DNA, 436 bp, Zea mays
  Clone ID: MRT4577_155040C.1
aaacgggaatttcagttttaaaagcattatcatgaatctcaaaacataacgggggaaacacgaataaagcaggggcccccgggggttcaaagatccacacctaaaccggtaaattaaacggggggcgatccatgataaactaaaaccccccctcaaatcacccccttttttttcaaatccaaaggaacggcccccgggggagtccacaataacgggggggggggggcccaccagaccaaatcagagagatttaggggaggtgtcccaaataagggaccttgaccaccttgggagggggagcccttgggggggcccccctttttgagggccttgaaaacgtccatgcccttaaaaacctggccaaaaaaaaagtgcttgccctaaaaccaaggggtcccaacggggcaaaaaaaaaactgggaacccttggtgttgg

SEQ ID NO: 60351 - DNA, 234 bp, Zea mays
  Clone ID: MRT4577_155041C.1
cgccgccacgatgccgaaggactaccgcccctgagcgagaacaacaacgtatggaatgcgccagagtacatcacgaggaccaagccctccaactacctgcaagtgagccccccaatctctaggagagctatggatccgaaacggtgtcttcgcacgtccgccagaaaaaaaggtggaacgcaaccacgacacctactaccacacaaaggatagtgcattcctcgctcacgaccc

SEQ ID NO: 60352 - DNA, 396 bp, Zea mays
  Clone ID: MRT4577_155042C.1
gtttttgttttttttattttttttttatttatttttttgttttttttttaatattatttttttttttctattctttcattcttttttcttttttaggacaaaaactgaaatggctttaattaaacaacaagggaactgttaaatgcatccgacgttgacccaaaaaaaaagaccacctgtgagcacatcaaccccaccatcccacaaaggggttacttagcttgcagttcaaaaaccatccctggggcttaaatagggaccctagctagctatctgctaaatgactcttcccaagatattccttaacaaccccttgttggaccccctcaacaggggaatatcccccattttgaacatgcccgccacaaaatccccaaaaaaccccccttggccccc

SEQ ID NO: 60353 - DNA, 236 bp, Zea mays
  unsure (1)..(236): unsure at all n locations
  Clone ID: MRT4577_155043C.1
ttcatctactccatatctctgaaaaacccgatcgacaccataaaggcngcagctagtattccatcgctctcctgcctctcactncaagcaccaccttcacacatacaagctgaggctgcagatgacagccaccgacatcggttcatataccgaccccaacgcatctgacaacttctattcacatgccaactacgttgcatctcccaccctcgaccacctgacgactctcttccacc

SEQ ID NO: 60354 - DNA, 439 bp, Zea mays
  Clone ID: MRT4577_155044C.1
gaaaaagcctgaagatattgttcctttatcacacaactgtgacattccgcatgtgaaccggactgagtatcagccgattgatatctctgaggatggataagcgagccctcttacttcagatggaaacacttaggatgatcttagactcccaactgaatagacctttgtggcccagaataacgaatgcgtcggaagcggaaatgatcttgatgtgactgtgcaggcttggatgggggaggagcagatctgcgcgttgaaggatattggccccaagaaactacttggctttggagacggacccctactgtatctcaacttaaatcggacaagaagtgtatcaccataggattgctaccgagacattcacctggcttgagctggcttttgctatagcgcgcaaggggttgctgggtgtcgcacactacctgacttatcatta

SEQ ID NO: 60355 - DNA, 365 bp, Zea mays
  unsure (1)..(365): unsure at all n locations
  Clone ID: MRT4577_155045C.1
gactagntctagacgagattagttgaatttacatgcatatgtttccatcttaagaagctgtccgcgacagaagtctacaatgatgcctccatggtcgtcgccggcggtcaagccaagtaggggatgcaggaggaggggtcccgcggcgaggatgagtggatcaagtgggctagaggcaagacttggccatcccttggctcatggtcgcggggttgggcgctctagtgtggcgcgagctccgtggttctactgtgggccacaccagcgtgggagctctaacgcgtggtggagttgcctctgttgggtgggcgtggtgtgatgttaagaaggtggcagccggcggcccgtatcggggcggttggtgg

SEQ ID NO: 60356 - DNA, 795 bp, Zea mays
  Clone ID: MRT4577_155046C.1
cctcgaggccggccgggccggagaccgagacaagcgccgcagcccgcagcagaaggctcgcgacatcagctcgagccagctgcgatcgatttccagaccgagacaagcgccgcagcccgcagcagaaggctcgcgacatcagctcgagccagctgacgggatccacacggtgccatgtcttcccggcggccgtcgcatccgtcccaccggaatccacggcgattcccgtccgcctgctatcttctagtactcacccttgccctcctcgtcgtctccgccgccgccaagtcctcccgccgccccatctccgacaacgagatccggcagaagaaggaggcctgctacaccgacgtcgagaacgggctgtggggatgggtgtgcaggtactcgccgacggagaaggagaactgcgtgctgcgctgcctctcgccggagtgctacgacctcatatacggcggggatccgcttgaggaaggggagttggactatgttcgaagccaggagtacaagtattgtatgcacaaatcatcccttggagaaagcttggatggtgtgaagggatccttcagctactcatgaaggaatgagaagaaaaaggttctgttagtctgctgtaaattttatttacaatcttgaacagacatgcatctttttagataatggaattgtaattccagactttgctttttctcaaagcatcaccggtgcatcatcttatattaaacttacaaatgcaaattaaacattggattcatttgttggccaaaaaaaaaaaaaaaaaagcggccgtactac

SEQ ID NO: 60357 - DNA, 410 bp, Zea mays
  Clone ID: MRT4577_155047C.1
aaattcttgaaaaaaaaaatacacccaggtttccaatacaggacgccaggaactttcaaaaggttcttacaaaagggttttacccttgctaagtaccacttctgaggatcacttcagggggtgatcaaaaactacaaacaaaaaatttggggatcaacattttaagtcagtttttccatttcggcggacccccccaggggggtgtacccgggccctttacttgacactgaaacaaggcacttacaaattgctaacacaactcaaaagccaaacttttacgcctagataaaaccccccattaaaaacctatttttccttccgaatctgccctccggttatcggctttaggaacttctctaaccttcttaattcccttgggaaatgcccctataatttcttcggataaattt

SEQ ID NO: 60358 - DNA, 497 bp, Zea mays
  Clone ID: MRT4577_155048C.1
caaccgaacactacataccacagatgaaagacagatagtgccagtaaagaaacagatggtaaagccaatttgcagagcaaaggggccagataagtggcgatctttgcattgaaggttggccacaacgaactgcagttctccgtgccgctcagatttatctgttttgtgacggcctcgaacaagctgctacatcggctcttatctgcgttccaatttgttttttggtcttctttttccttcctatttaaaagccgacataaactatataatggctttgaaactgctgcggcagtcttcaccgatgtattacagaacatgtaagtaaagaacgactgaatatcagtaaagaaccgagtgcgttttgggtttatcttctattcggtctccaggtaaaagttacggaaactaacatgaactacataatacatttatacagattgtagtgcatgacgcatgacaaccgaacacttcataacacgtgtgaaagacagatagtg

SEQ ID NO: 60359 - DNA, 343 bp, Zea mays
  Clone ID: MRT4577_155049C.1
ctcgaggcctttcgggcattcctacccgcacgaacaccatccgccacctcccccctcctcgatcttaacaaccgccgcgaatggagctcctcggcctggtgcccgccgaggccatcgcgctccgcctctactccctccccgcagcagccgctgccgccggctcgctctgcgcctggctcgtcgccgcactcgccgccgccatcggcctctggcgcatccgcgccgacagcgtgtgcaacaacaacaagcgtgacgcaggcgttagcgccctcgtggacgataaccaggagccactgaggcctcttctgccgactcggggggctggcattactgacaagccgcg

SEQ ID NO: 60360 - DNA, 822 bp, Zea mays
  Clone ID: MRT4577_15504C.1
cattgggtacctcgaggccggccggggactagatcagaccgaatcaacacccacgtccgcccacgcgtccgcccacgcgtccggtcccggatcccggcggtttacccctgcggcctccgccgctccgcggctctgcctcttcctccgcttctccttgccccgcgtgcgcgaccgacgccgccgcctccgccctaagagtcttcgtcggacactccgtcaggaattcttcggggcccttcgccggcgacgatctgacgtgacgatgtctggtcatacccaacctgaaggaccacgccaacttgattcaaaacatgctgtgaattcatgccgaaagaatgtacccggtacatcgttcgtctcagatttgagggatcacatccacgagttcatcaatgcctctgcagatgaacaccggacatgcttcacaaagactctcaaaaggatgttcgatatgtcaaagactgtcactgatagatcctctgaagcagaggaagctggacccgaaagtgtcttgccacttcagaccacagtgtcgcggtagaagtttcgccacttcatattgcctctgtagaaataggataaagctagaaagcctcgccctccgcagatggagaaatttgttattttgtcactctcaattttgactctattattattacattatgtgtctatgactggtcggatcatctgtatctataatttgtggatctgattatagattggcgaagcccacaaataataatagcaaaattaccaatcgctcccgctgaggaggccagttgccccaaatagcaacaaataaaagcggccgttgcccagacc

SEQ ID NO: 60361 - DNA, 179 bp, Zea mays
  Clone ID: MRT4577_155050C.1
ggaaagacaaagaagaggcacaccgtctgcaagaagagaggcatctttttcatgacaggacggggaaaaagcttctagagatggagtctgccattgctagggcaaatgctcagttggagaaagcaaatacttctgctcgcaaacctgacgttgttaatgcgcgacttacgttacagatc

SEQ ID NO: 60362 - DNA, 232 bp, Zea mays
  unsure (1)..(232): unsure at all n locations
  Clone ID: MRT4577_155051C.1
gccgggggtgtttttttttcanngcgtgctgtgtgtagcctggatgcaaatttgtgttgaattttgattgtctttatgcccggttggttccgtgtgcatccgttcgttcctttggtgccggtggcctcttgtatttttttatgcttgtgttccttggggggggatgcgtgttctctaatctcttcaggctcccgcgctgtttcttgtgggaaatccctgcttggtgttgctt

SEQ ID NO: 60363 - DNA, 195 bp, Zea mays
  Clone ID: MRT4577_155052C.1
cccttcgccggagaagggtttttttttttcacacccacgatgcctacctcgacccgaaggcgaggtccggatcaaggtgcccaacctgcccacgataaaactagttcactacaacgacgccctactgatacctgctggtatgaccacctgttaactcgtagccaaggtctccgggggggttcccaacaagctcct

SEQ ID NO: 60364 - DNA, 254 bp, Zea mays
  Clone ID: MRT4577_155053C.1
atctttatcaattactgtaagggataccttatcaggacgaggcccagctatatgaagcaagaacatccgaaccaagaagcacgactgcaagatccttaccaactcggtggtgatggacttcgggaacaacggggaggtggtcggggatacgctgcttaacttcaagttctatcacatgaacatgaaccggggcaaggacatgcctattaaggacgctaccgagactgctcccggggacagacccaacacagatg

SEQ ID NO: 60365 - DNA, 1384 bp, Zea mays
  Clone ID: MRT4577_155054C.1
tgcacgcggatgctaaagcaaacaaaagacatgttctcctggtcctgtaacgcaagacatgtgtcataaacaagttacgcatttgcatgacaggcagacacagcagcgacaacaaaccttttgagctatgccagcctcattctaaccttccaatcctaccaaatcatggcccaacccatgcacgtatacctctgacaggaccccaccatgaggcgagagtccaaggccacatggactacagggggaaatacctggaacactgcattgcaagcaaatgttctccccgctgcctttggtagcaacagaaggtacagaaatagttgagaaagttatgaggaacagttggaaggataggctgcctttccaatttaaaggcactgccatcgtttcttcagccccatgacaagcttccacacagtcacaagcaaccaccttgcatagttcttagcctcatggaattctgcccctaccctgcattgtctgccctgtgaagagagagaccagagagagagagagagggcttcgatgctcttctcaggctgcaggtcaaggagtgagaacaagaaagccttctttgaagttgggttgttgaggtgctctgaagaagtattagcgtgtcttccatcagtcagttctctcataatttcatcttcctttccttgtgttgtccttggcctctctttctgtgtccctgcactctcttgttatggactcctctcagcttactggggacaatactgaagagtgcaacagtaatgaatctgggtggacgatgtacctgggctccccagtgaacagtgatgatctcaaagccaatggcagcaaatggagtaataatgttggcagtggctgtagcaatggtagaagcaaaaacgacaacatggattatgatgatggagactatgattcattagcttctgatgcttccacaggaccagctcaagtgaaggtgcttaatggcaaggaaaagaaaattcatgagaaaagagacaattccatagaagaacaagatagcgatgagcaagacgaacaagccaaactccctaacaactgtgacaaaaaggcaggcaagatgaagaaggaagagaagaccaccaggaggagccacaacaagagacgtagttcctgttcttcccgaacaagcttctttaggtaactgttgtaaaacccttgtaggctgtctcccaaccatttacaatctagctaaaatcagcatggggaatgcaaatcttttgggatcttagggcaaatatgtaccccttagatactcttatcaccatcctcatagtatcatataaaaaagtgcatgtatttatatagatattaacagagagcactctctccagatatatttcgaaggtgttctctaaaaaaaaaaaaaaaa

SEQ ID NO: 60366 - DNA, 268 bp, Zea mays
  Clone ID: MRT4577_155055C.1
cccggggtcggaaccaagcgacccgaaacgcgcgcgcgcacgcggggaaggctcggaacagccgacggcagaggcacaagccaggcgtaccagaccgggtcatcacaggcgacccggccaacagcgcgccgccaacagggccaggacggccgccagcgccagggcgcccgccgaggcgcaggctcaagcggcccggcgcgccaggctgggactggggggcaccggcatcgcacgggggcgccaagcagcaggcggagcacgccgagac

SEQ ID NO: 60367 - DNA, 1806 bp, Zea mays
  Clone ID: MRT4577_155056C.1
gcgcgccgtacaagctgcggcggcggaactcggagacgctgcgcgcgcagtacatcaacaccaaagagctgagggtctgcgtcggcacctggaacgccggcggcaaggcgccgccgaacgacctcgacatcgccgagtggctcggcactggcggcgacgccgagcccgccgacatctacgtgctcgggttccaggaagtggtgccgctgaacgccagcaacgtgttcggcgcggaggacgggcggccggcgcgggcgtgggagtccgtgatccgcggcgcgctgcggcaggcgcagccgccggcgcccaggtacaggtgctacagccaccctccctcgccgtcgcggttcgagcccccgatcggtgccgccgaagagctcctccccggcggcacggacaccgagaccgacaccgacgaggacgtgcccttgggcgaccccgtcgcggcagccactccgaccccgagaaagctgagcaggctcaaccacttcagcgtcgtcgtgggcgagaacgagaacggctcatcggagctcaacggcgacgaactggacgacgggcctgaccagccgccgcagcagctaagccttcagcagcgggcgctgctgaggtccctgagccgggcggacagggtaggggtgctctggccggagcagccgctggacctactccccgcgtcgtcggcgtcggcgtcggcgtcagcgtcgttcagggcgtccaagtcgttcagccgggccgcctacaggtcgtcgttcagggggtcgtcccgcgtggcggccgacgtggtggatgacctgcccatgatcccggacctcgacctggacggcgcgctgcggaagaagggccggtcgccgttcgtgcgcatcgtgagcaagcagatggtggggatcttcctgacggtgtgggtgcggcggggcctccggaagtgcgtgcagagtctcaaggtctccaccgtcggcgtcggcgccatgggctacatcggcaacaagggggccgtgtcggtgagcatgtccgtgtaccagaccatgttctgcttcgtgtgcagccacctcgccgccggcgagaagcccggcgacgtccacaagcgcaacgccgacgtgcacgagatccgccgccgcacgcgcttcgccgccccgggcgacctgcagctgcccagaaacatccacgaccacgaccggatcttctggctgggcgatctgaactaccggctggacgcgtcgtacgagcgagcgcacgagctgatctcggcgggaagctggcgcgagctggccgagacggaccagctgaagcgggagctgaggaaggggcgggcgttcgacgggtggacggagggcgtcctggagttcgcgccgacgtacaagtacgagctcggctcgaggaggtacgtcggcgtcggggaccaccagggccagagccagagccagaggggcggcgggcggcggacgccggcgtggtgcgaccgggtgctgtcgtacggcaaggggctgaggctgctgggctaccggcggtcggagctggcgctgtcggaccaccgtccggtgacggccacgtacgcggcggaggtggaggtgttctccagccggaagctgcagagggcgctgacgctcacggacgccgaggtggagggcggccaggtcgtgccggacctcgatttttgaccgggggtcagccttccttctattttcgcgggaaaaatgtcagtttaattgtaaatatgggtactgagtaagagtgagcacaatgagcttctgaatgcattggcagatcgatgtatcatctccatttaatcatgattgaatagtgtgcctc

SEQ ID NO: 60368 - DNA, 657 bp, Zea mays
  Clone ID: MRT4577_155057C.1
ggtaccctacgagctcgtccggggtgccatatgctgagggacatccttagcctttatttagtggtatggtttggtactttgttctgtcatcactcgtctatctatccctaatacatgccgccatgtttgtacttccaatgacgcgccgatcatttgctttgtaaaaaaaaaaaaaaaaaaaaaaaaaaaaaaaaaaaaaaaaaaaaaaaaaaaaaaaaaaaaaaaaaaaaaaaaaaaaaaaaaaaaaaaaaaaaaaaaaaaaaaaaaaaaaaaaaaaaaaaaaaaaaaaaaaaaaaaaaaaaaaaaaaaaaaaaaaaaaaaaaaaaaaaaaaaaaaaggggggagacggtggttggggggggaaaaaaggggattaaaacccggaaaaaaagggcgttgaatttggcaaaaaaggccccaaaaaaaaaaaactaaaaggggcccaagggggggggaaggccccgggttttaaaaatttttaaaaaaaaaaaaaaaaaggtttttttaaagggggggggttggggagttttttcaaaaaaaaaaaaaaaattttttgaaaaacccggggaaaaaaagggggtaaaaagggaaaaaaaaaaaacttttttttttaaaaaaaaagaaaaatttgtttttgccccccccgggtaataaggg

SEQ ID NO: 60369 - DNA, 867 bp, Zea mays
  Clone ID: MRT4577_155058C.1
ccggccggaaccccaccgcaaaacagagacggaagcgccgccatactgtctgcatcgcccgtaacactgatctctactgatgtgtggagccgcgcgaggaggcataagaagcccacggagggcgccgcccacatcaaccttagggtcaagggacaggatgcaaatgaggggatctttccgataaagaggcctatcccagactgaacgaagctgatgaacgcctattgctgaccggcagtctgagaacatcgaatgccagttgtgttcctgtttgatggccgcaggcttcggggcgaggagacccctgatgagatgcagatggaggacggttgtttagatcgacgccatgcttcaccagaccggaggcagcgttcctagcaccacctaaaagcagcagctgcggagcctcgttttgctctccgccctgcgtagtactaaacaaaagggaaaaagtctttttaaggaacttgtgatgctctggctccttgtgccattgctgagggacatccttagcctttatttagtggtatggtttggtactttgttctgtcatcactcgtttatctatccctaatacatgccgccatgtttgtacttccaaaaaaaaaaaaaaaaaaaaaaaaaaaaaaaaaaaaaaaaaaaaaaaaaaaaaaaaaaaaaaaattaaaaaaaaaaaccaccttcaaggtcagggttttttcaggcaaagggatttagctttttagccttttcagtcataggccctcgatttcccacatttgttttgaagaagccttagcccaacattgcagaaggtcctatggttttctggccttcgttttatttttaaaacccgttaaaacaggataaaaaaaagcggggttccgg

SEQ ID NO: 60370 - DNA, 245 bp, Zea mays
  Clone ID: MRT4577_155059C.1
cagtttagtacttctatattacagcaagttacctgcgcgctctgaaggctctacgcaaatgacgtcctgcaatggactaaatccatacggccataaattaactcgatacatcttctagaacagacgacagacaatatcgagggaagtatgtctaatcctcctaatatgtaacctggcaagactgcatgcatatcactgtgatatatataaccactatccaatgagccaacatgaatggatctctc

SEQ ID NO: 60371 - DNA, 276 bp, Zea mays
  Clone ID: MRT4577_15505C.1
ctatctaactgttttttatgggcgtggggttatttttttttgttacaagcataaccaaaaaagtttttttaagtccccagcttattgcacaaaaaccaacagaaaccgggggcgtgcccacgccatacccaaagaccgagaccccggccaaccaggccaccccaaacaatcattagggacccccgccggcccaaacgggccgggaagccgcacaccccgcagattaattgaccctggggagggaactttccctgcgatcgtggaccatcccggggc

SEQ ID NO: 60372 - DNA, 944 bp, Zea mays
  Clone ID: MRT4577_155060C.1
acccgggacgtcaaggcaagcggagagacgccggcggcactagcaccaccagccgaagctactaccgcggccgcagcagaggtcgcgacgacgaacgccgaagaagcgccggcgagggagagctccgacgagtcctatctgtcggccaggtcgtcggtgccgagcgcgcgggcgtcgtgcagctcgcgggaccagtccgccgagcggctgctagaggcggacgccgccctcgcgcggaagaagcgcgccgagaagagcgcgccggcgccgagtacgccgccgggcagcaggtcctccggcgcggcgaggtccccgagacaggcgacggtgagggggttcaagaggttcctgagcttcgggaggaagcacagggggagggaggtcactgtcatcgactgcacgtcgccgcccgtgccctcgccggtccacgacgccagcggccggtggcagcccgctgatgggtcagtcaagcgcaggatgggctcctctgatgctgcctctgatgatacaaaacatggctatccggtgtctccacaagcagcggcgtgctctttgcaaagccttgtagctgcctctcctgcaaagtatgaacttgctaagatagtcccacaagagaaatcaccaaaagttcatcgatcgttcttctcgttccggtcactcaactgcggcaggggctgaccctgctgataccatcataccatacaatgcattgggaatgtagttgctgtaaattttagagagaagaaactttgtgcttgatgtgttatgccgccttgtatagttgtgtctgacgatgtctgtatgtattggtgtagtcgtctgtcatctggcctggcatatacatcagtagcactgtagctgtaggtttactgtgcctgtgtactacagatccatatcatgcgtgaagtgttttccttcttcattcaaaaaaaaaaaaaaaaaaa

SEQ ID NO: 60373 - DNA, 953 bp, Zea mays
  unsure (1)..(953): unsure at all n locations
  Clone ID: MRT4577_155061C.1
gcaacatagcacccccgcgagggttcctcgagtcgggccggccgggcactacatatgtaaccctctcgcgcaaacactcctctttccgcgccgcctcccctcccgccctcttgctccgccggcgcggccaccgccaccgccaccgcaacagctagtcagcagatcgtaaccatggcggattcgaaggccgctgcggcggtgacgctccgcacacgcaagttcatgaccaaccgtcttctctcccgcaagcagttcgtgctcgaggtcatccaccccggccgccccaacgtctccaaggcggagctcaaggagaggctggcgaagatctacgaggtgaaggacccaaactgcatcttcgtgttcaagttccgaaccaacttcggaggcggcaagtccaccggcttcggtctcatctacgacaaccttgaggccgccaagaagttcgagcccaagtaccgcctcatcaggaacggccttgctaccaaggtagagaagtcacgaaagcagatgaaggaacgtaagaacagggcgaagaaaatccgtggtgtgaagaagacaaaggctggagatgccaagaagaagtaagggaggaagttacttgccttgctctttctctcatcataggctttggtttgtttagggtggggctccttccggcaatgctgaatgtttagttagaagtagagaagattttgccaattacccatcatgttgagtttctcgtcgcaccttctgttcagttttgaggcaccttctgttcagttttgaggcactttgtcagacacaagaatatatatatacctggtcatcacggcttttgtcctgctaaaaaaaaaaaaaaaaaagcgtcgcgccctcggttcactgaagttggatgcaaagcttctgatttgattaggtttatattaaaagantttgttattaaaagcaaaaaaaaaaaaaaaaaggcccct

SEQ ID NO: 60374 - DNA, 168 bp, Zea mays
  Clone ID: MRT4577_155062C.1
gcgctactagctggtacacatactagccagcctgccagccagcttgccatggcgcccaccgtgatgatgggctcgtcggcaaccggcgtcgccccgttccagggtttcaagtccgacggcaggctaacggtcggccgccgtacaccaggacctcggcacgtagaacgg

SEQ ID NO: 60375 - DNA, 392 bp, Zea mays
  Clone ID: MRT4577_155063C.1
ctcgagccgcactctcaaaaaaaaaaaaaaaaaaaaaagaaaaaaaaaaaaaaaagaaaaaaaaaaaaaaaaaaaaaaaaaagaaaaaaaaaaaaaaaaaaaaaaaaaaaaaaaaaaaaaaaaaaaaaaaaaaaaaaaaaaaaaaaaaaaaaaagggggggcccccgattagggagctggtaaacccggaaataaattccggaccggtccctgcaggggtaccaattttcccaaaagggggccgtttaaaagctgggcgaaaaaagggcaaaagttgttcccggggaaaaattgtaatccgttaaaaattccacacaaatttcgacccggaagcttaaagggaaaaccctggggggcctaaagggggagctaactcaaattaattgggttgg

SEQ ID NO: 60376 - DNA, 273 bp, Zea mays
  Clone ID: MRT4577_155064C.1
gccagtacatggagggcttcaacgacgagctggaagccttcaaggagcgtgtgcggggccgtgccaagctgcgcatcgagaaggccatgaaggagtacgaggaggaggagcgcaagaagcggctcggccccggcggcctggaccccgtcgaggaactccagaagtgcttcgatgtgaaggacgtgcagatgctgcaggacgccatcagcaagatggaccccaccgacgcaaagtaccacatgcagcgctgcattgactctggcttctgggtcc

SEQ ID NO: 60377 - DNA, 360 bp, Zea mays
  Clone ID: MRT4577_155065C.1
tattttttttttttttttttcctttttttattggtgattttttttttttttttcttttttttcgggctaaaggcaacaatggttggaacaatttataacagttttggttacccagatcccggttttccgcgggggttacacaaccccatgccaaaaatgccattgtcatgagcctttttaaatccaacaaagggctttgggacacttaccggccggtggaccacaaaccctgttcacggggagattgattaaaggggggaataaccaactccttaagaaaaagaaaaaaaaaatggggaacccccactttagtgtcaaaattttccagtgagtgtgtgagttcgacaaatacaatggggg

SEQ ID NO: 60378 - DNA, 305 bp, Zea mays
  Clone ID: MRT4577_155066C.1
ttcaactaatcgacatttatgcatggtattcggtgattagtagtattgtgatatgcacaggtcaaatttattattgggaatcatatacatctaaccagctttcaactcttctttcctccttataaggtacttgccttcaactaatatatatctatgatatcttcaagtttcttccgtcgaagattcaggtcagtgtgttctcagctaccccctgaggtccttgagatcacccatcagtttgagatgataagaggccctactacagatatagaaagaacagccgatccaatgctgacggtggctca

SEQ ID NO: 60379 - DNA, 363 bp, Zea mays
  Clone ID: MRT4577_155067C.1
gccatgcatcttctggcaggacaacgacaagttacagtacggggggcacagctggactaaggctgggggtttatcaaaaaatatgcatctgattttcaccgaggcggcaatgaaagctgtagatagtggctatcaatactctctgttcctgaaagcccatgtattatcatcgccagctatgactggactgattcaatgctattatcgatggattaagactctcccacaaaccgctgtgtacccccgagtaaagtgatccatcatctctgtcttacgtctagtagagagcaaggatggtgtaggaaatatgtttctgggagatgattatctaccaatattggacagtaacatgcacttttattc

SEQ ID NO: 60380 - DNA, 237 bp, Zea mays
  Clone ID: MRT4577_155068C.1
ggtagatgacaggcgccggacacggagaccggggggtcctacgcagagaccgcggacccttacccgccagccaaggaatgcacacagcagcccggacccccggtcctgactccccccgcgccgcacgagtcctgacaagctgcccaagggttgtatggtacggcgccaggcgccgccgcaggcgatccggaccgaccaccggaaacttccggagacacgcgggcgtacgcgagaggg

SEQ ID NO: 60381 - DNA, 408 bp, Zea mays
  unsure (1)..(408): unsure at all n locations
  Clone ID: MRT4577_155069C.1
aaaaaggtgtcgaagactccggnaagagaacagccgtgattggcttcacgtcgaccagcttgaggcgtgaaaggcgagcagcgtgttttggagccctcggtgtccttggggtggaaacgtgcacgtccttgccgttgattctaatgggcacgcaatgttattggatgaaattagtgttaccaaatcagcactatctgttgagaagataaaaatgcagctataccttaagaaaggccaatgctccgttggaagaggggttctattcaggagcaagtcctgtctgcttctgtctggagtagtgtagttgaaatgaaactccctggcaagttgaactgcttttcgaatcctttttgaaacatggaaaacaactttcagttcgtcatggtgcaagcaacacatgatcttgat

SEQ ID NO: 60382 - DNA, 809 bp, Zea mays
  Clone ID: MRT4577_15506C.1
cgggatctttatgtctctgtttcaaaaagtcacatcttttttatggatgaacgaaacaacctctcaatagagagtttcatctcactatttcatatgtcaacatacttcttaaatgctgcatataaataaccaatagaatttactcaattatatgaagatgaaacaaaacacataccgttatgtgctaccggtatggttcgagcccaccgggcctgggccactcgctgtcgttcggcggtggtagttacgacttacgagccgcgccccgcaggccgcagcattcgaccccacacgcctagccgccgccgcagccgacgcaggccatcccgactccgcccgccggctggtcggagttctccctcccggtccggaaatcctcgccgctggctcctccgtcgactccaggggacgagtacaacaggttactgcacccactcatcgtccacccttcaccgtcttcacggtctcgcacgtcgaggcacttccggcgaccatgggcggctcggcgtaaatagtttgaattctgtggtggctggcaggtacggtgcggtgggacatgcctaattgtgcagaagcagaagcaagtgtgtgtgcattatcaggcagatggatggactcgttcaggatcgacatgacagacgtgtgccgctcggtaagctgtaagctaatttaattgctcctgtgaatttcgagttggaggattaagatgagtaactgcagacgaatactagcaacaactatgacgaagatggcagagcacctcaaagagaggcgttgaacagggccatgtcatgttcgtgctggtcctg

SEQ ID NO: 60383 - DNA, 326 bp, Zea mays
  Clone ID: MRT4577_155070C.1
cccacgcgtccgctgacgcttgggcgcgagcggtattatacttcatccagctcgatgctgacatctatgagctgctagaccgtcgtcgatagcagtaaacagtgcaaaggattctctttgataatttgctgaggcacagactcttatactgtagccatttagctggatacacaccgtgctacctatctaacacagcacaatgctcagacttactagacaaaaatagggactagcatatgaatctttgaaagaatagaagatgtgtaggcacttgttgaacttgcttatacagactcaagataagtctatagattacacataatttg

SEQ ID NO: 60384 - DNA, 393 bp, Zea mays
  Clone ID: MRT4577_155071C.1
agctgagccgggcggttgataggtagtggcatggtggcggaggcagagaaccggcggctgcaatagaccgagaacatgcaacatccccgagtgcctgactatgacaccagtccgtctgcgaccccctactgcttgcctcagattccattagatatggaatcaacgtttccagaagttcatgtacgatagatccgcagggcggggccaaggcgacctatcgcgttgcacctccaaccatggctgtcacgatcagaccgaaaccggacacgtcgcagaagctggaggcggtggatatgacgcacacactgaccgccaggagtaacatggatcaggcaacttcataacaacgacactattatcctacgtccactctacctaaaaataaaggtgata

SEQ ID NO: 60385 - DNA, 994 bp, Zea mays
  Clone ID: MRT4577_155072C.1
accgccggaggacgccgcgaccgtggcaccgacctcagtgccgtcgtcggccgcctcggccatcgatttcctcaccctgtgtcaccgcctcaagaccaccaaaaggaaaggatggataaaccatagcatcaagggcccggagtccattgctgatcacatgtaccgaatggccttgatggctctgattgctggtgatctgcctgctgtggatcgagaaaggtgtatcaaaattgctattgtgcatgacattgcagaagctattgttggtgacattaccccatcggatggtatacctaaggctgaaaaaagccggcgcgaacaagcagcactagatgaaatgtgccaagttcttggtggtgggccagctgctgatgagattaaagagttgtgggaagaatatgagaacaattcttctattgaagccaatcttgtaaaagattttgataaagtggaaatgattcttcaggcattggaatatgagaaagaacatggcaaagtgctagatgagttctttctctccactgccggcaagttccagacagagatcggtaagagctgggccgctgaagtaaactcgaggagaaaggagggatgcggaaagcaggagccttcatcaaacttccacggaaacgtgttgtgatggggacggtgtggccaactagagcctggcaagtttaagtggccctggagccaacttcagcggtgggctgatggcagttcaccgattgacacggctgttcagccttcctaaataataacaggagggttatggagtgaacactagattttagtctggttagctgaaatgttcgtagttgctcgaagaccaaggggtaggtaaaactgtgtagtgtttcgttgtagcctggaatccagcgaggatgagatacttcttcttttttcaactccgtgaataatgaaagggcaatggtgtttgcccttctcaaaaaaaaaaaaaaaaaaaaaaaaaaaaaaaaaaaaaaaaaaagcccgg

SEQ ID NO: 60386 - DNA, 438 bp, Zea mays
  Clone ID: MRT4577_155073C.1
ggttggaaaccacctcagtttttataaactagacttttaaaaaccggtgctttcaaacaggccctaagtaactgtgtgcatagattttgcccaataaaaatgggcagggaagatgagaagggcaaacaccattgccctttcattattcacggagttgaaaaaagaagaagtatctcattctcgctggattccaggctacaacgaaacactacacagttttacctaccccttggtcttcgagcaactacgaacatttcagctaaccagactaaaatctagtgttcactccataaccctcctgttattatttaggaaggctgaacagccgtgtcaatcggtgaactgccatcagcccaccgctgaagttggctccagggccacttaaacttgccaggctctagttggccacaccgtccccatcacaacacgttttcgtgg

SEQ ID NO: 60387 - DNA, 675 bp, Zea mays
  Clone ID: MRT4577_155074C.1
accgccggaggacgccgcgaccgtggcaccgacctcagtgccgtcgtcggccgcctcggccatcgatttcctcaccctgtgtcaccgcctcaaggtacaagatactactaatcatgctcgtactaatcagtcgtcccctgatatgttgttccaaggccgctagggtcacaccggagatgctcacaatatttgtaagaaattctaaagtgcacacagaaagtaaaagtggctgcaccgccttgtgcatgtgcaatgatttggatcaattcattcatgcccctaatttctttgatgcttaggtccatcatatcacatgattctggtgcctattccttttgtttattctttagaccaccaaaaggaaaggatggataaaccatagcatcaagggccctgagtccattgctgatcacatgtaccgaatggccttgatggctctgattgctggtgatctgcctgctgtggatcgagaaaggtgtatcaaaattgctattgtgcatgacattgcagaaggtaggtcaaggtcatgtgtgccatgcagtacacaaattgttggtgtcttgtatgtccaatgcacttatctgatcatgaaaactacacttcacctgcgaatactttattagcttaaatgcttatttcatccacaaatccctttagtaaattagtcaaatattt

SEQ ID NO: 60388 - DNA, 640 bp, Zea mays
  unsure (1)..(640): unsure at all n locations
  Clone ID: MRT4577_155075C.1
ctctagaaggcggcgcnngccctttnntttttttttattatttatttatttatttttattttatttttttatttttattttttttttttatttttttttttttttttttttttttttttttttttttttttttttttttttttttttttttttttgggcaaaaaaaacgggtaaaaatccagaaaaagggcagaaaagtcaaacggaaaggaggttaacccttagcccggccggcaaaagggttaaaaaccaaaaaaaaaaaaggggcccgaaggaacaaccgggccccgggaaaatcaaacatgggggcccaaaccaaaaaacattaaaaaaacaaaaaggggggggatcccccaacccgggaaccccaaactcgggaaccccgggaacccccgggaaaaacaagacgggggggcccccgaaaaaaaacccccccagggttccaaaaaaaggaccaaaaagggcccccccaggggggggaaggggggaaataaaaagggggccacaaaaacaaaaaaaccctgggcccccaaaccccactgggggtggacaaaaaaagggtttcctggaagggggtaaaaaaaagggttgggggaaaccggaacgggccccatttgtttaaaaaaaaaagcaatttttg

SEQ ID NO: 60389 - DNA, 219 bp, Zea mays
  unsure (1)..(219): unsure at all n locations
  Clone ID: MRT4577_155076C.1
gcggcggacactcaacagtttttacccgattgaccggcacggaggcggcgggcaaggcgggggggaagaacaacaggaaccgcaagggaaagaagggcggggagaaaaagaccgcaacgcccnnccgcaagaacgacgccgaagacacaaaggccccaccggngaccagggcgcgcaacagcgggaagacccaagcgcgcaggacacagcggaccagga

SEQ ID NO: 60390 - DNA, 471 bp, Zea mays
  Clone ID: MRT4577_155077C.1
ggggaaaggaactttttattttgggggggccccctccctcacccaaaaacttttttattggattcccaccaaaaatcaatctaaaagggggccccccccaagatgggttgttgggagggggccgctgggtttgtcaaaacaagggggccaaagggccacaattggtgtagttgtaaaaggggggggggggtagccccaaaccgcttgtaaaaagggagcaactgttgctgggtcaaaaaggaagccccacttggtgcaactagccccctaaaaggcagaagtatttgctggtgcaaaaaaacagcgggggtcaaggcggcccattggttaaaaggaaaaaatttttttttcttaaaataggccaaaactacccggctaaaagggaaaaggtggtggtgcaaaaaaacagcaggggtcaatgtaaacagttggttaaaaggaaaaaaatttttttcttaaaatagggaaaac

SEQ ID NO: 60391 - DNA, 457 bp, Zea mays
  Clone ID: MRT4577_155078C.1
tttcttatttatggcacgccacaaaattattcaaaaaactccattctcgagctattactaataatcaatctatactagggctccatcaatgtatgggttggcgctacaacgctgttgattatgtcacaagcgacgtagtttgtatggcagccattgttgcacatgtaatagggtgccagacttaagcgcactgtgcacgcctaactgcaccagctgtcgctgtgccacgagcgcattacgggctcacatcatactagcatgcgctgaatggcgctagctgttgctgtcgcctataagctacttacatcaatgcttgcaggtgttcgaatggaataaattgctgaacgtaggcagctactaactgactgaatggtaactgttgctagcaataatcagtaaagtatactgcagtcaaccttgctgaatggaagaaactgctgctgctgatagtatgcag

SEQ ID NO: 60392 - DNA, 493 bp, Zea mays
  Clone ID: MRT4577_155079C.1
ggacgggaaaatggacccaaaattttatagccaaaacgggaaaacggaaaaccccaaaagaggaggacgggggttaaaatggagcacaacttaaggcccaaacgggccccaaaaacgcaggcaaaaccgggtacaaatttcccagggaaaataaccccgcacccaaaacggactataagctctccaataacaaaaaaaaacagccggccaagcattaactgggacttgcaggaaaattcagttttttccccccgcggcgaaaattaaaaaccaaaaaaaccaagctggggggccctttctttttgaaagggctaaaagcccgggtatatgaaagggacagggagcaaaaggccatttcctgaaccaatggcccccataaaatcagctaggacagttagggccccaaggcacactcctccaaaggctgaaggggggggaaggaatctggtcagttcccttgggagggtggactcaagagggccgggcatcacca

SEQ ID NO: 60393 - DNA, 472 bp, Zea mays
  Clone ID: MRT4577_15507C.1
ggggaggaaaacccccaaaaggtatttttggggccaaaaggggtagcgacaacctaagctagttttggttgccccatgccgggccagggttcgttgttgttttgctggtgggggggcccctgaggctgggaatgttgttgctggggctggaaaaaccccatgctggccctgggggggagggcccccatccccaaggagcccagcccagcgaggccgaggatgtcccgggggaaaaaggcccccagcccaaaaaagcccctggtaatgccgtcgcctgacccgcctccgccgcctttgtcccccccggggccggggaagctggttgtcctccaaagcccggccgccatgaccccgccgccgccattttgttgttgggggggggggggctgggcattttgcaggcccggaaggccgaggccaaagggggggggggccctcgccggggaaccccccattggggtgaacccccccc

SEQ ID NO: 60394 - DNA, 394 bp, Zea mays
  Clone ID: MRT4577_155080C.1
ccggccggaaatctccccctttcctttcttcttgtccctgggataacgccctatcacagaccgccatcatgcctcttcgctgaaccccatcaaagtcttgggcatgcaccccctatcgatgctgacttcctcttgggcggtgactccgaccgctgacaacgacactgttgttgaccccatctagagcgacaagctcctcatccagaacctctatgagatgctcaagaccgatcgtttcgaccgcaagaacaacgtgattgacggctgcttcaagcagcaccatgcgctgatgattgctggcctgccccctctggtcaaggtaatacacccgaacaacgttcatcgcgatacttcccatacccatccttgtgatagcttcgctttcgcatgacga

SEQ ID NO: 60395 - DNA, 168 bp, Zea mays
  Clone ID: MRT4577_155081C.1
aaatacggcacgagggacagctacaatggacccagcgcactgctctgggccccactccgctgagtgcctaaacacgagaggcacccatggaactccagcgcacagtagttaggtcctcccagctcgacaaggcttccaaccatagtcgggctccgcaggatgagagac

SEQ ID NO: 60396 - DNA, 628 bp, Zea mays
  Clone ID: MRT4577_155082C.1
ggttgggggtgtggtggtttgtgttgtttgtttgcctccaaacacgaaatcaatggcaagcttgaaggttataccacaactttcatggacatggccaagaatttattatttatttctctaaattaagttcctaccatctgaatgaagttaccacatcgatggatcgaattacgtcaggacttctgtcgggcctgtggtgattgcccttcttcatgtgtattcctagcaaacagaagctcatgtatttgcttctctgcagagaactctgagagtggcctttgtagggaaagctaatctcaatgtctgcacttgagttcctgagcacactctcaggtcaaaaccaaggcagtccactccgatcaccgctgcctcctctacttgaatggccttgctcctccaacagagagatttcagagcctgggtgaccttgtctccaccagctctcaggcgcgatattacgttcggtgcagaatgcgcgatgatgtccggcttagccttctggtattcttcaatctttacctttggctcagttccatacgcagtgatcaactcgatgctgaggacctcgaccttaaaaaggtggcaccactctcctttgttctttctttggcgcgtcacttgatatatg

SEQ ID NO: 60397 - DNA, 707 bp, Zea mays
  Clone ID: MRT4577_155083C.1
gccagagttatcactaccatctaggtatggaattacttaatcaatcagatggagctggtgaagcattgttgaaaatgctctggcatcatccagatgctgttctgtgctgctcctttaaggagaaacctatgtttacgtttgcaaacaaggcagggctggacatgttagaaacatctcttgttgcgctgcaagacctgacgctagacaagatcttcgacgagtcaggaaggaaagcactattctcagacatctcgaaactaatggaacagggctacgcgtacctgccgtcaggcgtgtgcatgtcaggaatgggccgccatgtttctttcgaccaagctgtagcgtggaaggtgctcggcgaggatagcaacatccactgcctggcgttctgcttcgtcaactggtccttcgtgtgactgaagcccaacccgtcgggtggttatggcgagctgacccattttttttttgtatggaaaatcatcagctgtgacaaaaggcatatgttgctaggtgtcatagtgatgcacggctacacatgatccagcattaaccaaacaaccgcgtcgccagtttctttctattcgatcagggagatgcattttctggcaaaaatcttatatttttcttgttgcaaatttggtctgtatatggaactgctgctggacgccgagaaagcccacatatgcggaaactaactatggctcgag

SEQ ID NO: 60398 - DNA, 247 bp, Zea mays
  Clone ID: MRT4577_155084C.1
ggggggggtttttttttttttttacggaggcaaaggacaactttattcctaaaccctgaggaagggggggttgtatacaggcctggggcagggaaaaagaccccaatgctttgcaacttattattagaaataacccaggggtttgtttttctcttattggcccgggctgattagtttcttcaaaaccctaacaagtgaattttacgtcagtgtaaaaagaggcaaggttaggaccttcaacccattt
